United States Patent Application Publication US 2017/0114356 A1 - sequence listing, part 28

SEQ ID NO: 36572 - DNA, 2139 bp, Zea Mays
atggctgcggcggaggcgcggcgccggtcagcggtctgggccctgctgccgctgctgctgcggctgctccacccggtcgcgctcgtgctggccaacaccgaaggtgcgttcgtggccgggcaattctcagggagggcctcggtgtctgtgtttggttatgctactcagagtgatttgaattttaacaatatatttagcattcatggttagtgtacaaagttactactatacacttgtgaagtggaacttgatgatatcttcattttttgactttttgtgctttaggctcctcttcttggatcgactgcagcagttagatctgcacatgtatatctttgtttaattatcgtctccgtattgtaagattaatttgagcttccattctacttttgctccacatatgaaacattaaaagatactctaattatgctatttaactccaagggtggaggtggaatgggtgattataaccacctgcaggttgtgtacatatctttagtacatatccattatgctatttaactccgaaaggagacaatatgcatcagtttcaacaactttgttgtttccttttcatgctgtcttataggatggcattttctgctcaatttgtccgttgctgatttcagtcggcgaactgaagaccgccgaccttgtgtctacacccgcacattctgttgcatctatacctccttctacaccagcacttcatgttgctcctgcacttttgtctacccctgtcagatgctcatctccatttatcacgccaccatattgttcctcaggttccatttagttgttgaattagttctaaaatcatagtggaaccaaaataatgtgtggatatttgcaaacgagtttctcttgaagtcatggtgtgaggaaaaaagttgattgactggcatgagggtggatacttgactgttgatttaccaatgtctcggggagaagttgtcattgggggtccaaatgtaactaaaggctatttcaaggatgaagctaaaacaaatgatgattgtgagcccatatatggagaacattataatcaatactgatcctttccataattactgtgttgcgcttgtggcagctgcacaaattgagctgtaaagctaggcttcccaacaaggagttaaaacaacaattcctcaaatttgtgctagaagcaagaggctgttaaagaagtgctctttagcaaaggtttcgtcattcttgcctaccgctgtccctttgcttcagaatacggtgaaacagaagtccttcattggctcttctcatcttggctcacatgcagtacttgaataccagtttcttcctgagcagccaagtgatgcatatgagaggggaagccagttgcgcttctatgatgctctagcagaagtgttaaactcaagggtagattcgttttctataggatcacactttacccatgtagttgagcaggcacctagctatacatttcacagtcaatcatctggttctagctgtttgtcaaatattattgctagcatggctcaaatccaaatattattgctagcatggctcaaatccacggtcaaaaattggcatccctcaagttgtcagatttgaaagctccctcgcatcccctaaaagattgggttatcatgatgaagaacatgtcacgtggacagaaaaacacaagaactatatttatggatatactatttttttcttcttttgtattattatattcatatccttttttacctttatattattattttttatatatgttgtatttgtctaatattacttcatcataatgaggaagctaagattgctagggaggttgaggctcatgaaaagagaattaaaaaggagcttgagagttgagaagcaaggtctactaaatagaaagaaagaagaacaaatgtagagggaaatggagagacatgatcacgagagatgtaatgaagagaggttcatgcgtgaaaggcaaaggaaagaagaaaattccattagcaacagagacgtatacttataactattatggtagataaaaaatgttacaatgtctctcttctatagaacgaaactgggatatcattcattgatatatgttcgattttattcaataattattatataattgtgcaccgtcgcaacgcacgggcatcg

SEQ ID NO: 36573 - DNA, 2566 bp, Zea Mays
atggctgcggcggaggcgcggcgccggtcagcggtctgggccctgctgccgctgctgctgcggctgctccacccggtcgcgctcgtgctggccaacaccgaaggtgcgttcgtggccgggcaattctcagggagggcctcggtgtctgtgtttggttatgctactcagagtgatttgaattttaacaatatatttagcattcatggttagtgtacaaagttactactatacacttgtgaagtggaacttgatgatatcttcattttttgactttttgtgctttaggctcctcttcttggatcgactgcagcagttagatctgcacatgtatatctttgtttaattatcgtctccgtattgtaagattaatttgagcttccattctacttttgctccacatatgaaacattaaaagatactctaattatgctatttaactccaagggtggaggtggaatgggtgattataaccacctgcaggttgtgtacatatctttagtacatatccattatgctatttaactccgaaaggagacaatatgcatcagtttcaacaactttgttgtttccttttcatgctgtcttataggatggcattttctgctcaatttgtccgttgctgatttcagtcgggtaatgttctttctgcacaatgacttttgcttgcaaagtcgagtttggcattatgctttgtgtagatgtatctgagaattgcatgactgcatacccttaacatgaaatttcatttttagagattagattagattagatatgtcgctgatggaagtccaactaatagcgaactgaagaccgccgaccttgtgtctacacccgcacattctgttgcatctatacctccttctacaccagcacttcatgttgctcctgcacttttgtctacccctgtcagatgctcatctccatttatcacgccaccatattgttcctcaggttccatttagttgttgaattagttctaaaatcatagtggaaccaaaataatgtgtggatatttgcaaacgagtttctcttgaagtcatggtgtgaggaaaaaaggtaatgtccttcacattattctggtttagtataccttgttgattattgacatatgttggtcatgttggtgctccactaccttgttcgtatattaaggcatgctacatttcttaactacgtaccaatgatgtggatacgatttttgcagcaaagctatttttatcctggtgttatcttatctattctcatgacagtgaatttagttttattgttgacctcccacggttcttgacttcctaacatcggccactttatttttagttgattgactggcatgagggtggatacttgactgttgatttaccaatgtctcggggagaagttgtcattgggggtccaaatgtaactaaaggctatttcaaggatgaagctaaaacaaatgatgattgtgagcccatatatggagaacattataatcaatactgatcctttccataattactgtgttgcgcttgtggcagctgcacaaattgagctgtaaagctaggcttcccaacaaggagttaaaacaacaattcctcaaatttgtgctagaagcaagaggctgttaaagaagtgctctttagcaaaggtttcgtcattcttgcctaccgctgtccctttgcttcagaatacggtgaaacagaagtccttcattggctcttctcatcttggctcacatgcagtacttgaataccagtttcttcctgagcagccaagtgatgcatatgagaggggaagccagttgcgcttctatgatgctctagcagaagtgttaaactcaagggtagattcgttttctataggatcacactttacccatgtagttgagcaggcacctagctatacatttcacagtcaatcatctggttctagctgtttgtcaaatattattgctagcatggctcaaatccaaatattattgctagcatggctcaaatccacggtcaaaaattggcatccctcaagttgtcagatttgaaagctccctcgcatcccctaaaagattgggttatcatgatgaagaacatgtcacgtggacagaaaaacacaagaactatatttatggatatactatttttttcttcttttgtattattatattcatatccttttttacctttatattattattttttatatatgttgtatttgtctaatattacttcatcataatgaggaagctaagattgctagggaggttgaggctcatgaaaagagaattaaaaaggagcttgagagttgagaagcaaggtctactaaatagaaagaaagaagaacaaatgtagagggaaatggagagacatgatcacgagagatgtaatgaagagaggttcatgcgtgaaaggcaaaggaaagaagaaaattccattagcaacagagacgtatacttataactattatggtagataaaaaatgttacaatgtctctcttctatagaacgaaactgggatatcattcattgatatatgttcgattttattcaataattattatataattgtgcaccgtcgcaacgcacgggcatcg

SEQ ID NO: 36574 - DNA, 1320 bp, Zea Mays
atggctgcggcggaggcgcggcgccggtcagcggtctgggccctgctgccgctgctgctgcggctgctccacccggtcgcgctcgtgctggccaacaccgaagttcgtggccgggcaattctcagggagggcctcggtgtctgtgtttggttatgctactcagagtgatttgaagttggccctaccctgctctttttaaggctgaaatgccctggtcagcctgaagaggaaatctctcagagaaacaaagagtcttcaaaatggtgaaaggctgcacaaattgagctgtaaagctaggcttcccaacaaggagttaaaacaacaattcctcaaatttgtgctagaagcaagaggctgttaaagaagtgctctttagcaaaggtttcgtcattcttgcctaccgctgtccctttgcttcagaatacggtgaaacagaagtccttcattggctcttctcatcttggctcacatgcagtacttgaataccagtttcttcctgagcagccaagtgatgcatatgagaggggaagccagttgcgcttctatgatgctctagcagaagtgttaaactcaagggtagattcgttttctataggatcacactttacccatgtagttgagcaggcacctagctatacatttcacagtcaatcatctggttctagctgtttgtcaaatattattgctagcatggctcaaatccaaatattattgctagcatggctcaaatccacggtcaaaaattggcatccctcaagttgtcagatttgaaagctccctcgcatcccctaaaagattgggttatcatgatgaagaacatgtcacgtggacagaaaaacacaagaactatatttatggatatactatttttttcttcttttgtattattatattcatatccttttttacctttatattattattttttatatatgttgtatttgtctaatattacttcatcataatgaggaagctaagattgctagggaggttgaggctcatgaaaagagaattaaaaaggagcttgagagttgagaagcaaggtctactaaatagaaagaaagaagaacaaatgtagagggaaatggagagacatgatcacgagagatgtaatgaagagaggttcatgcgtgaaaggcaaaggaaagaagaaaattccattagcaacagagacgtatacttataactattatggtagataaaaaatgttacaatgtctctcttctatagaacgaaactgggatatcattcattgatatatgttcgattttattcaataattattatataattgtgcaccgtcgcaacgcacgggcatcg

SEQ ID NO: 36575 - DNA, 1237 bp, Zea Mays
atggctgcggcggaggcgcggcgccggtcagcggtctgggccctgctgccgctgctgctgcggctgctccacccggtcgcgctcgtgctggccaacaccgaaggtgcgttcgtggccgggcaattctcagggagggcctcggtgtctgtgtttggttatgctactcagagtgatttgaattttaacaatatatttagcattcatgatgctcatctccatttatcacgccaccatattgttcctcaggtatgcaagcaatttttatttttgatctttctccttgttagcttgattgatctttctccagtatttatttgtgggcttggttaatctaggttccatttagttgttgaattagttctaaaatcatagtggaaccaaaataatgtgtggatatttgcaaacgagtttctcttgaagtcatggtgtgaggaaaaaaggtaatgtccttcacattattctggtttagtataccttgttgattattgacatatgttggtcatgttggtgctccactaccttgttcgtatattaaggcatgctacatttcttaactacgtaccaatgatgtggatacgatttttgcagcaaagctatttttatcctggtgttatcttatctattctcatgacagtgaatttagttttattgttgacctcccacggttcttgacttcctaacatcggccactttatttttagttgattgactggcatgagggtggatacttgactgttgatttaccaatgtctcggggagaagttgtcattgggggtccaaatgtttcgtcattcttgcctaccgctgtccctttgcttcagaatacggtgaaacagaagtccttcattggctcttctcatcttggctcacatgcagtacttgaataccagtttcttcctgagcagccaagtgatgcatatgagaggggaagccagttgcgcttctatgatgctctagcagaagtgttaaactcaaggaaagaagaacaaatgtagagggaaatggagagacatgatcacgagagatgtaatgaagagaggttcatgcgtgaaaggcaaaggaaagaagaaaattccattagcaacagagacgtatacttataactattatggtagataaaaaatgttacaatgtctctcttctatagaacgaaactgggatatcattcattgatatatgttcgattttattcaataattattatataattgtgcaccgtcgcaacgcacgggcatcg

SEQ ID NO: 36576 - DNA, 1422 bp, Zea Mays
atggctgcggcggaggcgcggcgccggtcagcggtctgggccctgctgccgctgctgctgcggctgctccacccggtcgcgctcgtgctggccaacaccgaaggtgcgttcgtggccgggcaattctcagggagggcctcggtgtctgtgtttggttatgctactcagagtgatttgaattttaacaatatatttagcattcatgatgctcatctccatttatcacgccaccatattgttcctcagttgattgactggcatgagggtggatacttgactgttgatttaccaatgtctcggggagaagttgtcattgggggtccaaatgtaactaaaggctatttcaaggatgaagctaaaacaaatgatgattctgcacaaattgagctgtaaagctaggcttcccaacaaggagttaaaacaacaattcctcaaatttgtgctagaagcaagaggctgttaaagaagtgctctttagcaaaggtttcgtcattcttgcctaccgctgtccctttgcttcagaatacggtgaaacagaagtccttcattggctcttctcatcttggctcacatgcagtacttgaataccagtttcttcctgagcagccaagtgatgcatatgagaggggaagccagttgcgcttctatgatgctctagcagaagtgttaaactcaagggtagattcgttttctataggatcacactttacccatgtagttgagcaggcacctagctatacatttcacagtcaatcatctggttctagctgtttgtcaaatattattgctagcatggctcaaatccaaatattattgctagcatggctcaaatccacggtcaaaaattggcatccctcaagttgtcagatttgaaagctccctcgcatcccctaaaagattgggttatcatgatgaagaacatgtcacgtggacagaaaaacacaagaactatatttatggatatactatttttttcttcttttgtattattatattcatatccttttttacctttatattattattttttatatatgttgtatttgtctaatattacttcatcataatgaggaagctaagattgctagggaggttgaggctcatgaaaagagaattaaaaaggagcttgagagttgagaagcaaggtctactaaatagaaagaaagaagaacaaatgtagagggaaatggagagacatgatcacgagagatgtaatgaagagaggttcatgcgtgaaaggcaaaggaaagaagaaaattccattagcaacagagacgtatacttataactattatggtagataaaaaatgttacaatgtctctcttctatagaacgaaactgggatatcattcattgatatatgttcgattttattcaataattattatataattgtgcaccgtcgcaacgcacgggcatcg

SEQ ID NO: 36577 - DNA, 1741 bp, Zea Mays
atggctgcggcggaggcgcggcgccggtcagcggtctgggccctgctgccgctgctgctgcggctgctccacccggtcgcgctcgtgctggccaacaccgaaggtgcgttcgtggccgggcaattctcagggagggcctcggtgtctgtgtttggttatgctactcagagtgatttgaattttaacaatatatttagcattcatggttagtgtacaaagttactactatacacttgtgaagtggaacttgatgatatcttcattttttgactttttgtgctttaggctcctcttcttggatcgactgcagcagttagatctgcacatgtatatctttgtttaattatcgtctccgtattgtaagattaatttgagcttccattctacttttgctccacatatgaaacattaaaagatactctaattatgctatttaactccaagggtggaggtggaatgggtgattataaccacctgcaggatggcattttctgctcaatttgtccgttgctgatttcagtcggagattagattagattagatatgtcgctgatggaagtccaactaatagcgaactgaagaccgccgaccttgtgtctacacccgcacattctgttgcatctatacctccttctacaccagcacttcatgttgctcctgcacttttgtctacccctgtcagatgctcatctccatttatcacgccaccatattgttcctcaggttccatttagttgttgaattagttctaaaatcatagtggaaccaaaataatgtgtggatatttgcaaacgagtttctcttgaagtcatggtgtgaggaaaaaaggtaatgtccttcacattattctggtttagtataccttgttgattattgacatatgttggtcatgttggtgctccactaccttgttcgtatattaaggcatgctacatttcttaactacgtaccaatgatgtggatacgatttttgcagcaaagctatttttatcctggtgttatcttatctattctcatgacagtgaatttagttttattgttgacctcccacggttcttgacttcctaacatcggccactttatttttagttgattgactggcatgagggtggatacttgactgttgatttaccaatgtctcggggagaagttgtcattgggggtccaaatgtaactaaaggctatttcaaggatgaagctaaaacaaatgatgattgtgagcccatatatggagaacattataatcaatactgatcctttccataattactgtgttgcgcttgtggcagctgcacaaattgagctgtaaagctaggcttcccaacaaggagttaaaacaacaattcctcaaatttgtgctagaagcaagaggctgttaaagaagtgctctttagcaaagattgctagggaggttgaggctcatgaaaagagaattaaaaaggagcttgagagttgagaagcaaggtctactaaatagaaagaaagaagaacaaatgtagagggaaatggagagacatgatcacgagagatgtaatgaagagaggttcatgcgtgaaaggcaaaggaaagaagaaaattccattagcaacagagacgtatacttataactattatggtagataaaaaatgttacaatgtctctcttctatagaacgaaactgggatatcattcattgatatatgttcgattttattcaataattattatataattgtgcaccgtcgcaacgcacgggcatcg

SEQ ID NO: 36578 - DNA, 2200 bp, Zea Mays
atggctgcggcggaggcgcggcgccggtcagcggtctgggccctgctgccgctgctgctgcggctgctccacccggtcgcgctcgtgctggccaacaccgaaggtgcgttcgtggccgggcaattctcagggagggcctcggtgtctgtgtttggttatgctactcagagtgatttgaattttaacaatatatttagcattcatggttagtgtacaaagttactactatacacttgtgaagtggaacttgatgatatcttcattttttgactttttgtgctttaggctcctcttcttggatcgactgcagcagttagatctgcacatgtatatctttgtttaattatcgtctccgtattgtaagattaatttgagcttccattctacttttgctccacatatgaaacattaaaagatactctaattatgctatttaactccaagggtggaggtggaatgggtgattataaccacctgcaggttgtgtacatatctttagtacatatccattatgctatttaactccgaaaggagacaatatgcatcagtttcaacaactttgttgtttccttttcatgctgtcttataggatggcattttctgctcaatttgtccgttgctgatttcagtcgggtaatgttctttctgcacaatgacttttgcttgcaaagtcgagtttggcattatgctttgtgtagatgtatctgagaattgcatgactgcatacccttaacatgaaatttcatttttagagattagattagattagatatgtcgctgatggaagtccaactaatagcgaactgaagaccgccgaccttgtgtctacacccgcacattctgttgcatctatacctccttctacaccagcacttcatgttgctcctgcacttttgtctacccctgtcagatgctcatctccatttatcacgccaccatattgttcctcagttgattgactggcatgagggtggatacttgactgttgatttaccaatgtctcggggagaagttgtcattgggggtccaaatgtaactaaaggctatttcaaggatgaagctaaaacaaatgatgattgtgagcccatatatggagaacattataatcaatactgatcctttccataattactgtgttgcgcttgtggcagctgcacaaattgagctgtaaagctaggcttcccaacaaggagttaaaacaacaattcctcaaatttgtgctagaagcaagaggctgttaaagaagtgctctttagcaaaggtttcgtcattcttgcctaccgctgtccctttgcttcagaatacggtgaaacagaagtccttcattggctcttctcatcttggctcacatgcagtacttgaataccagtttcttcctgagcagccaagtgatgcatatgagaggggaagccagttgcgcttctatgatgctctagcagaagtgttaaactcaagggtagattcgttttctataggatcacactttacccatgtagttgagcaggcacctagctatacatttcacagtcaatcatctggttctagctgtttgtcaaatattattgctagcatggctcaaatccaaatattattgctagcatggctcaaatccacggtcaaaaattggcatccctcaagttgtcagatttgaaagctccctcgcatcccctaaaagattgggttatcatgatgaagaacatgtcacgtggacagaaaaacacaagaactatatttatggatatactatttttttcttcttttgtattattatattcatatccttttttacctttatattattattttttatatatgttgtatttgtctaatattacttcatcataatgaggaagctaagattgctagggaggttgaggctcatgaaaagagaattaaaaaggagcttgagagttgagaagcaaggtctactaaatagaaagaaagaagaacaaatgtagagggaaatggagagacatgatcacgagagatgtaatgaagagaggttcatgcgtgaaaggcaaaggaaagaagaaaattccattagcaacagagacgtatacttataactattatggtagataaaaaatgttacaatgtctctcttctatagaacgaaactgggatatcattcattgatatatgttcgattttattcaataattattatataattgtgcaccgtcgcaacgcacgggcatcg

SEQ ID NO: 36579 - DNA, 1662 bp, Zea Mays
atggctgcggcggaggcgcggcgccggtcagcggtctgggccctgctgccgctgctgctgcggctgctccacccggtcgcgctcgtgctggccaacaccgaaggtgcgttcgtggccgggcaattctcagggagggcctcggtgtctgtgtttggttatgctactcagagtgatttgaagtacgttaaaaatatagattattaacagtttcatatagtgcatgttttttggccaggcagtagtatgtgatatggaatgtgattattaacatttcaatttgcttgtcttcacaacctttatactctgcagggtgtggtcatttttttgtttaattcgtttcttcattttcaaacctgaaaatgtgaatgcaaactacaaatagcttacagatcaaaattaccatgttctttttacaaaattttaggttggccctaccctgctctttttaaggctgaaatgccctggtcagcctgaagaggaaatctctcagagaaacaaagagtcttcaaaatggtgaaagggctcctcttcttggatcgactgcagcagttagatctgcacatgtatatctttgtttaattatcgtctccgtattgtaagattaatttgagcttccattctacttttgctccacatatgaaacattaaaagatactctaattatgctatttaactccaagggtggaggtggaatgggtgattataaccacctgcaggttgtgtacatatctttagtacatatccattatgctatttaactccgaaaggagacaatatgcatcagtttcaacaactttgttgtttccttttcatgctgtcttataggatggcattttctgctcaatttgtccgttgctgatttcagtcggcgaactgaagaccgccgaccttgtgtctacacccgcacattctgttgcatctatacctccttctacaccagcacttcatgttgctcctgcacttttgtctacccctgtcagatgctcatctccatttatcacgccaccatattgttcctcaggttccatttagttgttgaattagttctaaaatcatagtggaaccaaaataatgtgtggatatttgcaaacgagtttctcttgaagtcatggtgtgaggaaaaaagttgattgactggcatgagggtggatacttgactgttgatttaccaatgtctcggggagaagttgtcattgggggtccaaatgtttcgtcattcttgcctaccgctgtccctttgcttcagaatacggtgaaacagaagtccttcattggctcttctcatcttggctcacatgcagtacttgaataccagtttcttcctgagcagccaagtgatgcatatgagaggggaagccagttgcgcttctatgatgctctagcagaagtgttaaactcaaggaaagaagaacaaatgtagagggaaatggagagacatgatcacgagagatgtaatgaagagaggttcatgcgtgaaaggcaaaggaaagaagaaaattccattagcaacagagacgtatacttataactattatggtagataaaaaatgttacaatgtctctcttctatagaacgaaactgggatatcattcattgatatatgttcgattttattcaataattattatataattgtgcaccgtcgcaacgcacgggcatcg

SEQ ID NO: 36580 - DNA, 1350 bp, Zea Mays
catggttggccctaccctgctctttttaaggctgaaatgccctggtcagcctgaagaggaaatctctcagagaaacaaagagtcttcaaaatggtgaaaggttgattgactggcatgagggtggatacttgactgttgatttaccaatgtctcggggagaagttgtcattgggggtccaaatgtaactaaaggctatttcaaggatgaagctaaaacaaatgatgattgtgagcccatatatggagaacattataatcaatactgatcctttccataattactgtgttgcgcttgtggcagctgcacaaattgagctgtaaagctaggcttcccaacaaggagttaaaacaacaattcctcaaatttgtgctagaagcaagaggctgttaaagaagtgctctttagcaaaggtttcgtcattcttgcctaccgctgtccctttgcttcagaatacggtgaaacagaagtccttcattggctcttctcatcttggctcacatgcagtacttgaataccagtttcttcctgagcagccaagtgatgcatatgagaggggaagccagttgcgcttctatgatgctctagcagaagtgttaaactcaagggtagattcgttttctataggatcacactttacccatgtagttgagcaggcacctagctatacatttcacagtcaatcatctggttctagctgtttgtcaaatattattgctagcatggctcaaatccaaatattattgctagcatggctcaaatccacggtcaaaaattggcatccctcaagttgtcagatttgaaagctccctcgcatcccctaaaagattgggttatcatgatgaagaacatgtcacgtggacagaaaaacacaagaactatatttatggatatactatttttttcttcttttgtattattatattcatatccttttttacctttatattattattttttatatatgttgtatttgtctaatattacttcatcataatgaggaagctaagattgctagggaggttgaggctcatgaaaagagaattaaaaaggagcttgagagttgagaagcaaggtctactaaatagaaagaaagaagaacaaatgtagagggaaatggagagacatgatcacgagagatgtaatgaagagaggttcatgcgtgaaaggcaaaggaaagaagaaaattccattagcaacagagacgtatacttataactattatggtagataaaaaatgttacaatgtctctcttctatagaacgaaactgggatatcattcattgatatatgttcgattttattcaataattattatataattgtgcaccgtcgcaacgcacgggcatcg

SEQ ID NO: 36581 - DNA, 702 bp, Zea Mays
tcggcatctccatccttggcgcggcatgttcgtggccgggcaattctcagggagggcctcggtgtctgtgtttggttatgctactcagagtgatttgaattttaacaatatatttagcattcatgatgctcatctccatttatcacgccaccatattgttcctcagttgattgactggcatgagggtggatacttgactgttgatttaccaatgtctcggggagaagttgtcattgggggtccaaatgtttcgtcattcttgcctaccgctgtccctttgcttcagaatacggtgaaacagaagtccttcattggctcttctcatcttggctcacatgcagtacttgaataccagtttcttcctgagcagccaagtgatgcatatgagaggggaagccagttgcgcttctatgatgctctagcagaagtgttaaactcaaggaaagaagaacaaatgtagagggaaatggagagacatgatcacgagagatgtaatgaagagaggttcatgcgtgaaaggcaaaggaaagaagaaaattccattagcaacagagacgtatacttataactattatggtagataaaaaatgttacaatgtctctcttctatagaacgaaactgggatatcattcattgatatatgttcgattttattcaataattattatataattgtgcaccgtcgcaacgcacgggcatcg

SEQ ID NO: 36582 - DNA, 3000 bp, Zea Mays
cttctctgccatcggcatctccatccttggcgcggcatgttcgtggccgggcaattctcagggagggcctcggtgtctgtgtttggttatgctactcagagtgatttgaagttggccctaccctgctctttttaaggctgaaatgccctggtcagcctgaagaggaaatctctcagagaaacaaagagtcttcaaaatggtgaaagggtaatataatgattttaccttcctgctcggttattttagtgcgttgtttgccttatagagtaaaacttcccagttccttgtttctccattatgttttgtttaatttgtcttaattatgcagtatactgaaataacttacacaggagaaatttgaggtaaagtattttagaaccggacaaccttcagtttcagtattcagagttagacaatcacacttttccaaaggtatccaatatacaaatgcattagcctatgtgcgagtaaatgatccagtatatatagtcagacacatgaaaaaagccactttaaaaatcataagatttagccttattataagatagtatggcttatctgcatcttccagtataaaaatcatgtcactttaaatcattgcattgcagttcattataggatacatttcatctagagccttattatggagacatgccactgctgaatgtttagcttcaagttgttctctagagccttatatggagactgactgtttggcctgcaaaacatttctctgcagttttaacaatatatttagcattcatggttagtgtacaaagttactactatacacttgtgaagtggaacttgatgatatcttcattttttgactttttgtgctttaggctcctcttcttggatcgactgcagcagttagatctgcacatgtatatctttgtttaattatcgtctccgtattgtaagattaatttgagcttccattctacttttgctccacatatgaaacattaaaagatactctaattatgctatttaactccaagggtggaggtggaatgggtgattataaccacctgcaggttgtgtacatatctttagtacatatccattatgctatttaactccgaaaggagacaatatgcatcagtttcaacaactttgttgtttccttttcatgctgtcttataggatggcattttctgctcaatttgtccgttgctgatttcagtcggattagattagatatgtcgctgatggaagtccaactaatagcgaactgaagaccgccgaccttgtgtctacacccgcacattctgttgcatctatacctccttctacaccagcacttcatgttgctcctgcacttttgtctacccctgtcagatgctcatctccatttatcacgccaccatattgttcctcaggttccatttagttgttgaattagttctaaaatcatagtggaaccaaaataatgtgtggatatttgcaaacgagtttctcttgaagtcatggtgtgaggaaaaaaggtaatgtccttcacattattctggtttagtataccttgttgattattgacatatgttggtcatgttggtgctccactaccttgttcgtatattaaggcatgctacatttcttaactacgtaccaatgatgtggatacgatttttgcagcaaagctatttttatcctggtgttatcttatctattctcatgacagtgaatttagttttattgttgacctcccacggttcttgacttcctaacatcggccactttatttttagttgattgactggcatgagggtggatacttgactgttgatttaccaatgtctcggggagaagttgtcattgggggtccaaatgtaactaaaggctatttcaaggatgaagctaaaacaaatgatgattgtgagcccatatatggagaacattataatcaatactgatcctttccataattactgtgttgcgcttgtggcagctgcacaaattgagctgtaaagctaggcttcccaacaaggagttaaaacaacaattcctcaaatttgtgctagaagcaagaggctgttaaagaagtgctctttagcaaaggtttcgtcattcttgcctaccgctgtccctttgcttcagaatacggtgaaacagaagtccttcattggctcttctcatcttggctcacatgcagtacttgaataccagtttcttcctgagcagccaagtgatgcatatgagaggggaagccagttgcgcttctatgatgctctagcagaagtgttaaactcaagggtagattcgttttctataggatcacactttacccatgtagttgagcaggcacctagctatacatttcacagtcaatcatctggttctagctgtttgtcaaatattattgctagcatggctcaaatccaaatattattgctagcatggctcaaatccacggtcaaaaattggcatccctcaagttgtcagatttgaaagctccctcgcatcccctaaaagattgggttatcatgatgaagaacatgtcacgtggacagaaaaacacaagaactatatttatggatatactatttttttcttcttttgtattattatattcatatccttttttacctttatattattattttttatatatgttgtatttgtctaatattacttcatcataatgaggaagctaagattgctagggaggttgaggctcatgaaaagagaattaaaaaggagcttgagagttgagaagcaaggtctactaaatagaaagaaagaagaacaaatgtagagggaaatggagagacatgatcacgagagatgtaatgaagagaggttcatgcgtgaaaggcaaaggaaagaagaaaattccattagcaacagagacgtatacttataactattatggtagataaaaaatgttacaatgtctctcttctatagaacgaaactgggatatcattcattgatatatgttcgattttattcaataattattatataattgtgcaccgtcgcaacgcacgggcatcg

SEQ ID NO: 36583 - DNA, 2231 bp, Zea Mays
cttctctgccatcggcatctccatccttggcgcggcatggttggccctaccctgctctttttaaggctgaaatgccctggtcagcctgaagaggaaatctctcagagaaacaaagagtcttcaaaatggtgaaagggctcctcttcttggatcgactgcagcagttagatctgcacatgtatatctttgtttaattatcgtctccgtattgtaagattaatttgagcttccattctacttttgctccacatatgaaacattaaaagatactctaattatgctatttaactccaagggtggaggtggaatgggtgattataaccacctgcaggatggcattttctgctcaatttgtccgttgctgatttcagtcggcgaactgaagaccgccgaccttgtgtctacacccgcacattctgttgcatctatacctccttctacaccagcacttcatgttgctcctgcacttttgtctacccctgtcagatgctcatctccatttatcacgccaccatattgttcctcaggtatgcaagcaatttttatttttgatctttctccttgttagcttgattgatctttctccagtatttatttgtgggcttggttaatctaggttccatttagttgttgaattagttctaaaatcatagtggaaccaaaataatgtgtggatatttgcaaacgagtttctcttgaagtcatggtgtgaggaaaaaaggtaatgtccttcacattattctggtttagtataccttgttgattattgacatatgttggtcatgttggtgctccactaccttgttcgtatattaaggcatgctacatttcttaactacgtaccaatgatgtggatacgatttttgcagcaaagctatttttatcctggtgttatcttatctattctcatgacagtgaatttagttttattgttgacctcccacggttcttgacttcctaacatcggccactttatttttagttgattgactggcatgagggtggatacttgactgttgatttaccaatgtctcggggagaagttgtcattgggggtccaaatgtaactaaaggctatttcaaggatgaagctaaaacaaatgatgattgtgagcccatatatggagaacattataatcaatactgatcctttccataattactgtgttgcgcttgtggcagctgcacaaattgagctgtaaagctaggcttcccaacaaggagttaaaacaacaattcctcaaatttgtgctagaagcaagaggctgttaaagaagtgctctttagcaaaggtttcgtcattcttgcctaccgctgtccctttgcttcagaatacggtgaaacagaagtccttcattggctcttctcatcttggctcacatgcagtacttgaataccagtttcttcctgagcagccaagtgatgcatatgagaggggaagccagttgcgcttctatgatgctctagcagaagtgttaaactcaagggtagattcgttttctataggatcacactttacccatgtagttgagcaggcacctagctatacatttcacagtcaatcatctggttctagctgtttgtcaaatattattgctagcatggctcaaatccaaatattattgctagcatggctcaaatccacggtcaaaaattggcatccctcaagttgtcagatttgaaagctccctcgcatcccctaaaagattgggttatcatgatgaagaacatgtcacgtggacagaaaaacacaagaactatatttatggatatactatttttttcttcttttgtattattatattcatatccttttttacctttatattattattttttatatatgttgtatttgtctaatattacttcatcataatgaggaagctaagattgctagggaggttgaggctcatgaaaagagaattaaaaaggagcttgagagttgagaagcaaggtctactaaatagaaagaaagaagaacaaatgtagagggaaatggagagacatgatcacgagagatgtaatgaagagaggttcatgcgtgaaaggcaaaggaaagaagaaaattccattagcaacagagacgtatacttataactattatggtagataaaaaatgttacaatgtctctcttctatagaacgaaactgggatatcattcattgatatatgttcgattttattcaataattattatataattgtgcaccgtcgcaacgcacgggcatcg

SEQ ID NO: 36584 - DNA, 5192 bp, Zea Mays
ctcgcgcccgccctcgttcccctcacccagcctttcgcacaaacaacccatccgctccatctgcgagcaagctctagcgatctagcagcatgcaggccctatgacgctcgccatcctcatccgggagcgtggccatgcctccgcccgcctcttcccccacccccggtgccccttccacacaccccccgcaccgctgtcctgcccctctcccctcgcacacccactcccttctaccatctccatgcttggcgccctcaccacctccccgaccgcctctgagctcatcgccttcccccatagcccgaacgagatatttgcgtccgacccgcccatcgacgtggacgccatcatggagaacgagctacggaagaaggacggcggtgcggatgtggaacatctcagatctgtcactctatctccggcgacctgggtcgggcgaggcacttcttttatgtgatgcctgagtggaacttggtatcctggaacaaaatgttgggcgcgtatgcctgtggcaggatgctcaccgaggcgcgggacctgttcgacgcaatgcttgccaggaacagcgccaccttccgataattattagctcgcctcccctcccattttctcagtacaatctactccatgttgttgctgtatgatcagacaaaattcttctatcaggttcgcccgatgagaagaaaggaaaaaaagtactctgaattctgctttctcacgctcgctgttcatcgattcccgagccgattagcagagagtctgctgtttcttctctctgaatttggatggagagactgagctccgaattcagtttcgacacggacgcgggatgatgaatcagttggtcttttttcttgtgctgctgttgggttttcttagattgaggtggtggcacgcccaaagttcttccttccctcactctgcccaaccacgtagtatctcggttcctttgaattctctctctgtttctagcgttggggccctcggggttggatttatgacctggatggatgaattctctgaattcccccttcctctttggatgtttctaccattggaagaaagccaagctctgttccctttactcctgccccctttttttatgtggttctacttgtgctgtgttgcaattacttattactgcaccccaagtgcgttttcgaccaaggaaatcttacgtcttttcatcttcttacttattactgcaccccaagtggtccactccacatgatggccatgtctgcgttgtttgaggctatattattactcattctaaaggatggtcaaggtggtgatgaaaggaaggtatcagaagtccaaaagcacttagtgcccagccgacagcgatgaggagcatgccgcagggcaccgagcaagcgaaaaaagatgggccagctgtctgtgctcacgaggatgcacatcttctgacgttagttaagcctgacaagcacggggatgaacatcgaatggaggcccctctcttgtcctacaagtgtgaggtcgatgacaaggggttttggacgaaactgaagactctatccactagtttatcaaggagctgatggcaccaccaccatatctacggtatgtttcagggtgaagcaaggccacaatactataatcctgatcagttaactggcgttaaggatttgtaatgttttcactgcccgttggtttaggcttcatgagacagtcaaactatcgaactgcactatatgagacaaccaaacacttcgatagtttggtcaacgaagaacatgtttacaagatgcacaatgtagggttcaacattaatttaggtgatcattttcgacatataagtggtcccatggaattgtatctcaccagataaattgttgtggagtcgtacactgttctatttcaaatgccgccattcccaaaacatatattcttggaggccctggcagcggtacaaggtgtcaacataattgcttatggttaagcattatatatttactctttagaaattatttgtgcgattccatttcaatctatttgggtagacatatttatatcattctgatttgtcgtcactattatactcacgccgcccgtcgccagggccctaagtccattggagggtcgcaatctgtgttccgtggcatcgcacgggcacgttcctagtgagtagatgaagactagaaaataaaataaaaatgcatctcatgtggattttgtttgagcattcagatatagtttgcatttcaaaaccaaacttgatattgaatttgaataaaggaaatagaaatagaaaaaaaaactaaaatagaaaagaaaaggaggccaaacctattaccggaccgctttaccacctcgtcgacccaactcccgcaccaccatgtgctccctcacgcgtagacatggggcctcgcatgtcggccaaactagtcatcgcgattgggttgttgctggcttgctgcggtcgccaaacgggcccctcccgtctgcccaccgggctatatgcgcatgcggagtcactcacactgtccatgggcccacgtgtcagcctcacactaggctcgcccaggggcttctgtgtcacaggcatgtggacctcaacccttcttccacctcgcgttcattgcgacctggcgataagttcgcctaagaacgcgatcgcgtaaccactgcggtgcccagaccgcttcggttgaaggaatccctgccttggcttcgcactatatctctacaattccttaagagtataaggagggcgtccaccaccctcaccctggttccgccctccccccgccgctcgccgctaatctcgccgcgcacgccccctccctcgcgtccacagctagcttgccctcgccttcgctgaatccgcccctccccgcactcgcgcatggaaccacccagcctccgcccccgtccaccttggccccggcaccgtaggcggatctgtgcctttcctcgcccgcgtccacccccatcgcctcctcctacaccttctccgccatcggcatcatcgcctccgtcctcggccctccctgcacactgcaaccgcctcctgacgatgctcgcgtgggatggtgacggtgacgcggcgatccgtggcttgtgccccctccgccgcctccagcaccttctctgccatcggcatctccatccttggcgcggcatggttggccctaccctgctctttttaaggctgaaatgccctggtcagcctgaagaggaaatctctcagagaaacaaagagtcttcaaaatggtgaaagggatggcattttctgctcaatttgtccgttgctgatttcagtcggagattagattagattagatatgtcgctgatggaagtccaactaatagcgaactgaagaccgccgaccttgtgtctacacccgcacattctgttgcatctatacctccttctacaccagcacttcatgttgctcctgcacttttgtctacccctgtcagatgctcatctccatttatcacgccaccatattgttcctcaggtatgcaagcaatttttatttttgatctttctccttgttagcttgattgatctttctccagtatttatttgtgggcttggttaatctaggttccatttagttgttgaattagttctaaaatcatagtggaaccaaaataatgtgtggatatttgcaaacgagtttctcttgaagtcatggtgtgaggaaaaaaggtaatgtccttcacattattctggtttagtataccttgttgattattgacatatgttggtcatgttggtgctccactaccttgttcgtatattaaggcatgctacatttcttaactacgtaccaatgatgtggatacgatttttgcagcaaagctatttttatcctggtgttatcttatctattctcatgacagtgaatttagttttattgttgacctcccacggttcttgacttcctaacatcggccactttatttttagttgattgactggcatgagggtggatacttgactgttgatttaccaatgtctcggggagaagttgtcattgggggtccaaatgtaactaaaggctatttcaaggatgaagctaaaacaaatgatgattgtgagcccatatatggagaacattataatcaatactgatcctttccataattactgtgttgcgcttgtggcagctgcacaaattgagctgtaaagctaggcttcccaacaaggagttaaaacaacaattcctcaaatttgtgctagaagcaagaggctgttaaagaagtgctctttagcaaaggtttcgtcattcttgcctaccgctgtccctttgcttcagaatacggtgaaacagaagtccttcattggctcttctcatcttggctcacatgcagtacttgaataccagtttcttcctgagcagccaagtgatgcatatgagaggggaagccagttgcgcttctatgatgctctagcagaagtgttaaactcaagggtagattcgttttctataggatcacactttacccatgtagttgagcaggcacctagctatacatttcacagtcaatcatctggttctagctgtttgtcaaatattattgctagcatggctcaaatccaaatattattgctagcatggctcaaatccacggtcaaaaattggcatccctcaagttgtcagatttgaaagctccctcgcatcccctaaaagattgggttatcatgatgaagaacatgtcacgtggacagaaaaacacaagaactatatttatggatatactatttttttcttcttttgtattattatattcatatccttttttacctttatattattattttttatatatgttgtatttgtctaatattacttcatcataatgaggaagctaagattgctagggaggttgaggctcatgaaaagagaattaaaaaggagcttgagagttgagaagcaaggtctactaaatagaaagaaagaagaacaaatgtagagggaaatggagagacatgatcacgagagatgtaatgaagagaggttcatgcgtgaaaggcaaaggaaagaagaaaattccattagcaacagagacgtatacttataactattatggtagataaaaaatgttacaatgtctctcttctatagaacgaaactgggatatcattcattgatatatgttcgattttattcaataattattatataattgtgcaccgtcgcaacgcacgggcatcg

SEQ ID NO: 36585 - DNA, 4162 bp, Zea Mays
ctcgcgcccgccctcgttcccctcacccagcctttcgcacaaacaacccatccgctccatctgcgagcaagctctagcgatctagcagcatgcaggccctatgacgctcgccatcctcatccgggagcgtggccatgcctccgcccgcctcttcccccacccccggtgccccttccacacaccccccgcaccgctgtcctgcccctctcccctcgcacacccactcccttctaccatctccatgcttggcgccctcaccacctccccgaccgcctctgagctcatcgccttcccccatagcccgaacgagatatttgcgtccgacccgcccatcgacgtggacgccatcatggagaacgagctacggaagaaggacggcggtgcggatgtggaacatctcagatctgtcactctatctccggcgacctgggtcgggcgaggcacttcttttatgtgatgcctgagtggaacttggtatcctggaacaaaatgttgggcgcgtatgcctgtggcaggatgctcaccgaggcgcgggacctgttcgacgcaatgcttgccaggaacagcgccaccttccgataattattagctcgcctcccctcccattttctcagtacaatctactccatgttgttgctgtatgatcagacaaaattcttctatcaggttcgcccgatgagaagaaaggaaaaaaagtactctgaattctgctttctcacgctcgctgttcatcgattcccgagccgattagcagagagtctgctgtttcttctctctgaatttggatggagagactgagctccgaattcagtttcgacacggacgcgggatgatgaatcagttggtcttttttcttgtgctgctgttgggttttcttagattgaggtggtggcacgcccaaagttcttccttccctcactctgcccaaccacgtagtatctcggttcctttgaattctctctctgtttctagcgttggggccctcggggttggatttatgacctggatggatgaattctctgaattcccccttcctctttggatgtttctaccattggaagaaagccaagctctgttccctttactcctgccccctttttttatgtggttctacttgtgctgtgttgcaattacttattactgcaccccaagtgcgttttcgaccaaggaaatcttacgtcttttcatcttcttacttattactgcaccccaagtggtccactccacatgatggccatgtctgcgttgtttgaggctatattattactcattctaaaggatggtcaaggtggtgatgaaaggaaggtatcagaagtccaaaagcacttagtgcccagccgacagcgatgaggagcatgccgcagggcaccgagcaagcgaaaaaagatgggccagctgtctgtgctcacgaggatgcacatcttctgacgttagttaagcctgacaagcacggggatgaacatcgaatggaggcccctctcttgtcctacaagtgtgaggtcgatgacaaggggttttggacgaaactgaagactctatccactagtttatcaaggagctgatggcaccaccaccatatctacggtatgtttcagggtgaagcaaggccacaatactataatcctgatcagttaactggcgttaaggatttgtaatgttttcactgcccgttggtttaggcttcatgagacagtcaaactatcgaactgcactatatgagacaaccaaacacttcgatagtttggtcaacgaagaacatgtttacaagatgcacaatgtagggttcaacattaatttaggtgatcattttcgacatataagtggtcccatggaattgtatctcaccagataaattgttgtggagtcgtacactgttctatttcaaatgccgccattcccaaaacatatattcttggaggccctggcagcggtacaaggtgtcaacataattgcttatggttaagcattatatatttactctttagaaattatttgtgcgattccatttcaatctatttgggtagacatatttatatcattctgatttgtcgtcactattatactcacgccgcccgtcgccagggccctaagtccattggagggtcgcaatctgtgttccgtggcatcgcacgggcacgttcctagtgagtagatgaagactagaaaataaaataaaaatgcatctcatgtggattttgtttgagcattcagatatagtttgcatttcaaaaccaaacttgatattgaatttgaataaaggaaatagaaatagaaaaaaaaactaaaatagaaaagaaaaggaggccaaacctattaccggaccgctttaccacctcgtcgacccaactcccgcaccaccatgtgctccctcacgcgtagacatggggcctcgcatgtcggccaaactagtcatcgcgattgggttgttgctggcttgctgcggtcgccaaacgggcccctcccgtctgcccaccgggctatatgcgcatgcggagtcactcacactgtccatgggcccacgtgtcagcctcacactaggctcgcccaggggcttctgtgtcacaggcatgtggacctcaacccttcttccacctcgcgttcattgcgacctggcgataagttcgcctaagaacgcgatcgcgtaaccactgcggtgcccagaccgcttcggttgaaggaatccctgccttggcttcgcactatatctctacaattccttaagagtataaggagggcgtccaccaccctcaccctggttccgccctccccccgccgctcgccgctaatctcgccgcgcacgccccctccctcgcgtccacagctagcttgccctcgccttcgctgaatccgcccctccccgcactcgcgcatggaaccacccagcctccgcccccgtccaccttggccccggcaccgtaggcggatctgtgcctttcctcgcccgcgtccacccccatcgcctcctcctacaccttctccgccatcggcatcatcgcctccgtcctcggccctccctgcacactgcaaccgcctcctgacgatgctcgcgtgggatggtgacggtgacgcggcgatccgtggcttgtgccccctccgccgcctccagcaccttctctgccatcggcatctccatccttggcgcggcatggttggccctaccctgctctttttaaggctgaaatgccctggtcagcctgaagaggaaatctctcagagaaacaaagagtcttcaaaatggtgaaaggcgaactgaagaccgccgaccttgtgtctacacccgcacattctgttgcatctatacctccttctacaccagcacttcatgttgctcctgcacttttgtctacccctgtcagatgctcatctccatttatcacgccaccatattgttcctcagttgattgactggcatgagggtggatacttgactgttgatttaccaatgtctcggggagaagttgtcattgggggtccaaatgtaactaaaggctatttcaaggatgaagctaaaacaaatgatgattgtgagcccatatatggagaacattataatcaatactgatcctttccataattactgtgttgcgcttgtggcagctgcacaaattgagctgtaaagctaggcttcccaacaaggagttaaaacaacaattcctcaaatttgtgctagaagcaagaggctgttaaagaagtgctctttagcaaaggtttcgtcattcttgcctaccgctgtccctttgcttcagaatacggtgaaacagaagtccttcattggctcttctcatcttggctcacatgcagtacttgaataccagtttcttcctgagcagccaagtgatgcatatgagaggggaagccagttgcgcttctatgatgctctagcagaagtgttaaactcaaggaaagaagaacaaatgtagagggaaatggagagacatgatcacgagagatgtaatgaagagaggttcatgcgtgaaaggcaaaggaaagaagaaaattccattagcaacagagacgtatacttataactattatggtagataaaaaatgttacaatgtctctcttctatagaacgaaactgggatatcattcattgatatatgttcgattttattcaataattattatataattgtgcaccgtcgcaacgcacgggcatcg

SEQ ID NO: 36586 - DNA, 2014 bp, Zea Mays
aaacaacccatccgctccatctgcgagcaagctctagcgatctagcagcatgcaggccctatgacgctcgccatcctcatccgggagcgtggccatgcctccgcccgcctcttcccccacccccggtgccccttccacacaccccccgcaccgctgtcctgcccctctcccctcgcacacccactcccttctaccatctccatgcttggcgccctcaccacctccccgaccgcctctgagctcatcgccttcccccatagcccgaacgagatatttgcgtccgacccgcccatcgacgtggacgccatcatggagaacgagctacggaagaaggacggcggtgcggatgtggaacatctcagatctgtcactctatctccggcgacctgggtcgggcgaggcacttcttttatgtgatgcctgagtggaacttggtatcctggaacaaaatgttgggcgcgtatgcctgtggcaggatgctcaccgaggcgcgggacctgttcgacgcaatgcttgccaggaacagcgccaccttccgataattattagctcgcctcccctcccattttctcagtacaatctactccatgttgttgctgtatgatcagacaaaattcttctatcaggttcgcccgatgagaagaaaggaaaaaaagtactctgaattctgctttctcacgctcgctgttcatcgattcccgagccgattagcagagagtctgctgtttcttctctctgaatttggatggagagactgagctccgaattcagtttcgacacggacgcgggatgatgaatcagttggtcttttttcttgtgctgctgttgggttttcttagattgaggtggtggcacgcccaaagttcttccttccctcactctgcccaaccacgtagtatctcggttcctttgaattctctctctgtttctagcgttggggccctcggggttggatttatgacctggatggatgaattctctgaattcccccttcctctttggatgtttctaccattggaagaaagccaagctctgttccctttactcctgccccctttttttatgtggttctacttgtgctgtgttgcaattacttattactgcaccccaagtgcgttttcgaccaaggaaatcttacgtcttttcatcttcttacttattactgcaccccaagtggtccactccacatgatggccatgtctgcgttgtttgaggctatattattactcattctaaaggatggtcaaggtggtgatgaaaggaaggtatcagaagtccaaaagcacttagtgcccagccgacagcgatgaggagcatgccgcagggcaccgagcaagcgaaaaaagatgggccagctgtctgtgctcacgaggatgcacatcttctgacgttagttaagcctgacaagcacggggatgaacatcgaatggtaggaggcccctctcttgtcctacaagtgtgaggtcgatgacaaggggttttggacgaaactgaagactctatccactagtttatcaaggagctgatggcaccaccaccatatctacgggtgaagcaaggccacaatactataatcctgatcagttaactggcgttaaggatttgtaatgttttcactgcccgttggtttaggcttcatgagacagtcaaactatcgaactgcactatatgagacaaccaaacacttcgatagtttggtcaacgaagaacatgtttacaagatgcacaatgtagggttcaacattaatttaggtgatcattttcgacatataagtggtcccatggaattgtatctcaccagataaattgttgtggagtcgtacactgttctatttcaaatgccgccattcccaaaacatatattcttggaggccctggcagcggtacaaggtgtcaacataattgcttatggttaagcattatatatttactctttagaaattatttgtgcgattccatttcaatctatttgggtagacatatttatatcattctgatttgtcgtcactattat

SEQ ID NO: 36587 - DNA, 1494 bp, Zea Mays
ccctcacccagcctttcgcacaaacaacccatccgctccatctgcgagcaagctctagcgatctagcagcatgcaggccctatgacgctcgccatcctcatccgggagcgtggccatgcctccgcccgcctcttcccccacccccggtgccccttccacacaccccccgcaccgctgtcctgcccctctcccctcgcacacccactcccttctaccatctccatgcttggcgccctcaccacctccccgaccgcctctgagctcatcgccttcccccatagcccgaacgagatatttgcgtccgacccgcccatcgacgtggacgccatcatggagaacgagctacggaagaaggacggcggtgcggatgtggaacatctcagatctgtcactctatctccggcgacctgggtcgggcgaggcacttcttttatgtgatgcctgagtggaacttggtatcctggaacaaaatgttgggcgcgtatgcctgtggcaggatgctcaccgaggcgcgggacctgttcgacgcaatgcttgccaggaacagcgccaccttccgataattattagctcgcctcccctcccattttctcagtacaatctactccatgttgttgctgtatgatcagacaaaattcttctatcagtggtccactccacatgatggccatgtctgcgttgtttgaggctatattattactcattctaaaggatggtcaaggtggtgatgaaaggaaggtatcagaagtccaaaagcacttagtgcccagccgacagcgatgaggagcatgccgcagggcaccgagcaagcgaaaaaagatgggccagctgtctgtgctcacgaggatgcacatcttctgacgttagttaagcctgacaagcacggggatgaacatcgaatggaggcccctctcttgtcctacaagtgtgaggtcgatgacaaggggttttggacgaaactgaagactctatccactagtttatcaaggagctgatggcaccaccaccatatctacggtatgtttcagggtgaagcaaggccacaatactataatcctgatcagttaactggcgttaaggatttgtaatgttttcactgcccgttggtttaggcttcatgagacagtcaaactatcgaactgcactatatgagacaaccaaacacttcgatagtttggtcaacgaagaacatgtttacaagatgcacaatgtagggttcaacattaatttaggtgatcattttcgacatataagtggtcccatggaattgtatctcaccagataaattgttgtggagtcgtacactgttctatttcaaatgccgccattcccaaaacatatattcttggaggccctggcagcggtacaaggtgtcaacataattgcttatggttaagcattatatatttactctttagaaattatttgtgcgattccatttcaatctatttgggtagacatatttatatcattctgatttgtcgtcactattat

SEQ ID NO: 36588 - DNA, 2053 bp, Zea Mays
ctcgttcccctcacccagcctttcgcacaaacaacccatccgctccatctgcgagcaagctctagcgatctagcagcatgcaggccctatgacgctcgccatcctcatccgggagcgtggccatgcctccgcccgcctcttcccccacccccggtgccccttccacacaccccccgcaccgctgtcctgcccctctcccctcgcacacccactcccttctaccatctccatgcttggcgccctcaccacctccccgaccgcctctgagctcatcgccttcccccatagcccgaacgagatatttgcgtccgacccgcccatcgacgtggacgccatcatggagaacgagctacggaagaaggacggcggtgcggatgtggaacatctcagatctgtcactctatctccggcgacctgggtcgggcgaggcacttcttttatgtgatgcctgagtggaacttggtatcctggaacaaaatgttgggcgcgtatgcctgtggcaggatgctcaccgaggcgcgggacctgttcgacgcaatgcttgccaggaacagcgccaccttccgataattattagctcgcctcccctcccattttctcagtacaatctactccatgttgttgctgtatgatcagacaaaattcttctatcaggttcgcccgatgagaagaaaggaaaaaaagtactctgaattctgctttctcacgctcgctgttcatcgattcccgagccgattagcagagagtctgctgtttcttctctctgaatttggatggagagactgagctccgaattcagtttcgacacggacgcgggatgatgaatcagttggtcttttttcttgtgctgctgttgggttttcttagattgaggtggtggcacgcccaaagttcttccttccctcactctgcccaaccacgtagtatctcggttcctttgaattctctctctgtttctagcgttggggccctcggggttggatttatgacctggatggatgaattctctgaattcccccttcctctttggatgtttctaccattggaagaaagccaagctctgttccctttactcctgccccctttttttatgtggttctacttgtgctgtgttgcaattacttattactgcaccccaagtgcgttttcgaccaaggaaatcttacgtcttttcatcttcttacttattactgcaccccaagtggtccactccacatgatggccatgtctgcgttgtttgaggctatattattactcattctaaaggatggtcaaggtggtgatgaaaggaaggtatcagaagtccaaaagcacttagtgcccagccgacagcgatgaggagcatgccgcagggcaccgagcaagcgaaaaaagatgggccagctgtctgtgctcacgaggatgcacatcttctgacgttagttaagcctgacaagcacggggatgaacatcgaatggtaggaggcccctctcttgtcctacaagtgtgaggtcgatgacaaggggttttggacgaaactgaagactctatccactagtttatcaaggagctgatggcaccaccaccatatctacggtatgtttcagggtgaagcaaggccacaatactataatcctgatcagttaactggcgttaaggatttgtaatgttttcactgcccgttggtttaggcttcatgagacagtcaaactatcgaactgcactatatgagacaaccaaacacttcgatagtttggtcaacgaagaacatgtttacaagatgcacaatgtagggttcaacattaatttaggtgatcattttcgacatataagtggtcccatggaattgtatctcaccagataaattgttgtggagtcgtacactgttctatttcaaatgccgccattcccaaaacatatattcttggaggccctggcagcggtacaaggtgtcaacataattgcttatggttaagcattatatatttactctttagaaattatttgtgcgattccatttcaatctatttgggtagacatatttatatcattctgatttgtcgtcactattat

SEQ ID NO: 36589 - DNA, 2048 bp, Zea Mays
cgcgcccgccctcgttcccctcacccagcctttcgcacaaacaacccatccgctccatctgcgagcaagctctagcgatctagcagcatgcaggccctatgacgctcgccatcctcatccgggagcgtggccatgcctccgcccgcctcttcccccacccccggtgccccttccacacaccccccgcaccgctgtcctgcccctctcccctcgcacacccactcccttctaccatctccatgcttggcgccctcaccacctccccgaccgcctctgagctcatcgccttcccccatagcccgaacgagatatttgcgtccgacccgcccatcgacgtggacgccatcatggagaacgagctacggaagaaggacggcggtgcggatgtggaacatctcagatctgtcactctatctccggcgacctgggtcgggcgaggcacttcttttatgtgatgcctgagtggaacttggtatcctggaacaaaatgttgggcgcgtatgcctgtggcaggatgctcaccgaggcgcgggacctgttcgacgcaatgcttgccaggaacagcgccaccttccgataattattagctcgcctcccctcccattttctcagtacaatctactccatgttgttgctgtatgatcagacaaaattcttctatcaggttcgcccgatgagaagaaaggaaaaaaagtactctgaattctgctttctcacgctcgctgttcatcgattcccgagccgattagcagagagtctgctgtttcttctctctgaatttggatggagagactgagctccgaattcagtttcgacacggacgcgggatgatgaatcagttggtcttttttcttgtgctgctgttgggttttcttagattgaggtggtggcacgcccaaagttcttccttccctcactctgcccaaccacgtagtatctcggttcctttgaattctctctctgtttctagcgttggggccctcggggttggatttatgacctggatggatgaattctctgaattcccccttcctctttggatgtttctaccattggaagaaagccaagctctgttccctttactcctgccccctttttttatgtggttctacttgtgctgtgttgcaattacttattactgcaccccaagtgcgttttcgaccaaggaaatcttacgtcttttcatcttcttacttattactgcaccccaagtggtccactccacatgatggccatgtctgcgttgtttgaggctatattattactcattctaaaggatggtcaaggtggtgatgaaaggaaggtatcagaagtccaaaagcacttagtgcccagccgacagcgatgaggagcatgccgcagggcaccgagcaagcgaaaaaagatgggccagctgtctgtgctcacgaggatgcacatcttctgacgttagttaagcctgacaagcacggggatgaacatcgaatggaggcccctctcttgtcctacaagtgtgaggtcgatgacaaggggttttggacgaaactgaagactctatccactagtttatcaaggagctgatggcaccaccaccatatctacgggtgaagcaaggccacaatactataatcctgatcagttaactggcgttaaggatttgtaatgttttcactgcccgttggtttaggcttcatgagacagtcaaactatcgaactgcactatatgagacaaccaaacacttcgatagtttggtcaacgaagaacatgtttacaagatgcacaatgtagggttcaacattaatttaggtgatcattttcgacatataagtggtcccatggaattgtatctcaccagataaattgttgtggagtcgtacactgttctatttcaaatgccgccattcccaaaacatatattcttggaggccctggcagcggtacaaggtgtcaacataattgcttatggttaagcattatatatttactctttagaaattatttgtgcgattccatttcaatctatttgggtagacatatttatatcattctgatttgtcgtcactattat

SEQ ID NO: 36590 - DNA, 2757 bp, Zea Mays
cacaaacaacccatccgctccatctgcgagcaagctctagcgatctagcagcatgcaggccctatgacgctcgccatcctcatccgggagcgtggccatgcctccgcccgcctcttcccccacccccggtgccccttccacacaccccccgcaccgctgtcctgcccctctcccctcgcacacccactcccttctaccatctccatgcttggcgccctcaccacctccccgaccgcctctgagctcatcgccttcccccatagcccgaacgagatatttgcgtccgacccgcccatcgacgtggacgccatcatggagaacgagctacggaagaaggacggcggtgcggatgtggaacatctcagatctgtcactctatctccggcgacctgggtcgggcgaggcacttcttttatgtgatgcctgagtggaacttggtatcctggaacaaaatgttgggcgcgtatgcctgtggcaggatgctcaccgaggcgcgggacctgttcgacgcaatgcttgccaggaacagcgccaccttccgataattattagctcgcctcccctcccattttctcagtacaatctactccatgttgttgctgtatgatcagacaaaattcttctatcaggttcgcccgatgagaagaaaggaaaaaaagtactctgaattctgctttctcacgctcgctgttcatcgattcccgagccgattagcagagagtctgctgtttcttctctctgaatttggatggagagactgagctccgaattcagtttcgacacggacgcgggatgatgaatcagttggtcttttttcttgtgctgctgttgggttttcttagattgaggtggtggcacgcccaaagttcttccttccctcactctgcccaaccacgtagtatctcggttcctttgaattctctctctgtttctagcgttggggccctcggggttggatttatgacctggatggatgaattctctgaattcccccttcctctttggatgtttctaccattggaagaaagccaagctctgttccctttactcctgccccctttttttatgtggttctacttgtgctgtgttgcaattacttattactgcaccccaagtgcgttttcgaccaaggaaatcttacgtcttttcatcttcttacttattactgcaccccaagtggtccactccacatgatggccatgtctgcgttgtttgaggctatattattactcattctaaaggatggtcaaggtggtgatgaaaggaaggtatcagaagtccaaaagcacttagtgcccagccgacagcgatgaggagcatgccgcagggcaccgagcaagcgaaaaaagatgggccagctgtctgtgctcacgaggatgcacatcttctgacgttagttaagcctgacaagcacggggatgaacatcgaatggaggcccctctcttgtcctacaagtgtgaggtcgatgacaaggggttttggacgaaactgaagactctatccactagtttatcaaggagctgatggcaccaccaccatatctacggtagctattttaatccagctgaaggcatctcaaatatgtattcctataataaaacaaccacaattaaactttacatagccaactaagttactaaagagaatctgcattatgtagctgagaacacctaaaaaaagaacagatgatcgacaggtatttgtacaaacaaagaatcagaattcaagatatcaaactcttatatgtgtcagtggtccatgtccaagagaatgttggaaatgttaccatttatcattacatgccaaatacatgtagcccaccaacagtatagtgaatttcagccatagtagttttccccctttggagtaagatcgatcacagtacattaacatgtagctagaggaacttcacacggtgcaactaagttttaggactaaatttccttcttctcatgtttgaggcaaggacattcttcgccgatcagctaaactttgttgtggtataatctgtccactccaatttaaattcgaattcttgtcttcataggtatattctcaacttgatctataattctgtatgcttgcatttttcttgattttaatttaggattcaatgcagttcgaaggaaacatttagtgtcagattatatgtggtcccatatggtcacatagatctcgcatgaaaaggaacacacgttgataacatggtccaaccggttaacatcatatcatcaattcatacagatttaacatagcatcattaatctgagtgcagtaggcaggtcactaggacagtgtgactaaaaaaagactaggctagcaaagtcataagacaaatagtgatataaaagcaaacaaatgagctgccattatgtaaatatactagagttatctcaaatcccagttttgcaaaacatttcctttaaagtatatagtgcaatatgaaagacatatgtggccttcggtattctcttttcagcatggatctcttgactgaagcctattctgcttgcatctggagggaaactgaatcattacactggataatggtaatgggccatttcagttgctgaaatctcacaaagcaagtcaaatacattcatagccaaccaaatttttcttaaaagtggaaagtggaagaagcctcagatgccatgtgtcggggaccataattaggggtaccctcaaggctcctaattctcagctggtaacccccatcagcataaagctgcaaaggcttgatgggtgcaattaag

SEQ ID NO: 36591 - DNA, 2786 bp, Zea Mays
ctcgttcccctcacccagcctttcgcacaaacaacccatccgctccatctgcgagcaagctctagcgatctagcagcatgcaggccctatgacgctcgccatcctcatccgggagcgtggccatgcctccgcccgcctcttcccccacccccggtgccccttccacacaccccccgcaccgctgtcctgcccctctcccctcgcacacccactcccttctaccatctccatgcttggcgccctcaccacctccccgaccgcctctgagctcatcgccttcccccatagcccgaacgagatatttgcgtccgacccgcccatcgacgtggacgccatcatggagaacgagctacggaagaaggacggcggtgcggatgtggaacatctcagatctgtcactctatctccggcgacctgggtcgggcgaggcacttcttttatgtgatgcctgagtggaacttggtatcctggaacaaaatgttgggcgcgtatgcctgtggcaggatgctcaccgaggcgcgggacctgttcgacgcaatgcttgccaggaacagcgccaccttccgataattattagctcgcctcccctcccattttctcagtacaatctactccatgttgttgctgtatgatcagacaaaattcttctatcaggttcgcccgatgagaagaaaggaaaaaaagtactctgaattctgctttctcacgctcgctgttcatcgattcccgagccgattagcagagagtctgctgtttcttctctctgaatttggatggagagactgagctccgaattcagtttcgacacggacgcgggatgatgaatcagttggtcttttttcttgtgctgctgttgggttttcttagattgaggtggtggcacgcccaaagttcttccttccctcactctgcccaaccacgtagtatctcggttcctttgaattctctctctgtttctagcgttggggccctcggggttggatttatgacctggatggatgaattctctgaattcccccttcctctttggatgtttctaccattggaagaaagccaagctctgttccctttactcctgccccctttttttatgtggttctacttgtgctgtgttgcaattacttattactgcaccccaagtgcgttttcgaccaaggaaatcttacgtcttttcatcttcttacttattactgcaccccaagtggtccactccacatgatggccatgtctgcgttgtttgaggctatattattactcattctaaaggatggtcaaggtggtgatgaaaggaaggtatcagaagtccaaaagcacttagtgcccagccgacagcgatgaggagcatgccgcagggcaccgagcaagcgaaaaaagatgggccagctgtctgtgctcacgaggatgcacatcttctgacgttagttaagcctgacaagcacggggatgaacatcgaatggtaggaggcccctctcttgtcctacaagtgtgaggtcgatgacaaggggttttggacgaaactgaagactctatccactagtttatcaaggagctgatggcaccaccaccatatctacggtagctattttaatccagctgaaggcatctcaaatatgtattcctataataaaacaaccacaattaaactttacatagccaactaagttactaaagagaatctgcattatgtagctgagaacacctaaaaaaagaacagatgatcgacaggtatttgtacaaacaaagaatcagaattcaagatatcaaactcttatatgtgtcagtggtccatgtccaagagaatgttggaaatgttaccatttatcattacatgccaaatacatgtagcccaccaacagtatagtgaatttcagccatagtagttttccccctttggagtaagatcgatcacagtacattaacatgtagctagaggaacttcacacggtgcaactaagttttaggactaaatttccttcttctcatgtttgaggcaaggacattcttcgccgatcagctaaactttgttgtggtataatctgtccactccaatttaaattcgaattcttgtcttcataggtatattctcaacttgatctataattctgtatgcttgcatttttcttgattttaatttaggattcaatgcagttcgaaggaaacatttagtgtcagattatatgtggtcccatatggtcacatagatctcgcatgaaaaggaacacacgttgataacatggtccaaccggttaacatcatatcatcaattcatacagatttaacatagcatcattaatctgagtgcagtaggcaggtcactaggacagtgtgactaaaaaaagactaggctagcaaagtcataagacaaatagtgatataaaagcaaacaaatgagctgccattatgtaaatatactagagttatctcaaatcccagttttgcaaaacatttcctttaaagtatatagtgcaatatgaaagacatatgtggccttcggtattctcttttcagcatggatctcttgactgaagcctattctgcttgcatctggagggaaactgaatcattacactggataatggtaatgggccatttcagttgctgaaatctcacaaagcaagtcaaatacattcatagccaaccaaatttttcttaaaagtggaaagtggaagaagcctcagatgccatgtgtcggggaccataattaggggtaccctcaaggctcctaattctcagctggtaacccccatcagcataaagctgcaaaggcttgatgggtgcaattaag

SEQ ID NO: 36592 - DNA, 2809 bp, Zea Mays
ctcgcgcccgccctcgttcccctcacccagcctttcgcacaaacaacccatccgctccatctgcgagcaagctctagcgatctagcagcatgcaggccctatgacgctcgccatcctcatccgggagcgtggccatgcctccgcccgcctcttcccccacccccggtgccccttccacacaccccccgcaccgctgtcctgcccctctcccctcgcacacccactcccttctaccatctccatgcttggcgccctcaccacctccccgaccgcctctgagctcatcgccttcccccatagcccgaacgagatatttgcgtccgacccgcccatcgacgtggacgccatcatggagaacgagctacggaagaaggacggcggtgcggatgtggaacatctcagatctgtcactctatctccggcgacctgggtcgggcgaggcacttcttttatgtgatgcctgagtggaacttggtatcctggaacaaaatgttgggcgcgtatgcctgtggcaggatgctcaccgaggcgcgggacctgttcgacgcaatgcttgccaggaacagcgccaccttccgataattattagctcgcctcccctcccattttctcagtacaatctactccatgttgttgctgtatgatcagacaaaattcttctatcaggttcgcccgatgagaagaaaggaaaaaaagtactctgaattctgctttctcacgctcgctgttcatcgattcccgagccgattagcagagagtctgctgtttcttctctctgaatttggatggagagactgagctccgaattcagtttcgacacggacgcgggatgatgaatcagttggtcttttttcttgtgctgctgttgggttttcttagattgaggtggtggcacgcccaaagttcttccttccctcactctgcccaaccacgtagtatctcggttcctttgaattctctctctgtttctagcgttggggccctcggggttggatttatgacctggatggatgaattctctgaattcccccttcctctttggatgtttctaccattggaagaaagccaagctctgttccctttactcctgccccctttttttatgtggttctacttgtgctgtgttgcaattacttattactgcaccccaagtgcgttttcgaccaaggaaatcttacgtcttttcatcttcttacttattactgcaccccaagtggtccactccacatgatggccatgtctgcgttgtttgaggctatattattactcattctaaaggatggtcaaggtggtgatgaaaggaaggtatcagaagtccaaaagcacttagtgcccagccgacagcgatgaggagcatgccgcagggcaccgagcaagcgaaaaaagatgggccagctgtctgtgctcacgaggatgcacatcttctgacgttagttaagcctgacaagcacggggatgaacatcgaatggtaggaggcccctctcttgtcctacaagtgtgaggtcgatgacaaggggttttggacgaaactgaagactctatccactagtttatcaaggagctgatggcaccaccaccatatctacggtatgtttcaggtagctattttaatccagctgaaggcatctcaaatatgtattcctataataaaacaaccacaattaaactttacatagccaactaagttactaaagagaatctgcattatgtagctgagaacacctaaaaaaagaacagatgatcgacaggtatttgtacaaacaaagaatcagaattcaagatatcaaactcttatatgtgtcagtggtccatgtccaagagaatgttggaaatgttaccatttatcattacatgccaaatacatgtagcccaccaacagtatagtgaatttcagccatagtagttttccccctttggagtaagatcgatcacagtacattaacatgtagctagaggaacttcacacggtgcaactaagttttaggactaaatttccttcttctcatgtttgaggcaaggacattcttcgccgatcagctaaactttgttgtggtataatctgtccactccaatttaaattcgaattcttgtcttcataggtatattctcaacttgatctataattctgtatgcttgcatttttcttgattttaatttaggattcaatgcagttcgaaggaaacatttagtgtcagattatatgtggtcccatatggtcacatagatctcgcatgaaaaggaacacacgttgataacatggtccaaccggttaacatcatatcatcaattcatacagatttaacatagcatcattaatctgagtgcagtaggcaggtcactaggacagtgtgactaaaaaaagactaggctagcaaagtcataagacaaatagtgatataaaagcaaacaaatgagctgccattatgtaaatatactagagttatctcaaatcccagttttgcaaaacatttcctttaaagtatatagtgcaatatgaaagacatatgtggccttcggtattctcttttcagcatggatctcttgactgaagcctattctgcttgcatctggagggaaactgaatcattacactggataatggtaatgggccatttcagttgctgaaatctcacaaagcaagtcaaatacattcatagccaaccaaatttttcttaaaagtggaaagtggaagaagcctcagatgccatgtgtcggggaccataattaggggtaccctcaaggctcctaattctcagctggtaacccccatcagcataaagctgcaaaggcttgatgggtgcaattaag

SEQ ID NO: 36593 - DNA, 1759 bp, Zea Mays
agttgccgctcccccttccaaacatgaccgttgggccgctgttccgctgtccccttcctgagatcccaaataccccaccgccgcgctccctcacctggcacccgagaatcctcgcgctggcgcactccaaattcctcgcccccacgccggttcgaccgttgccaatctccccgcgcgcacgcgctctccatctcgcgatccccaccccgagccgcgagcactttcccgggcgggggcgtatggcctgcgccgcgacgatgccgatcgacttactccccgctccagccccggcggaggaggaggtgaaggcggttgaggaggacgaggagatggtggtggaggtggagggagaagggtgcggcggaggggccgtggtggtggccgtggcggacgcggaggcggagggtcacccctacgacttccacgtgtccgggccgcgcaacctgccaccgcccaactggaaggacataatcaggaagggtccaaattacaaaaggatggtaatggcctgcttcattcaagcagtctacctgcttgaactggacaggcaggaccagaaaggcgaagaggatggccttgctccaaaatggtggaaacccttcaaatacaaggtcacacagacattggtggatgagagagatggttccatctatggcgccatgctggagtgggatcgctcttctgccttatctgactttatcctcataagaccaagtggggcaccgagggctgtgttagctctcagaggaaccctcctgcagaagccaactatgaagagagacctgcaggatgaccttcgtttcttggtatgggagagcctcaaaggttcagtgagatttgttggtgctttagcagcactacagttagcagttgagaagtttggcagcgccaatgtttgtgttgctgggcactccttgggagctggctttgcacttcaaatctgcaaagagcttgccaaacaaggggtttttgtggagtgccaccttttcaatccaccttctgtttcactggccatgggtgtaaggagcatgagtgagaaggccagctacctgtggaagaaagtcaaaggaagtctgccattgaaggaagagacaacaacacttgagactgccaaggccgaggcaaatgacaagaagagattgcgcaccgagaataaatgggtgccacatctgtatgtcaacaacagcgattacatctgctgccactacaacgctccctcttgcccgtccacatcaacagatggttcttccgacgaacagcagcaacaacgcaaggcaagtgagattgccagtgatgtggtcgcaaagctctttgtgacatcaaaaggcccacagaagttccttgaggcgcatgggctacagcaatggtggtcagatggcatggagctgcagctggctctctatgatagcaagctcataaacaggcagctgaaatccatctacacagcaacagcaataccatcttctaccaggtcctagacacggcttaagccgctgttgcatgggtcattagaaatactctttctaatcactgtgttcctttattatcaactgagaatgttttataactccagggggttcctgcaaacagtcaaataattcgaaaaactaagacaacattattttttcaactcaaatgttggttgtaggataggcgcactcactgtcagagttcgctctatctgacctgcactgtcattacaaaagtaatataggggatacatttttcctttaataaaaaatattgttttcacagtatc

SEQ ID NO: 36594 - DNA, 1716 bp, Zea Mays
cggaaaacaaagggggcaggagccactgccaacgacttcgaggtcgcacctacccccgccccattctgcaagccttgctccatttgcgactcgcgagctcaccttccacaccctacctactcctccactctgagctcacaccaaacagcccgtgcaccaaggccaccattcacctccaccaacaacaaacgggaactcttcacagcttcgcacctcgcgtcacaacaccaagacgcacgtaggagggaacctcaagcttcagtcgtccatggctcagcagcaaacaaatcctgaagaggtggtcctcgggcaggaggtcggggccgcgagggtggccactctcaaccgcccgcgccagctcaacggcatctccgacagagtggtgtacctcctcgcacagtttctggagaaatgggagaaggatgagaacgccaaattcgtcatctttaagggtgctgggcgtgcattttctgctggtggggacctaaagatgttttatgaagggaaatcaaatgattcctgcctcgaggttgtgtatagaatgtattggctttgctaccacattcacacgtacaagaaaaccatggttgctcttgttaatgggcttgtcatgggtggtggcgctgcaatggttgcgccactaaagtttgcagttgtcacagagaaaacaatctttgctactcctgaggctagtgttggattgcacacagattgtagcttttcctacatccattcccggctccctggatatttaggcgagtatctggctttaactggtgctagactgaatgcgaaggaaatgatttctgctggtcttgctactcattttgtcagttctgaaaaattggaagaacttgaaaaacgtctactggatttggacacaggtgctgagtctgcagtccgagctgttattgaagaattttcaacagatgttcaaactgatgaagatagtatattgaataagctttcaactatcaacaaatgcttctctgcagagactgttgaggatatcataaaagcatttgtaaggattcaacactcatgccatcccactttatgctgaatcagaagcgagcatagacggaaaccaatggatagctccagtcctaaagggtctgagaagatcatctccaactgcactgaagatcaccctgagatcgatcagagaaggtcgaaaacagagtttgcctgaatgtttgactaaggaatttaggcttacaatgaatatactgcggtctgttgtcaatggggatgtttatgagggcattagagctcttagcatcgataaagacaatgcccctaagtggaatcccactacccttgaggaggtgaagtacgaggacatcgaccgtctgttccagccgttcagtccggagctggaacttcaggtcccatctgatgattccaacaggtggagcggcaaatacgagaacacggtctatggcagagcttcccagtgactgtatacaagatcccccagccttttgttattttcatccgaaccactgcattacggaatattcagtttgcggcacgtgtgtatttcgagtgtttgtgtagcgcgacgttccaatgtatgaactgttgcaaaggttacacgatgacatgaagtttgatccaacaccaaaaccatctattagatgggaaagttctgcactttggatgttatatcgccaatcagaagctcaaacccttgcaaatcaggagtactccaac

SEQ ID NO: 36595 - DNA, 1630 bp, Zea Mays
ctctctctctctctctctctctctctctctcggaaaacaaagggggcaggagccactgccaacgacttcgaggtcgcacctacccccgccccattctgcaagccttgctccatttgcgactcgcgagctcaccttccacaccctacctactcctccactctgagctcacaccaaacagcccgtgcaccaaggccaccattcacctccaccaacaacaaacgggaactcttcacagcttcgcacctcgcgtcacaacaccaagacgcacgtaggagggaacctcaagcttcagtcgtccatggctcagcagcaaacaaatcctgaagaggtggtcctcgggcaggaggtcggggccgcgagggtggccactctcaaccgcccgcgccagctcaacggcatctccgacagagtggtgtacctcctcgcacagtttctggagaaatgggagaaggatgagaacgccaaattcgtcatctttaagggtgctgggcgtgcattttctgctggtggggacctaaagatgttttatgaagggaaatcaaatgattcctgcctcgaggttgtgtatagaatgtattggctttgctaccacattcacacgtacaagaaaaccatggttgctcttgttaatgggcttgtcatgggtggtggcgctgcaatggttgcgccactaaagtttgcagttgtcacagagaaaacaatctttgctactcctgaggctagtgttggattgcacacagattgtagcttttcctacatccattcccggctccctggatatttaggcgagtatctggctttaactggtgctagactgaatgcgaaggaaatgatttctgctggtcttgctactcattttgtcagttctgaaaaattggaagaacttgaaaaacgtctactggatttggacacaggctttcaactatcaacaaatgcttctctgcagagactgttgaggatatcataaaagcatttgaatcagaagcgagcatagacggaaaccaatggatagctccagtcctaaagggtctgagaagatcatctccaactgcactgaagatcaccctgagatcgatcagagaaggtcgaaaacagagtttgcctgaatgtttgactaaggaatttaggcttacaatgaatatactgcggtctgttgtcaatggggatgtttatgagggcattagagctcttagcatcgataaagacaatgcccctaagtggaatcccactacccttgaggaggtgaagtacgaggacatcgaccgtctgttccagccgttcagtccggagctggaacttcaggtcccatctgatgattccaacaggtggagcggcaaatacgagaacacggtctatggcagagcttcccagtgactgtatacaagatcccccagccttttgttattttcatccgaaccactgcattacggaatattcagtttgcggcacgtgtgtatttcgagtgtttgtgtagcgcgacgttccaatgtatgaactgttgcaaaggttacacgatgacatgaagtttgatccaacaccaaaaccatctattagatgggaaagttctgcactttggatgttatatcgccaatcagaagctcaaacccttgcaaatcaggagtactccaac

SEQ ID NO: 36596 - DNA, 2402 bp, Zea Mays
ctccattctccaatctccactctgtccggcgcccctttcttctgacgcgcccgatgcagcgatgctactgcgatggatcgcagctgaggggcgtcggcgagcgcggccgtctaggcccctcgcgcgctctctctcgtacggtagggttgtggacgctgccgctcgcgatggggagctcagggtgttcgtggtcgcgggcgaggtatccggcgactcgctcgcttcgcgactcatggcggctctcagggcgctgtcccctgtgccggtccgtttcgctggcgttggcggtgaactaatgtgcaaggaaggtttgcaatcactttttcccatggaagaaattgccattatgggcatgtgggagctgctgccgcacatatacagtatcaagaggaaaattgaggatagtgcaaatgcggctatgctatttcaacctcatgctgtggttacaattgattcaaagggtttttcttttcgactgttgaagcaactgaaataagcaatcagaaggttcaaagtcctctgcatatccattatgtttcgccgtcattctgggcctggaaaggtggtgaaagcaggctctctaagttgcataattttgtggaccacatgttgtgcattcttccatttgaggaagaaatatgcagattaaacgggttgcctgctacttatgtgggccaccccttactggatgatgcgattggcctaaacatggggacagaattgtgttctgacaagtctaagtatcaaagaagttgtgaagctttccgactggaacatgggctgtccccaggtgccacaatcataaccatgttacctggaagtaggatgcaggaggtagttcgaatgcttccgatctttttgcatactgtgcagaacttaaggcatacatttgatgaactatcattagtcatcccagttgctccacatcgagatgtgaggacctatattgaaaatgttgttcagtcagaaccttttccagtggtgttgatacccggggggtcgcttaaggaaagatacaatgcattcagtgctagtagagcagcattatgtacttcaggtacagctgttatggaactaatgttagcaagactgccctgtgtggtagcgtaccaagctcatttcattacagaatgctttatccacttgaggaaaaagataaactttatttctctgcccaacattctcttgaattctctcgttgtgcctgagatcctttttggggcttgtacagctaagaatttagctgcaaaattaagtgaggttatttcaaatgatcaaatccgccagatgcaaattgaatcagctggccaagtattcagggttctctatgaacccatcaagaaacgggatactttattaagggaagagatcgactactcaggcttgtcatcaaatttcctatctcctagcatgatcgcagctttaacagtgctttatatggataagcatcaaaacactgcatgccggaatttggtggtagaatcagaagctaagaaatctcttgttctaccaacgtggtcagggttccatgcatgttgttcatgcacaactggagtaacaaggcaacaagcaactggttatgtttaagcttccacttctgaagtggtatcagggtcggtcagcatcatggtatcgcaaacagatttggtcatcctgttggtgcagactcttctacggttagaatttcctagatggaacaggactcggggagtgtgactagatgtggctaggcagactgtacgctagcagtcgtctgctcctgctttttagcaaggggggatatgagagatgtcgttataatgaagcgcatatcgagatttctgttgtcctgacggatggagaggtaaatcctccaaatacccccacgaagtttggtaacgaatcctgatgtacttactagtctgcaagcctttgttattgtgtgggcagtataattttgtggtcgacctgacattgggcaatggtaaggtggaaactggtaggactgcagtttcctgtcaaaggatttttcaaaaagaaaatcaagtggatgaaacatggattcccacgtcgccagtggtacgatgacgtcactcctgaggtcacgcaggtggtgggccatgtggcgtcgaatgtattttgaattcttattttggtttaaaagttggaagagctacaggggcagtgggctcgggtaacatctctgttgttccccaccccaattggaatcccattcttggaatcttcgtaaggaaggcaaccgtttcgcatttgtttgatggattctcattctgtactcggcatttgtttaatgtctatactgagaaatctttactaagttcctattcatgccaagtcctgtagtcaaagctagagaagctgcagcgaacaaaatcatgttttcatcttgacctttttttttg

SEQ ID NO: 36597 - DNA, 2019 bp, Zea Mays
ctccattctccaatctccactctgtccggcgcccctttcttctgacgcgcccgatgcagcgatgctactgcgatggatcgcagctgaggggcgtcggcgagcgcggccgtctaggcccctcgcgcgctctctctcgtacggtagggttgtggacgctgccgctcgcgatggggagctcagggtgttcgtggtcgcgggcgaggtatccggcgactcgctcgcttcgcgactcatggcggctctcagggcgctgtcccctgtgccggtccgtttcgctggcgttggcggtgaactaatgtgcaaggaaggtttgcaatcactttttcccatggaagaaattgccattatgggcatgtgggagctgctgccgcacatatacagtatcaagaggaaaattgaggatagtgcaaatgcggctatgctatttcaacctcatgctgtggttacaattgattcaaagggtttttcttttcgactgttgaagcaactgaaatgcagaagcaatcagaaggttcaaagtcctctgcatatccattatgtttcgccgtcattctgggcctggaaaggtggtgaaagcaggctctctaagttgcataattttgtggaccacatgttgtgcattcttccatttgaggaagaaatatgcagattaaacgggttgcctgctacttatgtgggccaccccttactggatgatgcgattggcctaaacatggggacagaattgtgttctgacaagtctaagtatcaaagaagttgtgaagctttccgactggaacatgggctgtccccagtgaggttatttcaaatgatcaaatccgccagatgcaaattgaatcagctggccaagtattcagggttctctatgaacccatcaagaaacgggatactttattaagggaagagatcgactactcaggcttgtcatcaaatttcctatctcctagcatgatcgcagctttaacagtgctttatatggataagcatcaaaacactgcatgccggaatttggtggtagaatcagaagctaagaaatctcttgttctaccaacgtggtcagggttccatgcatgttgttcatgcacaactggagtaacaaggcaacaagcaactggttatgtttaagcttccacttctgaagtggtatcagggtcggtcagcatcatggtatcgcaaacagatttggtcatcctgttggtgcagactcttctacggttagaatttcctagatggaacaggactcggggagtgtgactagatggtacagtggggcttcgaaagtaataatgaactacaagatttttttcttctgtgtttctgatttctttcagattctgcagtggctaggcagactgtacgctagcagtcgtctgctcctgctttttagcaaggggggatatgagagatgtcgttataatgaagcgcatatcgagatttctgttgtcctgacggatggagaggtaaatcctccaaatacccccacgaagtttggtaacgaatcctgatgtacttactagtctgcaagcctttgttattgtgtgggcagtataattttgtggtcgacctgacattgggcaatggtaaggtggaaactggtaggactgcagtttcctgtcaaaggatttttcaaaaagaaaatcaagtggatgaaacatggattcccacgtcgccagtggtacgatgacgtcactcctgaggtcacgcaggtggtgggccatgtggcgtcgaatgtattttgaattcttattttggtttaaaagttggaagagctacaggggcagtgggctcgggtaacatctctgttgttccccaccccaattggaatcccattcttggaatcttcgtaaggaaggcaaccgtttcgcatttgtttgatggattctcattctgtactcggcatttgtttaatgtctatactgagaaatctttactaagttcctattcatgccaagtcctgtagtcaaagctagagaagctgcagcgaacaaaatcatgttttcatcttgacctttttttttg

SEQ ID NO: 36598 - DNA, 2141 bp, Zea Mays
ctccattctccaatctccactctgtccggcgcccctttcttctgacgcgcccgatgcagcgatgctactgcgatggatcgcagctgaggggcgtcggcgagcgcggccgtctaggcccctcgcgcgctctctctcgtacggtagggttgtggacgctgccgctcgcgatggggagctcagggtgttcgtggtcgcgggcgaggtatccggcgactcgctcgcttcgcgactcatggcggctctcagggcgctgtcccctgtgccggtccgtttcgctggcgttggcggtgaactaatgtgcaaggaaggtttgcaatcactttttcccatggaagaaattgccattatgggcatgtgggagctgctgccgcacatatacagtatcaagaggaaaattgaggatagtgcaaatgcggctatgctatttcaacctcatgctgtggttacaattgattcaaagggtttttcttttcgactgttgaagcaactgaaatgcagaagcaatcagaaggttcaaagtcctctgcatatccattatgtttcgccgtcattctgggcctggaaaggtggtgaaagcaggctctctaagttgcataattttgtggaccacatgttgtgcattcttccatttgaggaagaaatatgcagattaaacgggttgcctgctacttatgtgggccaccccttactggatgatgcgattggcctaaacatggggacagaattgtgttctgacaagtctaagtatcaaagaagttgtgaagctttccgactggaacatgggctgtccccaggtgccacaatcataaccatgttacctggaagtaggatgcaggaggtagttcgaatgcttccgatctttttgcatactgtgcagaacttaaggcatacatttgatgaactatcattagtcatcccagttgctccacatcgagatgtgaggacctatattgaaaatgttgttcagtcagaaccttttccagtggtgttgatacccggggggtcgcttaaggaaagatacaatgcattcagtgctagtagagcagcattatgtacttcaggtacagctgttatggaactaatgttagcaagactgccctgtgtggtagcgtaccaagctcatttcattacagaatgctttatccacttgaggaaaaagataaactttatttctctgcccaacattctcttgaattctctcgttgtgcctgagatcctttttggggcttgtacagctaagaatttagctgcaaaattaagtgaggttatttcaaatgatcaaatccgccagatgcaaattgaatcagctggccaagtattcagggttctctatgaacccatcaagaaacgggatactttattaagggaagagatcgactactcagggttccatgcatgttgttcatgcacaactggagtaacaaggcaacaagcaactggttatgtttaagcttccacttctgaagtggtatcagggtcggtcagcatcatggtatcgcaaacagatttggtcatcctgttggtgcagactcttctacgattctgcagtggctaggcagactgtacgctagcagtcgtctgctcctgctttttagcaaggggggatatgagagatgtcgttataatgaagcgcatatcgagatttctgttgtcctgacggatggagagtataattttgtggtcgacctgacattgggcaatggtaaggtggaaactggtaggactgcagtttcctgtcaaaggatttttcaaaaagaaaatcaagtggatgaaacatggattcccacgtcgccagtggtacgatgacgtcactcctgaggtcacgcaggtggtgggccatgtggcgtcgaatgtattttgaattcttattttggtttaaaagttggaagagctacaggggcagtgggctcgggtaacatctctgttgttccccaccccaattggaatcccattcttggaatcttcgtaaggaaggcaaccgtttcgcatttgtttgatggattctcattctgtactcggcatttgtttaatgtctatactgagaaatctttactaagttcctattcatgccaagtcctgtagtcaaagctagagaagctgcagcgaacaaaatcatgttttcatcttgacctttttttttg

SEQ ID NO: 36599 - DNA, 2242 bp, Zea Mays
ctccattctccaatctccactctgtccggcgcccctttcttctgacgcgcccgatgcagcgatgctactgcgatggatcgcagctgaggggcgtcggcgagcgcggccgtctaggcccctcgcgcgctctctctcgtacggtagggttgtggacgctgccgctcgcgatggggagctcagggtgttcgtggtcgcgggcgaggtatccggcgactcgctcgcttcgcgactcatggcggctctcagggcgctgtcccctgtgccggtccgtttcgctggcgttggcggtgaactaatgtgcaaggaaggtttgcaatcactttttcccatggaagaaattgccattatgggcatgtgggagctgctgccgcacatatacagtatcaagaggaaaattgaggatagtgcaaatgcggctatgctatttcaacctcatgctgtggttacaattgattcaaagggtttttcttttcgactgttgaagcaactgaaataagcaatcagaaggttcaaagtcctctgcatatccattatgtttcgccgtcattctgggcctggaaaggtggtgaaagcaggctctctaagttgcataattttgtggaccacatgttgtgcattcttccatttgaggaagaaatatgcagattaaacgggttgcctgctacttatgtgggccaccccttactggatgatgcgattggcctaaacatggggacagaattgtgttctgacaagtctaagtatcaaagaagttgtgaagctttccgactggaacatgggctgtccccaggctagtagagcagcattatgtacttcaggtacagctgttatggaactaatgttagcaagactgccctgtgtggtagcgtaccaagctcatttcattacagaatgctttatccacttgaggaaaaagataaactttatttctctgcccaacattctcttgaattctctcgttgtgcctgagatcctttttggggcttgtacagctaagaatttagctgcaaaattaagtgaggttatttcaaatgatcaaatccgccagatgcaaattgaatcagctggccaagtattcagggttctctatgaacccatcaagaaacgggatactttattaagggaagagatcgactactcaggcttgtcatcaaatttcctatctcctagcatgatcgcagctttaacagtgctttatatggataagcatcaaaacactgcatgccggaatttggtggtagaatcagaagctaagaaatctcttgttctaccaacgtggtcagggttccatgcatgttgttcatgcacaactggagtaacaaggcaacaagcaactggttatgtttaagcttccacttctgaagtggtatcagggtcggtcagcatcatggtatcgcaaacagatttggtcatcctgttggtgcagactcttctacggttagaatttcctagatggaacaggactcggggagtgtgactagatggtacagtggggcttcgaaagtaataatgaactacaagatttttttcttctgtgtttctgatttctttcagattctgcagtggctaggcagactgtacgctagcagtcgtctgctcctgctttttagcaaggggggatatgagagatgtcgttataatgaagcgcatatcgagatttctgttgtcctgacggatggagaggtaaatcctccaaatacccccacgaagtttggtaacgaatcctgatgtacttactagtctgcaagcctttgttattgtgtgggcagtataattttgtggtcgacctgacattgggcaatggtaaggtggaaactggtaggactgcagtttcctgtcaaaggatttttcaaaaagaaaatcaagtggatgaaacatggattcccacgtcgccagtggtacgatgacgtcactcctgaggtcacgcaggtggtgggccatgtggcgtcgaatgtattttgaattcttattttggtttaaaagttggaagagctacaggggcagtgggctcgggtaacatctctgttgttccccaccccaattggaatcccattcttggaatcttcgtaaggaaggcaaccgtttcgcatttgtttgatggattctcattctgtactcggcatttgtttaatgtctatactgagaaatctttactaagttcctattcatgccaagtcctgtagtcaaagctagagaagctgcagcgaacaaaatcatgttttcatcttgacctttttttttg

SEQ ID NO: 36600 - DNA, 2199 bp, Zea Mays
ctcggctcacctaggcttcgaagccttcggctctccattctccaatctccactctgtccggcgcccctttcttctgacgcgcccgatgcagcgatgctactgcgatggatcgcagctgaggggcgtcggcgagcgcggccgtctaggcccctcgcgcgctctctctcgtacggtagggttgtggacgctgccgctcgcgatggggagctcagggtgttcgtggtcgcgggcgaggtatccggcgactcgctcgcttcgcgactcatggcggctctcagggcgctgtcccctgtgccggtccgtttcgctggcgttggcggtgaactaatgtgcaaggaaggtttgcaatcactttttcccatggaagaaattgccattatgggcatgtgggagctgctgccgcacatatacagtatcaagaggaaaattgaggatagtgcaaatgcggctatgctatttcaacctcatgctgtggttacaattgattcaaagggtttttcttttcgactgttgaagcaactgaaatgcagaagcaatcagaaggttcaaagtcctctgcatatccattatgtttcgccgtcattctgggcctggaaaggtggtgaaagcaggctctctaagttgcataattttgtggaccacatgttgtgcattcttccatttgaggaagaaatatgcagattaaacgggttgcctgctacttatgtgggccaccccttactggatgatgcgattggcctaaacatggggacagaattgtgttctgacaagtctaagtatcaaagaagttgtgaagctttccgactggaacatgggctgtccccaggctagtagagcagcattatgtacttcaggtacagctgttatggaactaatgttagcaagactgccctgtgtggtagcgtaccaagctcatttcattacagaatgctttatccacttgaggaaaaagataaactttatttctctgcccaacattctcttgaattctctcgttgtgcctgagatcctttttggggcttgtacagctaagaatttagctgcaaaattaagtgaggttatttcaaatgatcaaatccgccagatgcaaattgaatcagctggccaagtattcagggttctctatgaacccatcaagaaacgggatactttattaagggaagagatcgactactcaggcttgtcatcaaatttcctatctcctagcatgatcgcagctttaacagtgctttatatggataagcatcaaaacactgcatgccggaatttggtggtagaatcagaagctaagaaatctcttgttctaccaacgtggtcagggttccatgcatgttgttcatgcacaactggagtaacaaggcaacaagcaactggttatgtttaagcttccacttctgaagtggtatcagggtcggtcagcatcatggtatcgcaaacagatttggtcatcctgttggtgcagactcttctacggttagaatttcctagatggaacaggactcggggagtgtgactagatgtggctaggcagactgtacgctagcagtcgtctgctcctgctttttagcaaggggggatatgagagatgtcgttataatgaagcgcatatcgagatttctgttgtcctgacggatggagaggtaaatcctccaaatacccccacgaagtttggtaacgaatcctgatgtacttactagtctgcaagcctttgttattgtgtgggcagtataattttgtggtcgacctgacattgggcaatggtaaggtggaaactggtaggactgcagtttcctgtcaaaggatttttcaaaaagaaaatcaagtggatgaaacatggattcccacgtcgccagtggtacgatgacgtcactcctgaggtcacgcaggtggtgggccatgtggcgtcgaatgtattttgaattcttattttggtttaaaagttggaagagctacaggggcagtgggctcgggtaacatctctgttgttccccaccccaattggaatcccattcttggaatcttcgtaaggaaggcaaccgtttcgcatttgtttgatggattctcattctgtactcggcatttgtttaatgtctatactgagaaatctttactaagttcctattcatgccaagtcctgtagtcaaagctagagaagctgcagcgaacaaaatcatgttttcatcttgacctttttttttg

SEQ ID NO: 36601 - DNA, 2988 bp, Zea Mays
atggagggggcatcgcggtcaggcaacaccgcgcacctcctccccacgccgtcaacagaatctccttccaccatcagcagaaggtgtcgaggatcttgggcgagcaggagagggggagaggaggccaaggacacaaccgcgaagccaaactcatccaatccggccccttctgccggtcgcacctcttttctcaggtcgccttgctgttgctacttccgcgctcgcctcagatccacgatcccgcttcacagccacaaactcgcttcctagatccatcttcttttgcttgaattccgttctttgggagcaaagaggtagttttggccggaaaagctagatgtgtcctgttattctcgatgcgattgttgtgcctcgcaggtgctggccgccagtgtggattggtgctctacgacccgctctctttgtagtcttcttgctatggcggggtggagatggggtggttagggacaagttccagctagggacggtgggggcgctcagcctctcggggtgtcctccgtctccatcgtcatctgcaacaaggctctcatgacctccgttggcttcaacttcccatccagcgacggtgtcgcccgccttaactccttccttcgccgccagcgcgccgtggtcgccgtcctagcagcaggggaccgtaccgcggagaggcccaccaagctcgtgctctctgacgcctccaaaagtaaaagtttctcctgagcttctagccccatatttgaaatttgaactgaatctgagttgtgtcgtcgtttattggaactttgctttgaacttgggcaggcgtgagcttgattgtggcggcaatatgctacgcgtggatgctaccaagcaagggggatggccaggctgcagtgctggtggtgaacatgcgccggagcaggatggcttggtgcaggcaggcggcttggctcctgtatcacgttggggtcgatgcatcggcgctgctcttcaccgatgaggtacaccatgtgacgttaatgagaatacactgtgcctcttcaagacgtgaatggtgatggacaccatacggtatggagttagttttggacagattagacaactgtcttggtcctagagttattgagcgtttatttgaggcagaggcaacagggatggggtatatacagcaacacatttcagtagggtcatgtgggtttcctcaattttgattggcaccatgtggttgtcgtccttagtgaccatgacaccaacaggttttcagaatttcacatttgcgtttttagcacaatacactgatagaaagggaagacggatccatgccacgagtgggggacaacataaagtaatgtatgcataagaatataagatatcatgaagagttaaagaagagcaacgtgcaccatcaccagccactacctatatgtgcttgtttccttccaactgcttttcagaattttgcatttgtttatggcatgcaaaatgctccattccccagtttgtaaggaacaatcaagatatatacatgtcacatggaaccaaaatgtatatatgattctgattctgagaatcataatcaggttgacatggatgggctaataatggaccagcgagttagcttgcttgtggtggggcaagatgttttgaaatcaaaagctgaggtggattttgcttatatgctggacatggacagccctggttttaatgtgaaggtttgtcctcaaaatggcccgtacctgctcaatgtcatattgagatattgactaatgccatggtaacagtgctataaactagacaaaataatacctggaacttatatgctatattctgcctactcagtttggatcagtactcagtaggactaaaaaacagatcagtaaccacatggtcagcattacaacatcataacagaattgcaacatttcaatattctgacctttattatggtctgcactctggataatacaatctgttcgactgtgatcttttacttatttggctacacagttgcacctttaattaatgagttctgttttcatgtattgaaaaaatcctactatgttataaattctaatatgccgaattctgttgcctaggctggttatgatggaagtgttctaaagttgagaatccccttcccaagacaggcgcaagacaggaagtgggtcctcactcttgactctcttaacctaataatctgacatatatctcttcttttcctattaatttgtgtgctattaagctcagatgttttttcttcatggttgtctttaagtatgttttgtacaccatttaattgatgcctaaaatacagttatttctgaatatttcttgatgggttctctgacatgggcatgccactcttgtacagggatatttcttgatgggttctctgacatggtcacatatcctcagttttgaaaattttgcttgcaggtatgctattttatgcccatgcagtcaaggattgtagatgaagttgggttatctatctcatagttagtggcaccatcgttgtttaggaaaaaataatttgttttttggcacgcactcaaagtttgtttacttcaaaatgctactaaaatatgttatgatacattgtaaagtatatgtttattgtaatagttggatctgcttttaaacttctatatgttgaaaatggtaaaattacactatcaactggggccaattttcgtagtgttacttaagattgttgtacattaacatttattaaatagttatacaccgtcgcaacgcacgggcacgtacctagtcaaaatatataaggtacactgattgttctgtaacaactttcaggggactcaaggtaatcataaatcaaatattaaatcatggctcatctaggtctagttgaatttgtaattttttcatgtgataaacaaaagatgaaatcttattttatctcatatatcatactcttgatctcacaagtgtgcaaactctttagtcttgtgttccaggaaatccaatagaaagacacaagatttg

SEQ ID NO: 36602 - DNA, 1740 bp, Zea Mays
gaagttttccctggattgcatattgatccaggctttttcaataaattaaggaaggttacagttcgtgagaatagttcaagtctgtctggtgtatgtgtatcatcgcattcactttatggaggcttgttctacctaatacctatggtcccgtgaatgctactgttctgatttggatcctgtacagatggagttcaacttcaagttgatgggatcattcgttagatcttattcattgccgagtagaggaacttacggttgaagattttctttatgatgatgattacaagatagacctttccgggtctaatctggatgtccttaataacctggaagggatcgttcagctggaatatccacagttaaatttgccgcaagagttagcccctaatgtgtacattgacatgagttactgtggacagaatgctgggggtgttttactgcacatgacagatttgttcacaacaatgacttcggcaccttctgcattcctgaagccaaaatgcgctctctgggactgccccaggcctgctgttggatcagaaagatggcatgattattgcagcatgtatcatgctgatttggctgtgcaggaagagggccctccaggcacaatgcctgtgatccgtccaagaggcattgatctgaaagatggccccctgtttgctgctcttagtgcaaaaatccaaggaaaaaatgttgggatccctatctgtgaaggagctgccactgcaaagtctccgtggaatgcacctgaactgttcgatctttacatctttgaaggtgagtctatcagagaatggttgttttttgacaaaccaaggagggcatttgttagtggaaatcggaagcagcggtccttgccagattacggcggccgtggttggcatgaatctaggaagcaggcgatgaaggactttgggggtctgaagaggtcctattacatggatccacagccatccaacagctacgaatggcacctctacgaatatgagatcaatgagtgcgatgcttttgccttatatcggcttgagttcaagtcttcagatgcaaagaagattgtgaaatccaaattagcctgtaatccactgaatgaaattcagcagcaaatggttagactcagtgcagacagtcctgtagacaacaaacggacggcccggggcaggcaacatgctaacccgacagatgtcgatactaacatctattcagttccaaacaccacagctcaagccaatgttccaaatgcttatcagccagggtcacaagtggaccagatgacatatttgaatggtagtgtcgtttatgggcctcatctgccgtatggttactccactgaaagaagtgacttttattggaactcagctgatgggacatgagaagatgaacacatattcgatttatggcatatttggccttcaaattctaacagttccagttatggttattgggtctactctattagcatgaccctcccatcttcttttaattggaactggtccaatctacaggaaacatctctgaaacaaaggatgtcaatactgcagttctattttctgtggtaacttttgttgttgtaatataggtgtatcttgaaaatagcaagcaagcatctccccgatgtgcatgcagctgtatcatatgcaagataaatctctggtttggtggactggtaacctgtcacgctggtggttccatttatctgtcacgttgtacgtgcatcaatacatcctgttctgaatctgg

SEQ ID NO: 36603 - DNA, 512 bp, Zea Mays
ggttttcaagttgtagctaggactatcaaggctgagttacagaaaatgagagttgaaatggctggaatgagaagagatgcagagcattattctagacaggagcatgttgagcttgagaagagataccgggagctaactgacttgctgtaccacaagcaaacacaattagaatccatggccagcgaaaaggccggattggagttccaactggagaaatcattgaaacaatttcgtgaagtgcaggtcgaagcagaaaggagtaaagctactcgcagatcagcatcatcgtgggaagaagatactgatatcaaggcattagagcctcttcctctacatcatcggcacatggcaacagcaaatcatcagttacaaaaggctgcgaagcttttagatacaggcgctgttcgtgcaacaagatttttgtggcgacaccccgttgcacgagtcagcgtgctattctatctggcatgaaccacataacttcaatttcctgtgtttaccctccccccccc

SEQ ID NO: 36604 - DNA, 719 bp, Zea Mays
gaggcatcaaatgcactagctagaatccagagagctgctgatcaaagctcatcaagagtgctggaattggagcacaaggtggctgtgcttgaggagatggaagctcgtaaccgccgcacacagaaaaaaccttcagaagaagccaatcaagttcttcagatgcaggcttggcaggaagaagttgagcgtgcacgccaaagccaacgagaggcagaagcaaagatatcatcgttggaggctgagttacagaaaatgagagttgaaatggctggaatgagaagagatgcagagcattattctagacaggagcatgttgagcttgagaagagataccgggagctaactgacttgctgtaccacaagcaaacacaattagaatccatggccagcgaaaaggccggattggagttccaactggagaaatcattgaaacaatttcgtgaagtgcaggtcgaagcagaaaggagtaaagctactcgcagatcagcatcatcgtgggaagaagatactgatatcaaggcattagagcctcttcctctacatcatcggcacatggcaacagcaaatcatcagttacaaaaggctgcgaagcttttagatacaggcgctgttcgtgcaacaagatttttgtggcgacaccccgttgcacgagtcagcgtgctattctatctggcatgaaccacataacttcaatttcctgtgtttaccctccccccccc

SEQ ID NO: 36605 - DNA, 753 bp, Zea Mays
agctgttgaggcatcaaatgcactagctagaatccagagagctgctgatcaaagctcatcaagagtgctggaattggagcacaaggtggctgtgcttgaggttgaatatgcttcattgcaacaagaactgcaggagatggaagctcgtaaccgccgcacacagaaaaaaccttcagaagaagccaatcaagttcttcaggcttggcaggaagaagttgagcgtgcacgccaaagccaacgagaggcagaagcaaagatatcatcgttggaggctgagttacagaaaatgagagttgaaatggctggaatgagaagagatgcagagcattattctagacaggagcatgttgagcttgagaagagataccgggagctaactgacttgctgtaccacaagcaaacacaattagaatccatggccagcgaaaaggccggattggagttccaactggagaaatcattgaaacaatttcgtgaagtgcaggtcgaagcagaaaggagtaaagctactcgcagatcagcatcatcgtgggaagaagatactgatatcaaggcattagagcctcttcctctacatcatcggcacatggcaacagcaaatcatcagttacaaaaggctgcgaagcttttagatacaggcgctgttcgtgcaacaagatttttgtggcgacaccccgttgcacgagtcagcgtgctattctatctggcatgaaccacataacttcaatttcctgtgtttaccctccccccccc

SEQ ID NO: 36606 - DNA, 773 bp, Zea Mays
aaattagaacatcgagctgttgaggcatcaaatgcactagctagaatccagagagctgctgatcaaagctcatcaagagtgctggaattggagcacaaggtggctgtgcttgaggttgaatatgcttcattgcaacaagaactgcaggagatggaagctcgtaaccgccgcacacagaaaaaaccttcagaagaagccaatcaagttcttcagatgcaggcttggcaggaagaagttgagcgtgcacgccaaagccaacgagaggcagaagcaaagatatcatcgttggaggctgagttacagaaaatgagagttgaaatggctggaatgagaagagatgcagagcattattctagacaggagcatgttgagcttgagaagagataccgggagctaactgacttgctgtaccacaagcaaacacaattagaatccatggccagcgaaaaggccggattggagttccaactggagaaatcattgaaacaatttcgtgaagtgcaggtcgaagcagaaaggagtaaagctactcgcagatcagcatcatcgtgggaagaagatactgatatcaaggcattagagcctcttcctctacatcatcggcacatggcaacagcaaatcatcagttacaaaaggctgcgaagcttttagatacaggcgctgttcgtgcaacaagatttttgtggcgacaccccgttgcacgagtcagcgtgctattctatctggcatgaaccacataacttcaatttcctgtgtttaccctccccccccc

SEQ ID NO: 36607 - DNA, 772 bp, Zea Mays
gtcagtggcttctgtggtcgagtgtcttttggctctaaaggataatgtgactacaggattgcgtcaaaacattacgaacaatgctgctaaaacaccccttagaaggaaactggaacttgaagaatctgatgagcctgtaatttcggttatgacacccgggagaagatctggggaggaaagatggaaaggccactgggattctaagtctcaacaaagaagtattcttcattctggacaaaaggtccatgatgctttccaacttaagcgagcctcctacactgatcttcctcctgccaaagtttcagagatgatgcatccaagaaaatgcccctactcaatcacttcttagagttgttaatggcattctagatgagagcattgagaggaaaagaggagaaataccacatcgtgttgtttacttgctaaggaatgttgttcaagagattgagcaccgcattgctatccaagcggatcacataagaaatcaaaatagcatcatcaagacccgggaagacaagtaccgttcaaaaattaaagcactcgagaccttagtaaatggcacaaatgaagaaaatgagatgacagtaaatcgacttgagctagttgaggacggatgggttatagtttatccctcttttgaccgcagaaaattcacataagatctcacggtacctgatctgccttcggaactgtggcttctgggtaagtacaaagtactgtagcaacccatagttttgcaggggggtcgtttggctttggtgcacacaaacac

SEQ ID NO: 36608 - DNA, 935 bp, Zea Mays
atggctcattcagaaggcttctcagttccggacgttgtcccttgtggcggtcgagggctctcgagccctcatcttcactggccgatggtcgatgtcgacgaagtcgttatccagcgaagtctttggtcacttgaagcgctgcaattagtcgaggggtcagtggcttctgtggtcgagtgtcttttggctctaaaggataatgtgactacaggattgcgtcaaaacattacgaacaatgctgctaaaacaccccttagaaggaaactggaacttgaagaatctgatgagcctgtaatttcggttatgacacccgggagaagatctggggaggaaagatggaaaggccactgggattctaagtctcaacaaagaagtattcttcattctggacaaaaggtccatgatgctttccaacttaagcgagcctcctacactgatcttcctcctgccaaagtttcagagatgatgcatccaagaagtatagataatgcccctactcaatcacttcttagagttgttaatggcattctagatgagagcattgagaggaaaagaggagaaataccacatcgtgttgtttacttgctaaggaatgttgttcaagagattgagcaccgcattgctatccaagcggatcacataagaaatcaaaatagcatcatcaagacccgggaagacaagtaccgttcaaaaattaaagcactcgagaccttagtaaatggcacaaatgaagaaaatgagatgacagtaaatcgacttgagctagttgaggacggatgggttatagtttatccctcttttgaccgcagaaaattcacataagatctcacggtacctgatctgccttcggaactgtggcttctgggtaagtacaaagtactgtagcaacccatagttttgcaggggggtcgtttggctttggtgcacacaaacac

SEQ ID NO: 36609 - DNA, 330 bp, Zea Mays
  misc_feature (1)..(2): n is a, c, g, or t
nnaagcttttagatacaggcgctgttcgtgcaacaagatttttgtggcgacaccccgttgcacgagtcagcgtgctattctatctggtgttcgtgcatttgttcttgatgcacttgttacaccgccttcaggacttcgcatccagagaaggaacatcagccatgggggatctggcccacgcaaacctgccatagcccatagtctctgtgcccttcttgtatcttgttcattcaggcattccccactgattcttgctccacacgccttgaggtatcgctggttgaatgccctattaaccctcccacttctttttcccctattgttttctcc

SEQ ID NO: 36610 - DNA, 479 bp, Zea Mays
atttgatataatcaatttaaatttatttttaaatattgtacttctagcgaggacagattccttacggggatggggaatttttctcccagcgagcgaggatggggatagggagccattccctgacgaggaaatccccgttgccatccctactcacgatcctctaggcaggcgtcggctgacctctccatctgttgtggcctgttcgtgtgacggtgtaaacccatcgactgatctgtgtcagatctccatcgagactaacgggagggatttcatcttgaccaggtgcaaggacgtccaattgttcttatcactggaaactctatgaacatgtatgtgtaagaaaattgtatgttctcatcaaaacagtctggacattgtatggttgttcgtaagaaaactgtatgtgtttggaaaatgtatggttatttctaaggaaactgaatctattattctataacgaattgaatgtttgttggaat

SEQ ID NO: 36611 - DNA, 2326 bp, Zea Mays
ctagacgccaatggaataaaatgaagggactaaaaattagtctctataaactaaacacgtctaaatctaacacctgccttagcagttcgtgatttcagtgaagcttgtgcatcttgtaccaaagaacaggacgttgcagaatgttcggcagttcaaggtccctttgtaggcttgtagcgctgcgctgcactacgctaatcgacttctccaagagaaaatttggattcacagagtcaattgctagccaggttattatttcagttgggagtgcttttatcttgttgattgaacgatgcatttgttttccaggagataaataatgagtcaagctcctgattgacaatgtctgcttccagttgtgtatataccaacagtgggggaaacttgccagaagtacgagcattgcagtctgaaggtccatctgtctgtcttgcaccctggtaagggccttgctgaactggtagctttggagatatccagacagatagtagcttttagggctaatttggaagtcacaaaaacagaggagattaaaggggctaaaataaagttgattttagcccctccaatcctctccggtttttggactctcaaactagcccttagataaatctgtcgtgctgaatacacccggagcatattgagaaaggcctgattgtaccccacaaaggaaggtttcaggtaacgtaggtgcccatgtggcgggttaagcttatgatctcagtatctttgttttcagtttcattttactagaaaccttagccacttggggacaccatgcagccaaattgaatctcgcagagaataatggaaggcagatgttaatggattgttggaatttcaacaaatggtcacgcagcttatacatggatggtctgatcagttctatctcttgactgtgtatcgtctgaaatttgggaactgcgtatcgcccagaaggatctcggatgcaggttcttgtcatcgactctgaacagccagcctatattggactggcaggcattgcacaacgcgatcgtccatgtgtatctgcgaccagaaaaaagaacttagccagtgcatctggcaaccatggtaattgtgtgatttccagattcaatgagtgggaaaagggggtaaaaagaactggtaaaacatttatactctggaaaccagctgtgagttttggaagggtcgccacgcagtgcaaggccagtggcattgtatactgtaataatctctttcacaaaaccgtgaggcctgctgtgcaaagacatagggctgtcactggacgtcaccaccatgtcacttcgtcttgcaatacggatctacggcaagaaatgagcctgtcacctcttgtattaatcaaaactatgcagaaattatttgatcagttttatagctgatatccccaggactaccccagatccatgaatcagatgggataagaaccaagcaagagtttctctgctgattctcaaaaatcaattcgccaaaagttgaccagtgagctttcaccatctctatgtaaataatgagccagcttcatttttcttcttctttttattaggtattcgagacactgcacttatgcaaaacaaaatgttgaaatcctgaagaaaccctaaatcacaacaaaatttgaaaccccaggtccagtttcattttcatgtcaccactatgcatgatgcattaccactggctctaactgcagactggataaagataaggccacaagtcttagccatgtgagacaattgaagaaatgaagtatgatcagaaactttgaaaaagtaactgttttttttaaaagaaagtaaacattaccaggcaatttctacatcgtatgatattgaaggctttgagcagctgaatctcccgctgtagtcgatatgagactccatcaatctgcgaaagggcctctagctgagttggttaggtggtctgagtagcactcctcaggtcctgggttcgactccccgtgggagcgaatttcaggctgtggttaaaaaaatcccctcgtctgtcccacgccaaagcacaggtctaaggctcagccccggtcgtggtcgttctcacatgggctttgatgccgctgtgtatgggtggggtaggggttcgggggttttcttgacctgtgtgagaaggtcttcttcttaatacaatgcccgggggctgtcttaccccccgcaggtcaagtttttttttagactccatcaatctcaagcaattcttgcctcagagattctgagataggaagtttgcttccaatgcaatatgacaaataatttggttttctcacatgatcatccatgcttgggtttaaaattacttgtctccacaaatc

SEQ ID NO: 36612 - DNA, 1793 bp, Zea Mays
cgttccttcaaaattcccatctgcagcggcactccagttcttcttcgattcattgctctgctcctgctcctacctacagaatcgcaggcgcagcatgaggcgcgtcgtgaggtggctcaggcagctactggctggcaggaaggacgagcgcggaggaggactcgaggtgagccatgtcggtagcggctggagcgacgggccggagaaggagaagaggaggtggagcttcgcgaagcagaggaagagcggaggcggaggcgcgcggtcgtcgggtccggacgccgtcgctcctgctgccgcggtggaacggtcgcagctggtggggaggccaggggaggacgcgagggctcgagaacaccgtgccgcgatcgccatccagaaaaccttcagaggctacctggctaggagagcgctccgagctctccggtcgctcgtcaagatccaggcgctggtacggggctacctggtgaggaagcaggcgaccatgacgctgcacagactgcagacgctcatgcggctgcaagccgactccatcgccgtcaagaatgcatcgtaccggagatccatggaacaagaagtaacccacatggttttttttctctctctctctcgaacttttgctgcatgtgattcacgacgttcgtgttgatgaagttgcacctcggggctgggcgccggcctgggttctgttgatcttatatatgtcgtgcttcgtgcaggagagggtctatgctcgggacgtccaggtgaagccgctcgcgacggcgccggtgcaccgccggatgctgtctgacagctcggactccatctacgagcgcagcccgcggatcgtggagatggacacttgccacctccgctcccggtcctcacggatcaccagcaggtacaacaagtacaagtacaacccggatggcttaccagagtaccaccaccgccacgcggcgccgacgccgtcgtgctcgccccttcccggcggcaacggcaagcatcagcccgcgcgggtctcgttccggcagagcgcccgcgaccgcgagcgcgacccccggggctccaagactgcgcagagcacgccccggctcgcctccccccacgactcctcctcgcccgccaagagcgtcgagcacagccagctggccagcacgccgcggcggcgccccgcgacgcagcgggaccgggaccgggacgcgctcgtcagcccgcggcacatggccggcaccgcgtcctccgcggccaggacgcggtgccacagcgcgccgaggcagcggaaggcgacggactccgagcaggcgccgtcgccgaggacgggcgcctgctgccaagaaggggcgtcgaggaggtcgtgctcgcacgcgcacgcccgcgggttctgcttccagtgctcggaatcgacccggacggacggattgtccgggatcagcgtcagcgacgaggtgggtgccagagactactacctggacagcttttggtgatcaggcacggatttgtacatactcgtagtcagtcatagacgctaaaacacctagcaaatcacggaacgagtggaagataacacgggatagccagacagtctcacagaagagtgtagatgctgaaacatacttgtacacacttgttgcttgggtgttggatggaagtgttcttatgtgaaggatgaagctaacagcattgtcagacagtggtactggctatgtagttatgctgttatggtcgtcagagcgcagttctttgtttggacccagttgttctataagctacctaagtgggccgggccatactagttgggcttgatttca

SEQ ID NO: 36613 - DNA, 1847 bp, Zea Mays
gccatgagcgcgaggtgtagcgagcgcgcgtcctagggagggtcggagccgccccccgagttgccagcagcagccgcagagcggatccaggtcgcccggcgccccgcgtgcgtgctctgctcgcttccaagagaagacgctaccccagtcccagtgggcgcccgcgaagccacgaccggcagatcttggcgtcatcgaatcggccggccgatctgatcccccccctcctccccggtgaccggcgccgggcggccgttctagagaatcgcaggcgcagcatgaggcgcgtcgtgaggtggctcaggcagctactggctggcaggaaggacgagcgcggaggaggactcgaggtgagccatgtcggtagcggctggagcgacgggccggagaaggagaagaggaggtggagcttcgcgaagcagaggaagagcggaggcggaggcgcgcggtcgtcgggtccggacgccgtcgctcctgctgccgcggtggaacggtcgcagctggtggggaggccaggggaggacgcgagggctcgagaacaccgtgccgcgatcgccatccagaaaaccttcagaggctacctggctaggagagcgctccgagctctccggtcgctcgtcaagatccaggcgctggtacggggctacctggtgaggaagcaggcgaccatgacgctgcacagactgcagacgctcatgcggctgcaagccgactccatcgccgtcaagaatgcatcgtaccggagatccatggaacaagaagtaacccacatggagagggtctatgctcgggacgtccaggtgaagccgctcgcgacggcgccggtgcaccgccggatgctgtctgacagctcggactccatctacgagcgcagcccgcggatcgtggagatggacacttgccacctccgctcccggtcctcacggatcaccagcaggtacaacaagtacaagtacaacccggatggcttaccagagtaccaccaccgccacgcggcgccgacgccgtcgtgctcgccccttcccggcggcaacggcaagcatcagcccgcgcgggtctcgttccggcagagcgcccgcgaccgcgagcgcgacccccggggctccaagactgcgcagagcacgccccggctcgcctccccccacgactcctcctcgcccgccaagagcgtcgagcacagccagctggccagcacgccgcggcggcgccccgcgacgcagcgggaccgggaccgggacgcgctcgtcagcccgcggcacatggccggcaccgcgtcctccgcggccaggacgcggtgccacagcgcgccgaggcagcggaaggcgacggactccgagcaggcgccgtcgccgaggacgggcgcctgctgccaagaaggggcgtcgaggaggtcgtgctcgcacgcgcacgcccgcgggttctgcttccagtgctcggaatcgacccggacggacggattgtccgggatcagcgtcagcgacgaggtgggtgccagagactactacctggacagcttttggtgatcaggcacggatttgtacatactcgtagtcagtcatagacgctaaaacacctagcaaatcacggaacgagtggaagataacacgggatagccagacagtctcacagaagagtgtagatgctgaaacatacttgtacacacttgttgcttgggtgttggatggaagtgttcttatgtgaaggatgaagctaacagcattgtcagacagtggtactggctatgtagttatgctgttatggtcgtcagagcgcagttctttgtttggacccagttgttctataagctacctaagtgggccgggccatactagttgggcttgatttca

SEQ ID NO: 36614 - DNA, 3672 bp, Zea Mays
cgcctccctccggctcccattgcctaaatatacaagccatcctaggaggaggggtagtacggtggtgtcattctttttgactgtctctctctcctcacctcaagtccccgaaccagtagtgcaccaagaaccactccatccatctccatgggagactccggaggaagaagaggaccacctcttcctcggctgctagatctcatcccggacgggaaagaacggaaggggagggaagcgcaagacgcgggaaggtcgaagaacagcggcggcttcgggggcgaggaggacgcgaagctggagctcaagctcgggcctccgggtctcactctcgtagaagaaggaacgacagctaccgtgccaagagatggaggcgtactacagcgagagacgacgaccaccccgaccctctcgctcgggtgcttcccacgtaacccctccaagcctgcggtagacgcagctacagctgggacgaagagggggttcttcgacaccgccgtcgaggccaagacagaaggccgcgacgagcggatggagcagcaggccggagctggatgtgggaacgagctagcactggacgagaagacggcagccgcggccgcgagtgagagacagaaagggtcctgctgcccgccgacgccacagcacgcccctcctgctgcgaccgtgcacagcggagcacacgtcctgcagctgggaagaaggccttcggctccggttgtcggttggcccccggtcagatccttcaggagaaaccttgctcatcatcatcatggaagctcctccaaacaacccaccgagccacagaacagcgaagctagcaggaaggagaagcctgcctgcaagaagaaccctctcgtaaaaatcaacatggacgggatccccatcggaaggaaagtagaccttgcagcctacgacagctacgagaggctatcactgggcgtcaaagagcttttccacggttttcttcaagctcaaaaggatatgtctccaactgctggaaagatattctctcaattgttggatggatctggcgaatataccctggtctacgaagacaacgaaggagacaggatgctggtaggggacgtgccgtggaatgtgtttgtgtcaactgctaaaaggctgagggttttgaggagctcggagcttgccaaaggtttggtaggcacaaggccacctcagattgcggtagctccgagaagaggaccaccagattgctgaaagcctgaaacagcgacaaaattctgatcatttggaatatgcatgccgaggtcctggatattttgtaaattaggctaccaataccatgcgactcgttgctgtagagtaataatgtcctgatgtaattcaacatgggcattaattggacttataagagaaatttcgcagatgcaagatctaccaatgtaaaattacccgttctgtgcgacaggtttgtaatcccaacatgcaaatctaatgtccagaccacaatcgttagcactcaccaatgcgctaaagagaacagtgacaggctagcgtcattgcgacatagcatctaaaagagtagaaatttcatgtggtattttcaattactcggacacacaaaaattgggaaaaagagcaaggtgtccacttcaaatgtggccaaaagtaccataagcaataacaaaccacgggagcaaagccgttgagtgccagattgcatagtcataaataattacatgcaccgaacctgatgacaccagctgccaaacaacacatcaagtgacagtgcttatgaccgttcatgcgagcatgcctatcacttgaatagcggaacattattgaggccaaacttcatgaaaaattcagcaaagcaagcttcatccttttttgcacagttttgacaaacacaacttaaaacaacagctataattcatttgaaacaatctcctggccaaggaacctgctcatttggagagagaaaaaacacacaaacaactggtgtacatgttcaataaacaattggctggaattccagcagcgttcaatcccttctaaactataattcatcctaaatttcttctatcgaagtcagcctgtagctaacatgaatccctgaacaaggtgaaccttgttcggcaaaggacctgacgagtaggggtagttcacataattgaaacgtgatgtgtaacagatagcgttaaaccatgtttgtttaagtccagccgtaatcaaataccacactgaaaactgatactagcctatttaaatttattaccactgtcactccagtataaatcattaccgttgtcatttacgttacacttggtgaaccaaacaggaccaaaatgtattctcattgcaggccagcaaattagcacattatttacatgttcttgagaacgttttatcctacaaataatttatagacaacttcaaaatacaacttcctcttgtcagcagaattgtattgaaagaaccaagatgcacaagagaagagtggattaggcttcactaaatttgcttcagtaaatttaattataaactcaagcataacttcatcacttatgtctaatagtgtgattaatagttttgcacccttagtttcaatcccattctagcatgaaaattccagaaatataaatacttaaattgaattgatcacatataaatacgtaaagtaaaaaaacaatcaggaacacctcatgttttcccaagtatcagagagtcggcacatcccactaattcttgttagagcatcctctctcttttggtctgtgcgaggaccaaatgctctctacgagctggttctttgtcgctctggcaagataaacctctcacaaccgtgtacaaaattgagttgggtcatacacaagctctcaaggtaatcaacgcaccctcgatcaccacctagccgtctaggtgataccgatcaccaagagtaacaagcactaactctcacttgacctgttcaagtctaatgagaatggaacaagctactcaaatgcactaatgaggtcgttaatcacatggttattaactctcaagttgttcactagataaagtcgcttccccactctcaagtggttccttcaacgatttaataggataagagatctcatatagtttagtcgagggtgtaaatagcctcaagagatgaacctagttgttgcacccccatcagcacagtcgagggcaccagacatatcaggtgtgcacccactcactgcaccagatacgatgatgccttcccaatggctagtttctgaagctagatgttacgtgggtatccgatgcatacaccggtgccacaccgaactcgtccgacaagtacaacctcgaatatatgcttgcaaacctctgagtaacctgcccggtggtacaccgaacacgttcagtggtacttggcatctcagacacattttacatcctctctaagtaccgtatttagtgccatgtccgatggtacatcagacacattttacatcctctctgagtaccgtattctagtgtttgagaccacttgtgtaagccctctaagtgccatgtctggtgcatcacacccggtacaccacacacatcgatgttagtgttacactcaaacgtaacaggacacactcttgttgcggtgctactgcaacacgtccaactcacttgttctggttgcttttcgagttggattttgtttcaaactttttattggttctc

SEQ ID NO: 36615 - DNA, 1708 bp, Zea Mays
acgaccttccggcgccagacaagggcaatgccacggcggcaagattggcgtctgctacggccgcaacgccgacgaccttccggcgccagacaaggtggcgcagctaatccagcagcagtccatcaagtacgtgcgcatctacgacaccaacatcgacgtcatcaaggcattcgccaacaccggcgtcgagctcatggtcggcgtccccaactccgacctcctcgccttcgcgcagtaccagtccaacgtcgacacatggctcaagaacagcatcctcccatactacccggacaccatgatcacctacatcaccgtcggcgccgaggtcaccgagagccccaccaacgtctcagccctcgtcgtgccagccatgcgcaatgtgcacaccgcgctcaagaaggccggcctgcacaagaagatcaccatctccagcacccactcgctcgggatactgtcccggtcgttcccgccgtctgctggggcgttcaacagcagctacgcctacttcttgaagcctatgctccagttccttgtggagaatcaggcgccgttcatggtggatttgtacccctactatgcgtaccagaactcgcggagcaatgtgtccctcaactacgcgctgttctcgccagagtctcaggatgtgattgacccaaacactggactggtttacactaacatgttcgacgcccaggtcgattccatcttctttgcgctcatggctctgaacttcaagactttgaagatcatgatcactgagtcagggtggccaaacaaaggggcggtcaaggagactggagccacaccagacaatgctcagacctacaataccaatttgatacgccatgttgttaatgacagcggcacaccggcgaaaccaggggaagagattgatgtctacatattttcattgttcaatgagaacaggaaacctggcatcgagtcggagaggaactggggactgttttttcctgataagagctctatctacagccttgattggacgggccgaggcaatgtggatgttatgactggagcaaacattacaagtgctaatggtacctggtgtattgcttcaactaatgcttcagaaactgatctgcagaatgccctcaactgggcatgtggtccaggcaacgtagattgttctgccattcagccaagccaaccctgctaccagccggacactttagcttcccatgcttcgtatgcattcaatagctactaccagcaaaatggagccaacgttgtggcctgtgactttggaggtgccggaatacgaacgacgaaagatccaagttatgacacttgcgtctatttggctgccggcaataagatgagcacgacgaactcaacatctcttccagctcgcagcgactccggtccagtcccatgcgccaaatgcttcgccactttgctccccatgctggccatcgtgatggctgcagttatggtgtgatctatggaaaaaaaaaatgctccagctagcctccttaagacctgagatgaaaggtgaattgcgtaatgctgctggtaaccattgaagttctgtttttgccatgagcagtagactagtagtagtctagtagagaggcaccttatgctgtaggaattctctggtcagttaagatgtacatcggcgcgcggacaatatatatcagctggtattaagaacttgatatcgtattatgctgtgtttcggctctca

SEQ ID NO: 36616 - DNA, 903 bp, Zea Mays
ctgcttgtttggtgctcctgtatctatctggcactctcatattctatagagaacaagataccatttgtagcatttagtcaggatcattgttattcgatgtttgaccaccctttggtcgattctctccattacatataccatgaacctaaggctaaaatagtgccatctattggtcagcttttagaaacagctgagatacagaaagtattgttccttgaaactcctgagaggatttcgtctgcactgagaccgtactgggcaaaggcgatagagggaagggcccatgttgttcaggcacagcctgatatgcttgaacttgtaccacctgcaacttcgaaaggcaatggtgtgaaggttctgttgaaccacctttccattagtccagatgaggtaatggcaattggtgacggagaaaatgacattgaaatgttgcaactagcttcgtttggggttgctcttgcaaatggatctgacaagacaaaagcagcggcaaatgtaattggcgccacgaatgatgaagatggagttgcacaggctatttatgaatatgccttctaagagcaacgaatcattttggactgggttaatttcttctgatttcccatttttcgtggactcaacacagaacaattgtagtggttccaacttgcaagtacacaccgctccaccggagcgcaatctcgctctggtgttacagtttctgaactgtttgcaactgtaagacattttttagttggcatgaaccgaaatccagctaccagctcgacatactcttggctggatatgtaaccgctaaccgaattactatttttttctcatttttttatgcaaaagctttccttttttttacccactttgtctcttcgatccgaccacaaaatagacaagttacctggatctttt

SEQ ID NO: 36617 - DNA, 2214 bp, Zea Mays
ggaaacaggtaggtatacgagccaaacaaaccaccaccaaaaccctcctcccgtcctcgctcggtccctccccctcgctccggccgccacaccacgcgggcacgtcaatggcgcgcatcgtgtcacgagcgctcccgttcgcctcgcgctcgtccctccgcctcccgctcccaccgcccttccccggcgcggcgctggtccgttccgccgctgcgggttcgcccctgcccccagctgccgaggctgcactcgcggcctcgctgctctcctggcgcgggcacacggccacccccgagtcctcgatagcggcgccgccgccgttcgcagggtttctcgctggaatccgcaggttccgcaagggacggcgcggacaggcgtcggcgaagcggtcgcagcctcaggacgccccgccgcccccgcccccgcccccgcctccaccgaaggagagagagatcgaactcgtcgctcgcatcggcatcgaggaggacatgcctgacgacccagaagtgctgaacattgtagaaatccttaagttaaatgtcccaatggcaatgaagattgcacttgatggacttctggattccagttacagcacccgagatacctcaataagtgatgttgggaagtatgataaggttgaggtttctgtattgctatgcaatgataacttcatccaagatcttaacaaagaatggagagatgtggactgcgctactgatatactctcaatgtcccagtacattccagatcttgatgttcccatcctaatgttaggtgatatagtaatatctgttgaggcagctgaaaggcaagctggggagaaaggtgttacacttcttgatgaagtgcgggtcctagtggttcgtggcatattgcatcttcttggttttcaacacgagtcgagcaatgaggctgcagcagaattggagaaggaggagcagctcattttaaaaagtctaaggtggaaaggaaaaggtctagctaaaagtgttctggattcaagcaagcctcaaacagattcattggatggacaagtgacaaatgacctgaagaaagctggcagccttagattttacaaaccaaaattcaaatatattttttgtgatatggatggtacgctgctcaacagtaaaagtcaagtttcagcaaggaatgcagaagctctaagggaagctaggtcaagaggagtaaacatagttattgccactggaaaggcacgtcctgctgtaatcgacgctcttagtatggtggacttatctggaaggactggggctgttggtttatggtttggaagggagacggatttataaaagaaatttggaccaagaagtatgtagagaggcactctcatattctatagagaacaagataccatttgtagcatttagtcaggatcattgttattcgatgtttgaccaccctttggtcgattctctccattacatataccatgaacctaaggctaaaatagtgccatctattggtcagcttttagaaacagctgagatacagaaagtattgttccttgaaactcctgagaggatttcgtctgcactgagaccgtactgggcaaaggcgatagagggaagggcccatgttgttcaggcacagcctgatatgcttgaacttgtaccacctgcaacttcgaaaggcaatggtgtgaaggttctgttgaaccacctttccattagtccagatgaggtaatggcaattggtgacggagaaaatgacattgaaatgttgcaactagcttcgtttggggttgctcttgcaaatggatctgacaagacaaaagcagcggcaaatgtaattggcgccacgaatgatgaagatggagttgcacaggctatttatgaatatgccttctaagagcaacgaatcattttggactgggttaatttcttctgatttcccatttttcgtggactcaacacagaacaattgtagtggttccaacttgcaagtacacaccgctccaccggagcgcaatctcgctctggtgttacagtttctgaactgtttgcaactgtaagacattttttagttggcatgaaccgaaatccagctaccagctcgacatactcttggctggatatgtaaccgctaaccgaattactatttttttctcatttttttatgcaaaagctttccttttttttacccactttgtctcttcgatccgaccacaaaatagacaagttacctggatctttt

SEQ ID NO: 36618 - DNA, 2240 bp, Zea Mays
ggaaacaggtaggtatacgagccaaacaaaccaccaccaaaaccctcctcccgtcctcgctcggtccctccccctcgctccggccgccacaccacgcgggcacgtcaatggcgcgcatcgtgtcacgagcgctcccgttcgcctcgcgctcgtccctccgcctcccgctcccaccgcccttccccggcgcggcgctggtccgttccgccgctgcgggttcgcccctgcccccagctgccgaggctgcactcgcggcctcgctgctctcctggcgcgggcacacggccacccccgagtcctcgatagcggcgccgccgccgttcgcagggtttctcgctggaatccgcaggttccgcaagggacggcgcggacaggcgtcggcgaagcggtcgcagcctcaggacgccccgccgcccccgcccccgcccccgcctccaccgaaggagagagagatcgaactcgtcgctcgcatcggcatcgaggaggacatgcctgacgacccagaagtgctgaacattgtagaaatccttaagttaaatgtcccaatggcaatgaagattgcacttgatggacttctggattccagttacagcacccgagatacctcaataagtgatgttgggaagtatgataaggttgaggtttctgtattgctatgcaatgataacttcatccaagatcttaacaaagaatggagagatgtggactgcgctactgatatactctcaatgtcccagtacattccagatcttgatgttcccatcctaatgttaggtgatatagtaatatctgttgaggcagctgaaaggcaagctggggagaaaggtgttacacttcttgatgaagtgcgggtcctagtggttcgtggcatattgcatcttcttggttttcaacacgagtcgagcaatgaggctgcagcagaattggagaaggaggagcagctcattttaaaaagtctaaggtggaaaggaaaaggtctagctaaaagtgttctggattcaagcaagcctcaaacagattcattggatggacaagtgacaaatgacctgaagaaagctggcagccttagattttacaaaccaaaattcaaatatattttttgtgatatggatggtacgctgctcaacagtaaaagtcaagtttcagcaaggaatgcagaagctctaagggaagctaggtcaagaggagtaaacatagttattgccactggaaaggcacgtcctgctgtaatcgacgctcttagtatggtggacttatctggaaggactggtattgtttcagaatcatcacctggtgtattccttcaggggctgttggtttatggtttggaagggagacggatttataaaagaaatttggaccaagaagcactctcatattctatagagaacaagataccatttgtagcatttagtcaggatcattgttattcgatgtttgaccaccctttggtcgattctctccattacatataccatgaacctaaggctaaaatagtgccatctattggtcagcttttagaaacagctgagatacagaaagtattgttccttgaaactcctgagaggatttcgtctgcactgagaccgtactgggcaaaggcgatagagggaagggcccatgttgttcaggcacagcctgatatgcttgaacttgtaccacctgcaacttcgaaaggcaatggtgtgaaggttctgttgaaccacctttccattagtccagatgaggtaatggcaattggtgacggagaaaatgacattgaaatgttgcaactagcttcgtttggggttgctcttgcaaatggatctgacaagacaaaagcagcggcaaatgtaattggcgccacgaatgatgaagatggagttgcacaggctatttatgaatatgccttctaagagcaacgaatcattttggactgggttaatttcttctgatttcccatttttcgtggactcaacacagaacaattgtagtggttccaacttgcaagtacacaccgctccaccggagcgcaatctcgctctggtgttacagtttctgaactgtttgcaactgtaagacattttttagttggcatgaaccgaaatccagctaccagctcgacatactcttggctggatatgtaaccgctaaccgaattactatttttttctcatttttttatgcaaaagctttccttttttttacccactttgtctcttcgatccgaccacaaaatagacaagttacctggatctttt

SEQ ID NO: 36619 - DNA, 2233 bp, Zea Mays
ggaaacaggtaggtatacgagccaaacaaaccaccaccaaaaccctcctcccgtcctcgctcggtccctccccctcgctccggccgccacaccacgcgggcacgtcaatggcgcgcatcgtgtcacgagcgctcccgttcgcctcgcgctcgtccctccgcctcccgctcccaccgcccttccccggcgcggcgctggtccgttccgccgctgcgggttcgcccctgcccccagctgccgaggctgcactcgcggcctcgctgctctcctggcgcgggcacacggccacccccgagtcctcgatagcggcgccgccgccgttcgcagggtttctcgctggaatccgcaggttccgcaagggacggcgcggacaggcgtcggcgaagcggtcgcagcctcaggacgccccgccgcccccgcccccgcccccgcctccaccgaaggagagagagatcgaactcgtcgctcgcatcggcatcgaggaggacatgcctgacgacccagaagtgctgaacattgtagaaatccttaagttaaatgtcccaatggcaatgaagattgcacttgatggacttctggattccagttacagcacccgagatacctcaataagtgatgttgggaagtatgataaggttgaggtttctgtattgctatgcaatgataacttcatccaagatcttaacaaagaatggagagatgtggactgcgctactgatatactctcaatgtcccagtacattccagatcttgatgttcccatcctaatgttaggtgatatagtaatatctgttgaggcagctgaaaggcaagctggggagaaaggtgttacacttcttgatgaagtgcgggtcctagtggttcgtggcatattgcatcttcttggttttcaacacgagtcgagcaatgaggctgcagcagaattggagaaggaggagcagctcattttaaaaagtctaaggtggaaaggaaaaggtctagctaaaagtgttctggattcaagcaagcctcaaacagattcattggatggacaagtgacaaatgacctgaagaaagctggcagccttagattttacaaaccaaaattcaaatatattttttgtgatatggatggtacgctgctcaacagtaaaagtcaagtttcagcaaggaatgcagaagctctaagggaagctaggtcaagaggagtaaacatagttattgccactggaaaggcacgtcctgctgtaatcgacgctcttagtatggtggacttatctggaaggactggtattgtttcagaatcatcacctggtgtattccttcaggggctgttggtttatggtttggaagggagacggatttataaaagaaatttggaccaagaagtatgtagagagagaacaagataccatttgtagcatttagtcaggatcattgttattcgatgtttgaccaccctttggtcgattctctccattacatataccatgaacctaaggctaaaatagtgccatctattggtcagcttttagaaacagctgagatacagaaagtattgttccttgaaactcctgagaggatttcgtctgcactgagaccgtactgggcaaaggcgatagagggaagggcccatgttgttcaggcacagcctgatatgcttgaacttgtaccacctgcaacttcgaaaggcaatggtgtgaaggttctgttgaaccacctttccattagtccagatgaggtaatggcaattggtgacggagaaaatgacattgaaatgttgcaactagcttcgtttggggttgctcttgcaaatggatctgacaagacaaaagcagcggcaaatgtaattggcgccacgaatgatgaagatggagttgcacaggctatttatgaatatgccttctaagagcaacgaatcattttggactgggttaatttcttctgatttcccatttttcgtggactcaacacagaacaattgtagtggttccaacttgcaagtacacaccgctccaccggagcgcaatctcgctctggtgttacagtttctgaactgtttgcaactgtaagacattttttagttggcatgaaccgaaatccagctaccagctcgacatactcttggctggatatgtaaccgctaaccgaattactatttttttctcatttttttatgcaaaagctttccttttttttacccactttgtctcttcgatccgaccacaaaatagacaagttacctggatctttt

SEQ ID NO: 36620 - DNA, 2422 bp, Zea Mays
gagaagtaaaccaaacaatacacactttgagactccacaggtgcaattacagcctcccgcatgtcaaccaaacaggcagtacgtgaattgaacgggattaagtagtaagttaaaaaaattataatttttctaattctatcccatggaaataagcgaacaacgccttccgtggaaacaggtaggtatacgagccaaacaaaccaccaccaaaaccctcctcccgtcctcgctcggtccctccccctcgctccggccgccacaccacgcgggcacgtcaatggcgcgcatcgtgtcacgagcgctcccgttcgcctcgcgctcgtccctccgcctcccgctcccaccgcccttccccggcgcggcgctggtccgttccgccgctgcgggttcgcccctgcccccagctgccgaggctgcactcgcggcctcgctgctctcctggcgcgggcacacggccacccccgagtcctcgatagcggcgccgccgccgttcgcagggtttctcgctggaatccgcaggttccgcaagggacggcgcggacaggcgtcggcgaagcggtcgcagcctcaggacgccccgccgcccccgcccccgcccccgcctccaccgaaggagagagagatcgaactcgtcgctcgcatcggcatcgaggaggacatgcctgacgacccagaagtgctgaacattgtagaaatccttaagttaaatgtcccaatggcaatgaagattgcacttgatggacttctggattccagttacagcacccgagatacctcaataagtgatgttgggaagtatgataaggttgaggtttctgtattgctatgcaatgataacttcatccaagatcttaacaaagaatggagagatgtggactgcgctactgatatactctcaatgtcccagtacattccagatcttgatgttcccatcctaatgttaggtgatatagtaatatctgttgaggcagctgaaaggcaagctggggagaaaggtgttacacttcttgatgaagtgcgggtcctagtggttcgtggcatattgcatcttcttggttttcaacacgagtcgagcaatgaggctgcagcagaattggagaaggaggagcagctcattttaaaaagtctaaggtggaaaggaaaaggtctagctaaaagtgttctggattcaagcaagcctcaaacagattcattggatggacaagtgacaaatgacctgaagaaagctggcagccttagattttacaaaccaaaattcaaatatattttttgtgatatggatggtacgctgctcaacagtaaaagtcaagtttcagcaaggaatgcagaagctctaagggaagctaggtcaagaggagtaaacatagttattgccactggaaaggcacgtcctgctgtaatcgacgctcttagtatggtggacttatctggaaggactggtattgtttcagaatcatcacctggtgtattccttcaggggctgttggtttatggtttggaagggagacggatttataaaagaaatttggaccaagaagtatgtagagaggcactctcatattctatagagaacaagataccatttgtagcatttagtcaggatcattgttattcgatgtttgaccaccctttggtcgattctctccattacatataccatgaacctaaggctaaaatagtgccatctattggtcagcttttagaaacagctgagatacagaaagtattgttccttgaaactcctgagaggatttcgtctgcactgagaccgtactgggcaaaggcgatagagggaagggcccatgttgttcaggcacagcctgatatgcttgaacttgtaccacctgcaacttcgaaaggcaatggtgtgaaggttctgttgaaccacctttccattagtccagatgaggtaatggcaattggtgacggagaaaatgacattgaaatgttgcaactagcttcgtttggggttgctcttgcaaatggatctgacaagacaaaagcagcggcaaatgtaattggcgccacgaatgatgaagatggagttgcacaggctatttatgaatatgccttctaagagcaacgaatcattttggactgggttaatttcttctgatttcccatttttcgtggactcaacacagaacaattgtagtggttccaacttgcaagtacacaccgctccaccggagcgcaatctcgctctggtgttacagtttctgaactgtttgcaactgtaagacattttttagttggcatgaaccgaaatccagctaccagctcgacatactcttggctggatatgtaaccgctaaccgaattactatttttttctcatttttttatgcaaaagctttccttttttttacccactttgtctcttcgatccgaccacaaaatagacaagttacctggatctttt

SEQ ID NO: 36621 - DNA, 1208 bp, Zea Mays
ctggaatcctggatcgttgccttcacaagatttattttgctgggcgctgttcctttcccaagtgatgttccacggttgaagcagcttggagttcaaggggttgtaacgttgaatgaaccttatgaaactcttgtcccaacatctttataccaggctaatgagattgagcacctggtaattccaacaagagattacctctttgcaccttcattcgaggatatttctcaagccatagatttcatccatcggaatgcatcacaaggcggtactacatatgttcattgtaaagctggaagaggacgaagcaccactattgtattgtgctacttgattaaatacaggaacatgacccctgaagcagctttggatcatgtacgatccattaggcctcgagtgcttttggcaccctcgcagtggcatgctgttaattcatttggagctctcaccggtggacaacttccagtacggagtacaaacctggcctgtttcctagaagccattgaagctggctgtacgaacacaacaggaaatgatgattaccacgtgatggagtttgactgcgaagatagtggcttaccactttatcaaattatgctacctaggccagccagccccactgggtctgggtgcaccgatgcagtcctcgtaacagaagcagatcttgagggctatgatacttatattggtaccaggaaagatgcggtgtcgttggaagtagccactcgcagtcccatcatgaggagattgtcctgcctctttggctccctcaaacttagtaacagcaactgtgagccagcttcaagccggttcactgaggttcgcgcctgctaggtaggtagtgtcttcctccagttttccatgctgcatcaagagtgtatctctagataggcaggcaatcatccaaaaaggatttgtagaagcctgtgttcatttcatggccatggggcagtgccatcgggaagaaagttgtgtgcatagccagaggggttgtttagttttcattagagtgtagagctgtgaacgcgtcgaatatccttgttttttcttgagagcatgtgattcattgcaatttgcatcattgtttacttgaaataaaataagttttctttccatccaacggaggcggcaacgacttaagtttgattggttattgacaaaatttgtattacctgcaacttagttccttctgtctgtacatgaaattgtcg

SEQ ID NO: 36622 - DNA, 1669 bp, Zea Mays
cttccgaatcagcaatccgtgccacctgtttccgcattccgccattccgccttctgctgctggggttttagacaaaaatcactcgtcccatttctcgcgtccccaggccacggtcgcgagcaaggctaccccactgtctcgatccaccgatttccctccctcttctgtgcctccacggatcttctcgttgtggaagcggaggcggacgctggaggcgtctcggcgcgaggatttgcgagctgctgcggtggtgggaaatgaggatctgcgaatcgggagacggtgacgacgttgcgggcctggtgtttcagcaagagcagcaggaggaggtccaggcgagcggcgagctcgtacggcttaaggcgaagcacgcgctcgtcggcgccggcgcgagggtgctgttctacccgacgctgctctacaacgtcttgcgcaaccggttcgaggcggacttccggtggtgggatcgcgtcgaccagtttattttgctgggcgctgttcctttcccaagtgatgttccacggttgaagcagcttggagttcaaggggttgtaacgttgaatgaaccttatgaaactcttgtcccaacatctttataccaggctaatgagattgagcacctggtaattccaacaagagattacctctttgcaccttcattcgaggatatttctcaagccatagatttcatccatcctgcattttcagggaatgcatcacaaggcggtactacatatgttcattgtaaagctggaagaggacgaagcaccactattgtattgtgctacttgattaaatacaggaacatgacccctgaagcagctttggatcatgtacgatccattaggcctcgagtgcttttggcaccctcgcagtggcatgctgttaattcatttggagctctcaccggtggacaacttccagtacggagtacaaacctggcctgtttcctagaagccattgaagctggctgtacgaacacaacaggaaatgatgattaccacgtgatggagtttgactgcgaagatagtggcttaccactttatcaaattatgctacctaggccagccagccccactgggtctgggtgcaccgatgcagtcctcgtaacagaagcagatcttgagggctatgatacttatattggtaccaggaaagatgcggtgtcgttggaagtagccactcgcagtcccatcatgaggagattgtcctgcctctttggctccctcaaacttagtaacagcaactgtgagccagcttcaagccggttcactgaggttcgcgcctgctaggtaggtagtgtcttcctccagttttccatgctgcatcaagagtgtatctctagataggcaggcaatcatccaaaaaggatttgtagaagcctgtgttcatttcatggccatggggcagtgccatcgggaagaaagttgtgtgcatagccagaggggttgtttagttttcattagagtgtagagctgtgaacgcgtcgaatatccttgttttttcttgagagcatgtgattcattgcaatttgcatcattgtttacttgaaataaaataagttttctttccatccaacggaggcggcaacgacttaagtttgattggttattgacaaaatttgtattacctgcaacttagttccttctgtctgtacatgaaattgtcg

SEQ ID NO: 36623 - DNA, 2542 bp, Zea Mays
cttccgaatcagcaatccgtgccacctgtttccgcattccgccattccgccttctgctgctggggttttagacaaaaatcactcgtcccatttctcgcgtccccaggccacggtcgcgagcaaggctaccccactgtctcgatccaccgatttccctccctcttctgtgcctccacggatcttctcgttgtggaagcggaggcggacgctggaggcgtctcggcgcgaggatttgcgagctgctgcggtggtgggaaatgaggatctgcgaatcgggagacggtgacgacgttgcgggcctggtgtttcagcaagagcagcaggaggaggtccaggcgagcggcgagctcgtacggcttaaggcgaagcacgcgctcgtcggcgccggcgcgagggtgctgttctacccgacgctgctctacaacgtcttgcgcaaccggttcgaggcggacttccggtggtgggatcgcgtcgaccagtttattttgctgggcgctgttcctttcccaagtgatgttccacggttgaagcagcttggagttcaaggggttgtaacgttgaatgaaccttatgaaactcttgtcccaacatctttataccaggctaatgagattgagcacctggtaattccaacaagagattacctctttgcaccttcattcgaggatatttctcaagccatagatttcatccatcgtaagttcttgccctttcttgtttatttttaagggaataagtacacgatagcaaattcacaccttttcctgaaacataaccccagcgctgatcagttttctattattttattttcgttgcatccgtggtaccttttgttatgtatttcccccaaagagcaaccgttgaattataggtaggagagtttattgtggttgactcaaaaacttagggaagcaaagcaggtagcagttaactcagaaaaggaaagctggttattattttgatcactggtcaactaatgtttatgttattaggtatgcatggccaattaaattttgatgtggtaggtatggttacaaagaagctgcagcactatcttttaatgcacagtccactcccaacctccggattaaggttctgttagatgtcgttgtatatgatgtcatgcatgacaactatgtcaaatcattgtagatatgctattgaaaaaaattgaaatgagcctagccattacacaatgtctgtcagtaattcaaacgaagtagaatcataacctatcaaagcacatctataatctaaaatctttgctttgtgtcaaacagcaatctatgacagggtggattcaggacttcagctgaatgcatagccacttttgccaaaaagttatgcatatataatatatattatgtagatgtattaaaaaaataaagatgacacaaaatgataggctattcaagtattcaacccaaaatcaattatacaattagtactgtgatttttaatcgaatatacattgccagaaactacgatttatgcaatcagcacaaaaaaaaccttttagcctttgaaattctgaatacacgctctcaaattggtagattcaacatatagctgcattttcagggaatgcatcacaaggcggtactacatatgttcattgtaaagctggaagaggacgaagcaccactattgtattgtgctacttgattaaatacaggaacatgacccctgaagcagctttggatcatgtacgatccattaggcctcgagtgcttttggcaccctcgcagtggcatgctgttaattcatttggagctctcaccggtggacaacttccagtacggagtacaaacctggcctgtttcctagaagccattgaagctggctgtacgaacacaacaggaaatgatgattaccacgtgatggagtttgactgcgaagatagtggcttaccactttatcaaattatgctacctaggccagccagccccactgggtctgggtgcaccgatgcagtcctcgtaacagaagcagatcttgagggctatgatacttatattggtaccaggaaagatgcggtgtcgttggaagtagccactcgcagtcccatcatgaggagattgtcctgcctctttggctccctcaaacttagtaacagcaactgtgagccagcttcaagccggttcactgaggttcgcgcctgctaggtaggtagtgtcttcctccagttttccatgctgcatcaagagtgtatctctagataggcaggcaatcatccaaaaaggatttgtagaagcctgtgttcatttcatggccatggggcagtgccatcgggaagaaagttgtgtgcatagccagaggggttgtttagttttcattagagtgtagagctgtgaacgcgtcgaatatccttgttttttcttgagagcatgtgattcattgcaatttgcatcattgtttacttgaaataaaataagttttctttccatccaacggaggcggcaacgacttaagtttgattggttattgacaaaatttgtattacctgcaacttagttccttctgtctgtacatgaaattgtcg

SEQ ID NO: 36624 - DNA, 3028 bp, Zea Mays
ggcgcctccagtcccagctgcgcttgcttgcttccatggtttccagtttccaccggaagctggacgccgcactgcaaggccagcggtgggcggtggtggctgcggagccactcgcgacaaaaaaatgcacgagaaataccaataccagcggtgttttttttagcgttttcccctcgcctctgcggctctgcccccaacgcgcgatgcctctgtagctgtactgcttgctcctcagtccagctatccgcatagacttcgcaccaacccatctcccagtctcacacaccaaagaggaaaaaaagccttgttttttttcttcggagaaaggagagggggagaaaattatactactctcttctgtccagtccagccgcggacaccaaggcacagaggcaggcaggcggacagggtaggcaagaggcgagctcggcgaaggcgcggagaggggagacagccagccgctgcattgcgctacattgggcaggagggctcgccgccgggggaggctcggatcttgcgtctctggccgtggctgccgcgtgcttgcttcgtttggtggcgctgcgcccattggcgggcggcctcggtccagcgcggcgtgatctggcgcgcgccgccgactccactcgcgtggggaggcctggatcttgacgctctgctgtcgctgccgcgagaccctgggggagccacgctgtgctcagtcgcccgcagtccgctgagctgccgagtgcgtccggcgggcgggagatctggccgacggcgcggcgctgcagatcccctgcctgcgcgggcacggctcactgctgctgtggaggctgttgcgcgcggtggtgccgatgggctacgggtacgtggatcccttcccgccccctcagcagccacaacaggcggcatacgtcgcgccgcagcagggggactacgggcagccgcagccgcagccggctccgcggccaccggcttgcccgtactcgtcgtccgcctccgctccgccgggctccgcgtcctatcatttttcgcctccggcaccgtcccctccgccgtcgcattcgaactcgagccatgcagctagtggcagtggcaagaacatcgagatatcgagggaagcggccaccaccattgtagcactggccggtctcgccatgctcagctttattggcgcgaccatttggttcgtcaagaaaaagcgccggcgcatagagcctccggctacattgcctacacagcaaccagctcctccgccaccgcccaactacattccatcttcggctggatcctcgctagcatcagacggattctacttgagatcgccagggtatcctttcatgagctatcacagatgactttgcagaagataaccttttgggagaaggtggatttgggtgtgtgttcaagggcattttgccggatggtcgccctgtcgccgtcaagaagctcaagattgggaatgggcaaggcgagcgtgagttcaaggctgaggtcgatactatcagcagagtacatcataggcatttggtttctctagtaggctattgcattgcggagggccagcgaatgcttgtttatgattttgttcccaacaacacactatattaccacctccatggtgaggacattttcctttcaattatattattttctatcacttgaagggtaggcccgatgcactggtgagagctgtctcactgagtcatcaggtcgcggattttaagttgtctctccgcatcgcgggggaaggcttgcctctttatctcttcctcagaccccactcatgtagagcctcccttatatgatcattaacttgacctctcaaaactgcagtaagtgaaacatcactggattggcggacaagggttaagattgcagctggagcagcccgagggattggttacctccatgaagattgtcatccacgtattattcatagagatattaaatcatccaatattttgttggacaacaactttgaagctcaggtttctgattttggacttgcaaggttagcggctgattccaatacacatgttaccacacgtgtcatggggacatttgggtatttggctccagagtatgcattgtcaggaaagttaacagcaaagtctgatgtatattcttttggggttgttcttttggagctgatcacaggaagaaaacctgttgatgcttctcagccgttgggagatgaaagtctggttgaatgggcccgctccgttctgacgaaggcgatcgagcatcgggagttcggggaccttcctgaccccaggatggagaacaggttcgacgaaaacgagatgtttcacatgatagtagccgcggccgcatgcatccggcactcggcggcaatgaggccacggatggggcaggtggttagagcactagatagcttagcggactctaatctgaacaacggcctccagcccgggcgctgcgaggtgttcttggagccgcagtccgaggagatcaggctgttccggctgagggagttcggcagcccggacggtagcgaggagctgagccaggcgagctggaggagccggagagacctgtgaacagacacactcggtacaaggtcattaacattcttttttttttgggggccattctttacatgtaattatctcgtttacatgattctttcttccttcttacttttcgtttgttactttactcctccctgaggcaattcttgttcctggtggaatagattttgcattttcgttcgggagataagtaaatgaatcctctgtcttttctctctctctctctctctctccagtgaatagtacacagaaagtttggttcctggcattctttctctgataagtactccagtgaacaatcttgatatgcttcgtcgctgcttttggagcaggacagttgctgaacttgcactgcaagtctctgtacaaggattagggcagcaggtgcaggtcactgtacgcttaagtgacaactatactatacaggcgctgcgttggacgggcacaagtacaatgattagcgggtgctaatttgtattcgcggaatgcat

SEQ ID NO: 36625 - DNA, 2813 bp, Zea Mays
ggcgcctccagtcccagctgcgcttgcttgcttccatggtttccagtttccaccggaagctggacgccgcactgcaaggccagcggtgggcggtggtggctgcggagccactcgcgacaaaaaaatgcacgagaaataccaataccagcggtgttttttttagcgttttcccctcgcctctgcggctctgcccccaacgcgcgatgcctctgtagctgtactgcttgctcctcagtccagctatccgcatagacttcgcaccaacccatctcccagtctcacacaccaaagaggaaaaaaagccttgttttttttcttcggagaaaggagagggggagaaaattatactactctcttctgtccagtccagccgcggacaccaaggcacagaggcaggcaggcggacagggtaggcaagaggcgagctcggcgaaggcgcggagaggggagacagccagccgctgcattgcgctacattgggcaggagggctcgccgccgggggaggctcggatcttgcgtctctggccgtggctgccgcgtgcttgcttcgtttggtggcgctgcgcccattggcgggcggcctcggtccagcgcggcgtgatctggcgcgcgccgccgactccactcgcgtggggaggcctggatcttgacgctctgctgtcgctgccgcgagaccctgggggagccacgctgtgctcagtcgcccgcagtccgctgagctgccgagtgcgtccggcgggcgggagatctggccgacggcgcggcgctgcagatcccctgcctgcgcgggcacggctcactgctgctgtggaggctgttgcgcgcggtggtgccgatgggctacgggtacgtggatcccttcccgccccctcagcagccacaacaggcggcatacgtcgcgccgcagcagggggactacgggcagccgcagccgcagccggctccgcggccaccggcttgcccgtactcgtcgtccgcctccgctccgccgggctccgcgtcctatcatttttcgcctccggcaccgtcccctccgccgtcgcattcgaactcgagccatgcagctagtggcagtggcaagaacatcgagatatcgagggaagcggccaccaccattgtagcactggccggtctcgccatgctcagctttattggcgcgaccatttggttcgtcaagaaaaagcgccggcgcatagagcctccggctacattgcctacacagcaaccagctcctccgccaccgcccaactacattccatcttcggctggatcctcgctagcatcagacggattctacttgagatcgccagggtatcctttcatgagctatcacagatgactttgcagaagataaccttttgggagaaggtggatttgggtgtgtgttcaagggcattttgccggatggtcgccctgtcgccgtcaagaagctcaagattgggaatgggcaaggcgagcgtgagttcaaggctgaggtcgatactatcagcagagtacatcataggcatttggtttctctagtaggctattgcattgcggagggccagcgaatgcttgtttatgattttgttcccaacaacacactatattaccacctccatgtaagtgaaacatcactggattggcggacaagggttaagattgcagctggagcagcccgagggattggttacctccatgaagattgtcatccacgtattattcatagagatattaaatcatccaatattttgttggacaacaactttgaagctcaggtttctgattttggacttgcaaggttagcggctgattccaatacacatgttaccacacgtgtcatggggacatttgggtatttggctccagagtatgcattgtcaggaaagttaacagcaaagtctgatgtatattcttttggggttgttcttttggagctgatcacaggaagaaaacctgttgatgcttctcagccgttgggagatgaaagtctggttgaatgggcccgctccgttctgacgaaggcgatcgagcatcgggagttcggggaccttcctgaccccaggatggagaacaggttcgacgaaaacgagatgtttcacatgatagtagccgcggccgcatgcatccggcactcggcggcaatgaggccacggatggggcaggtggttagagcactagatagcttagcggactctaatctgaacaacggcctccagcccgggcgctgcgaggtgttcttggagccgcagtccgaggagatcaggctgttccggctgagggagttcggcagcccggacggtagcgaggagctgagccaggcgagctggaggagccggagagacctgtgaacagacacactcggtacaaggtcattaacattcttttttttttgggggccattctttacatgtaattatctcgtttacatgattctttcttccttcttacttttcgtttgttactttactcctccctgaggcaattcttgttcctggtggaatagattttgcattttcgttcgggagataagtaaatgaatcctctgtcttttctctctctctctctctctctccagtgaatagtacacagaaagtttggttcctggcattctttctctgataagtactccagtgaacaatcttgatatgcttcgtcgctgcttttggagcaggacagttgctgaacttgcactgcaagtctctgtacaaggattagggcagcaggtgcaggtcactgtacgcttaagtgacaactatactatacaggcgctgcgttggacgggcacaagtacaatgattagcgggtgctaatttgtattcgcggaatgcat

SEQ ID NO: 36626 - DNA, 3292 bp, Zea Mays
ggcgcctccagtcccagctgcgcttgcttgcttccatggtttccagtttccaccggaagctggacgccgcactgcaaggccagcggtgggcggtggtggctgcggagccactcgcgacaaaaaaatgcacgagaaataccaataccagcggtgttttttttagcgttttcccctcgcctctgcggctctgcccccaacgcgcgatgcctctgtagctgtactgcttgctcctcagtccagctatccgcatagacttcgcaccaacccatctcccagtctcacacaccaaagaggaaaaaaagccttgttttttttcttcggagaaaggagagggggagaaaattatactactctcttctgtccagtccagccgcggacaccaaggcacagaggcaggcaggcggacagggtaggcaagaggcgagctcggcgaaggcgcggagaggggagacagccagccgctgcattgcgctacattgggcaggagggctcgccgccgggggaggctcggatcttgcgtctctggccgtggctgccgcgtgcttgcttcgtttggtggcgctgcgcccattggcgggcggcctcggtccagcgcggcgtgatctggcgcgcgccgccgactccactcgcgtggggaggcctggatcttgacgctctgctgtcgctgccgcgagaccctgggggagccacgctgtgctcagtcgcccgcagtccgctgagctgccgagtgcgtccggcgggcgggagatctggccgacggcgcggcgctgcagatcccctgcctgcgcgggcacggctcactgctgctgtggaggctgttgcgcgcggtggtgccgatgggctacgggtacgtggatcccttcccgccccctcagcagccacaacaggcggcatacgtcgcgccgcagcagggggactacgggcagccgcagccgcagccggctccgcggccaccggcttgcccgtactcgtcgtccgcctccgctccgccgggctccgcgtcctatcatttttcgcctccggcaccgtcccctccgccggtaagtagcccacctccggcgtcccctttaccggagccatcggcgccacctgcaccattgctgccatcgccgccgcctcctgcaccattgccgccatcgcctccgccgccagcattgtcgcctcctccgccggacgccctccctccgtcgcttccaccgtcaccgctgccatatccaacccgatcaccacctcaagccccgccgcccccgctgacgacggatcagccgcgcgttcagccccgcgtatacccatcaccgccaccgccgtccctccctcctccgccgcctcccaccgtctcgccgccagcgccggctccatccaattcgccgtcgccgtcgcctgctccagctgcacaagctccgggtcccgcgcgtgttgctgcctattcgcctcccccgcctagaatcgcccctccgccgcctccgcactatcacggcaagtcgcattacacgccgcactcgcccgtgaagtcgcattcgaactcgagccatgcagctagtggcagtggcaagaacatcgagatatcgagggaagcggccaccaccattgtagcactggccggtctcgccatgctcagctttattggcgcgaccatttggttcgtcaagaaaaagcgccggcgcatagagcctccggctacattgcctacacagcaaccagctcctccgccaccgcccaactacattccatcttcggctggatcctcgctagcatcagacggattctacttgagatcgccagggtatcctttcatgaggtacagcactgggagccatggttttccatactccccagccgactctgggattgggtattcccatatgctgttcacaccagagaatttggcagctatcacagatgactttgcagaagataaccttttgggagaaggtggatttgggtgtgtgttcaagggcattttgccggatggtcgccctgtcgccgtcaagaagctcaagattgggaatgggcaaggcgagcgtgagttcaaggctgaggtcgatactatcagcagagtacatcataggcatttggtttctctagtaggctattgcattgcggagggccagcgaatgcttgtttatgattttgttcccaacaacacactatattaccacctccatggtcatccacgtattattcatagagatattaaatcatccaatattttgttggacaacaactttgaagctcaggtttctgattttggacttgcaaggttagcggctgattccaatacacatgttaccacacgtgtcatggggacatttgggtatttggctccagagtatgcattgtcaggaaagttaacagcaaagtctgatgtatattcttttggggttgttcttttggagctgatcacaggaagaaaacctgttgatgcttctcagccgttgggagatgaaagtctggttgaatgggcccgctccgttctgacgaaggcgatcgagcatcgggagttcggggaccttcctgaccccaggatggagaacaggttcgacgaaaacgagatgtttcacatgatagtagccgcggccgcatgcatccggcactcggcggcaatgaggccacggatggggcaggtggttagagcactagatagcttagcggactctaatctgaacaacggcctccagcccgggcgctgcgaggtgttcttggagccgcagtccgaggagatcaggctgttccggctgagggagttcggcagcccggacggtagcgaggagctgagccaggcgagctggaggagccggagagacctgtgaacagacacactcggtacaaggtcattaacattcttttttttttgggggccattctttacatgtaattatctcgtttacatgattctttcttccttcttacttttcgtttgttactttactcctccctgaggcaattcttgttcctggtggaatagattttgcattttcgttcgggagataagtaaatgaatcctctgtcttttctctctctctctctctctctccagtgaatagtacacagaaagtttggttcctggcattctttctctgataagtactccagtgaacaatcttgatatgcttcgtcgctgcttttggagcaggacagttgctgaacttgcactgcaagtctctgtacaaggattagggcagcaggtgcaggtcactgtacgcttaagtgacaactatactatacaggcgctgcgttggacgggcacaagtacaatgattagcgggtgctaatttgtattcgcggaatgcat

SEQ ID NO: 36627 - DNA, 3376 bp, Zea Mays
ggcgcctccagtcccagctgcgcttgcttgcttccatggtttccagtttccaccggaagctggacgccgcactgcaaggccagcggtgggcggtggtggctgcggagccactcgcgacaaaaaaatgcacgagaaataccaataccagcggtgttttttttagcgttttcccctcgcctctgcggctctgcccccaacgcgcgatgcctctgtagctgtactgcttgctcctcagtccagctatccgcatagacttcgcaccaacccatctcccagtctcacacaccaaagaggaaaaaaagccttgttttttttcttcggagaaaggagagggggagaaaattatactactctcttctgtccagtccagccgcggacaccaaggcacagaggcaggcaggcggacagggtaggcaagaggcgagctcggcgaaggcgcggagaggggagacagccagccgctgcattgcgctacattgggcaggagggctcgccgccgggggaggctcggatcttgcgtctctggccgtggctgccgcgtgcttgcttcgtttggtggcgctgcgcccattggcgggcggcctcggtccagcgcggcgtgatctggcgcgcgccgccgactccactcgcgtggggaggcctggatcttgacgctctgctgtcgctgccgcgagaccctgggggagccacgctgtgctcagtcgcccgcagtccgctgagctgccgagtgcgtccggcgggcgggagatctggccgacggcgcggcgctgcagatcccctgcctgcgcgggcacggctcactgctgctgtggaggctgttgcgcgcggtggtgccgatgggctacgggtacgtggatcccttcccgccccctcagcagccacaacaggcggcatacgtcgcgccgcagcagggggactacgggcagccgcagccgcagccggctccgcggccaccggcttgcccgtactcgtcgtccgcctccgctccgccgggctccgcgtcctatcatttttcgcctccggcaccgtcccctccgccggtaagtagcccacctccggcgtcccctttaccggagccatcggcgccacctgcaccattgctgccatcgccgccgcctcctgcaccattgccgccatcgcctccgccgccagcattgtcgcctcctccgccggacgccctccctccgtcgcttccaccgtcaccgctgccatatccaacccgatcaccacctcaagccccgccgcccccgctgacgacggatcagccgcgcgttcagccccgcgtatacccatcaccgccaccgccgtccctccctcctccgccgcctcccaccgtctcgccgccagcgccggctccatccaattcgccgtcgccgtcgcctgctccagctgcacaagctccgggtcccgcgcgtgttgctgcctattcgcctcccccgcctagaatcgcccctccgccgcctccgcactatcacggcaagtcgcattacacgccgcactcgcccgtgaagtcgcattcgaactcgagccatgcagctagtggcagtggcaagaacatcgagatatcgagggaagcggccaccaccattgtagcactggccggtctcgccatgctcagctttattggcgcgaccatttggttcgtcaagaaaaagcgccggcgcatagagcctccggctacattgcctacacagcaaccagctcctccgccaccgcccaactacattccatcttcggctggatcctcgctagcatcagacggattctacttgagatcgccagggtatcctttcatgaggtacagcactgggagccatggttttccatactccccagccgactctgggattgggtattcccatatgctgttcacaccagagaatttggcagctatcacagatgactttgcagaagataaccttttgggagaaggtggatttgggtgtgtgttcaagggcattttgccggatggtcgccctgtcgccgtcaagaagctcaagattgggaatgggcaaggcgagcgtgagttcaaggctgaggtcgatactatcagcagagtacatcataggcatttggtttctctagtaggctattgcattgcggagggccagcgaatgcttgtttatgattttgttcccaacaacacactatattaccacctccatgtaagtgaaacatcactggattggcggacaagggttaagattgcagctggagcagcccgagggattggttacctccatgaagattgtcatccacgtattattcatagagatattaaatcatccaatattttgttggacaacaactttgaagctcaggtttctgattttggacttgcaaggttagcggctgattccaatacacatgttaccacacgtgtcatggggacatttgggtatttggctccagagtatgcattgtcaggaaagttaacagcaaagtctgatgtatattcttttggggttgttcttttggagctgatcacaggaagaaaacctgttgatgcttctcagccgttgggagatgaaagtctggttgaatgggcccgctccgttctgacgaaggcgatcgagcatcgggagttcggggaccttcctgaccccaggatggagaacaggttcgacgaaaacgagatgtttcacatgatagtagccgcggccgcatgcatccggcactcggcggcaatgaggccacggatggggcaggtggttagagcactagatagcttagcggactctaatctgaacaacggcctccagcccgggcgctgcgaggtgttcttggagccgcagtccgaggagatcaggctgttccggctgagggagttcggcagcccggacggtagcgaggagctgagccaggcgagctggaggagccggagagacctgtgaacagacacactcggtacaaggtcattaacattcttttttttttgggggccattctttacatgtaattatctcgtttacatgattctttcttccttcttacttttcgtttgttactttactcctccctgaggcaattcttgttcctggtggaatagattttgcattttcgttcgggagataagtaaatgaatcctctgtcttttctctctctctctctctctctccagtgaatagtacacagaaagtttggttcctggcattctttctctgataagtactccagtgaacaatcttgatatgcttcgtcgctgcttttggagcaggacagttgctgaacttgcactgcaagtctctgtacaaggattagggcagcaggtgcaggtcactgtacgcttaagtgacaactatactatacaggcgctgcgttggacgggcacaagtacaatgattagcgggtgctaatttgtattcgcggaatgcat

SEQ ID NO: 36628 - DNA, 2729 bp, Zea Mays
ggcgcctccagtcccagctgcgcttgcttgcttccatggtttccagtttccaccggaagctggacgccgcactgcaaggccagcggtgggcggtggtggctgcggagccactcgcgacaaaaaaatgcacgagaaataccaataccagcggtgttttttttagcgttttcccctcgcctctgcggctctgcccccaacgcgcgatgcctctgtagctgtactgcttgctcctcagtccagctatccgcatagacttcgcaccaacccatctcccagtctcacacaccaaagaggaaaaaaagccttgttttttttcttcggagaaaggagagggggagaaaattatactactctcttctgtccagtccagccgcggacaccaaggcacagaggcaggcaggcggacagggtaggcaagaggcgagctcggcgaaggcgcggagaggggagacagccagccgctgcattgcgctacattgggcaggagggctcgccgccgggggaggctcggatcttgcgtctctggccgtggctgccgcgtgcttgcttcgtttggtggcgctgcgcccattggcgggcggcctcggtccagcgcggcgtgatctggcgcgcgccgccgactccactcgcgtggggaggcctggatcttgacgctctgctgtcgctgccgcgagaccctgggggagccacgctgtgctcagtcgcccgcagtccgctgagctgccgagtgcgtccggcgggcgggagatctggccgacggcgcggcgctgcagatcccctgcctgcgcgggcacggctcactgctgctgtggaggctgttgcgcgcggtggtgccgatgggctacgggtacgtggatcccttcccgccccctcagcagccacaacaggcggcatacgtcgcgccgcagcagggggactacgggcagccgcagccgcagccggctccgcggccaccggcttgcccgtactcgtcgtccgcctccgctccgccgggctccgcgtcctatcatttttcgcctccggcaccgtcccctccgccgtcgcattcgaactcgagccatgcagctagtggcagtggcaagaacatcgagatatcgagggaagcggccaccaccattgtagcactggccggtctcgccatgctcagctttattggcgcgaccatttggttcgtcaagaaaaagcgccggcgcatagagcctccggctacattgcctacacagcaaccagctcctccgccaccgcccaactacattccatcttcggctggatcctcgctagcatcagacggattctacttgagatcgccagggtatcctttcatgagctatcacagatgactttgcagaagataaccttttgggagaaggtggatttgggtgtgtgttcaagggcattttgccggatggtcgccctgtcgccgtcaagaagctcaagattgggaatgggcaaggcgagcgtgagttcaaggctgaggtcgatactatcagcagagtacatcataggcatttggtttctctagtaggctattgcattgcggagggccagcgaatgcttgtttatgattttgttcccaacaacacactatattaccacctccatggtcatccacgtattattcatagagatattaaatcatccaatattttgttggacaacaactttgaagctcaggtttctgattttggacttgcaaggttagcggctgattccaatacacatgttaccacacgtgtcatggggacatttgggtatttggctccagagtatgcattgtcaggaaagttaacagcaaagtctgatgtatattcttttggggttgttcttttggagctgatcacaggaagaaaacctgttgatgcttctcagccgttgggagatgaaagtctggttgaatgggcccgctccgttctgacgaaggcgatcgagcatcgggagttcggggaccttcctgaccccaggatggagaacaggttcgacgaaaacgagatgtttcacatgatagtagccgcggccgcatgcatccggcactcggcggcaatgaggccacggatggggcaggtggttagagcactagatagcttagcggactctaatctgaacaacggcctccagcccgggcgctgcgaggtgttcttggagccgcagtccgaggagatcaggctgttccggctgagggagttcggcagcccggacggtagcgaggagctgagccaggcgagctggaggagccggagagacctgtgaacagacacactcggtacaaggtcattaacattcttttttttttgggggccattctttacatgtaattatctcgtttacatgattctttcttccttcttacttttcgtttgttactttactcctccctgaggcaattcttgttcctggtggaatagattttgcattttcgttcgggagataagtaaatgaatcctctgtcttttctctctctctctctctctctccagtgaatagtacacagaaagtttggttcctggcattctttctctgataagtactccagtgaacaatcttgatatgcttcgtcgctgcttttggagcaggacagttgctgaacttgcactgcaagtctctgtacaaggattagggcagcaggtgcaggtcactgtacgcttaagtgacaactatactatacaggcgctgcgttggacgggcacaagtacaatgattagcgggtgctaatttgtattcgcggaatgcat

SEQ ID NO: 36629 - DNA, 3249 bp, Zea Mays
ggcgcctccagtcccagctgcgcttgcttgcttccatggtttccagtttccaccggaagctggacgccgcactgcaaggccagcggtgggcggtggtggctgcggagccactcgcgacaaaaaaatgcacgagaaataccaataccagcggtgttttttttagcgttttcccctcgcctctgcggctctgcccccaacgcgcgatgcctctgtagctgtactgcttgctcctcagtccagctatccgcatagacttcgcaccaacccatctcccagtctcacacaccaaagaggaaaaaaagccttgttttttttcttcggagaaaggagagggggagaaaattatactactctcttctgtccagtccagccgcggacaccaaggcacagaggcaggcaggcggacagggtaggcaagaggcgagctcggcgaaggcgcggagaggggagacagccagccgctgcattgcgctacattgggcaggagggctcgccgccgggggaggctcggatcttgcgtctctggccgtggctgccgcgtgcttgcttcgtttggtggcgctgcgcccattggcgggcggcctcggtccagcgcggcgtgatctggcgcgcgccgccgactccactcgcgtggggaggcctggatcttgacgctctgctgtcgctgccgcgagaccctgggggagccacgctgtgctcagtcgcccgcagtccgctgagctgccgagtgcgtccggcgggcgggagatctggccgacggcgcggcgctgcagatcccctgcctgcgcgggcacggctcactgctgctgtggaggctgttgcgcgcggtggtgccgatgggctacgggtacgtggatcccttcccgccccctcagcagccacaacaggcggcatacgtcgcgccgcagcagggggactacgggcagccgcagccgcagccggctccgcggccaccggcttgcccgtactcgtcgtccgcctccgctccgccgggctccgcgtcctatcatttttcgcctccggcaccgtcccctccgccggtaagtagcccacctccggcgtcccctttaccggagccatcggcgccacctgcaccattgctgccatcgccgccgcctcctgcaccattgccgccatcgcctccgccgccagcattgtcgcctcctccgccggacgccctccctccgtcgcttccaccgtcaccgctgccatatccaacccgatcaccacctcaagccccgccgcccccgctgacgacggatcagccgcgcgttcagccccgcgtatacccatcaccgccaccgccgtccctccctcctccgccgcctcccaccgtctcgccgccagcgccggctccatccaattcgccgtcgccgtcgcctgctccagctgcacaagctccgggtcccgcgcgtgttgctgcctattcgcctcccccgcctagaatcgcccctccgccgcctccgcactatcacggcaagtcgcattacacgccgcactcgcccgtgaagtcgcattcgaactcgagccatgcagctagtggcagtggcaagaacatcgagatatcgagggaagcggccaccaccattgtagcactggccggtctcgccatgctcagctttattggcgcgaccatttggttcgtcaagaaaaagcgccggcgcatagagcctccggctacattgcctacacagcaaccagctcctccgccaccgcccaactacattccatcttcggctggatcctcgctagcatcagacggattctacttgagatcgccagggtatcctttcatgaggtacagcactgggagccatggttttccatactccccagccgactctgggattgggtattcccatatgctgttcacaccagagaatttggcagctatcacagatgactttgcagaagataaccttttgggagaaggtggatttgggtgtgtgttcaagggcattttgccggatggtcgccctgtcgccgtcaagaagctcaagattgggaatgggcaaggcgagcgtgagttcaaggctgagtaagtgaaacatcactggattggcggacaagggttaagattgcagctggagcagcccgagggattggttacctccatgaagattgtcatccacgtattattcatagagatattaaatcatccaatattttgttggacaacaactttgaagctcaggtttctgattttggacttgcaaggttagcggctgattccaatacacatgttaccacacgtgtcatggggacatttgggtatttggctccagagtatgcattgtcaggaaagttaacagcaaagtctgatgtatattcttttggggttgttcttttggagctgatcacaggaagaaaacctgttgatgcttctcagccgttgggagatgaaagtctggttgaatgggcccgctccgttctgacgaaggcgatcgagcatcgggagttcggggaccttcctgaccccaggatggagaacaggttcgacgaaaacgagatgtttcacatgatagtagccgcggccgcatgcatccggcactcggcggcaatgaggccacggatggggcaggtggttagagcactagatagcttagcggactctaatctgaacaacggcctccagcccgggcgctgcgaggtgttcttggagccgcagtccgaggagatcaggctgttccggctgagggagttcggcagcccggacggtagcgaggagctgagccaggcgagctggaggagccggagagacctgtgaacagacacactcggtacaaggtcattaacattcttttttttttgggggccattctttacatgtaattatctcgtttacatgattctttcttccttcttacttttcgtttgttactttactcctccctgaggcaattcttgttcctggtggaatagattttgcattttcgttcgggagataagtaaatgaatcctctgtcttttctctctctctctctctctctccagtgaatagtacacagaaagtttggttcctggcattctttctctgataagtactccagtgaacaatcttgatatgcttcgtcgctgcttttggagcaggacagttgctgaacttgcactgcaagtctctgtacaaggattagggcagcaggtgcaggtcactgtacgcttaagtgacaactatactatacaggcgctgcgttggacgggcacaagtacaatgattagcgggtgctaatttgtattcgcggaatgcat

SEQ ID NO: 36630 - DNA, 3933 bp, Zea Mays
ggcgcctccagtcccagctgcgcttgcttgcttccatggtttccagtttccaccggaagctggacgccgcactgcaaggccagcggtgggcggtggtggctgcggagccactcgcgacaaaaaaatgcacgagaaataccaataccagcggtgttttttttagcgttttcccctcgcctctgcggctctgcccccaacgcgcgatgcctctgtagctgtactgcttgctcctcagtccagctatccgcatagacttcgcaccaacccatctcccagtctcacacaccaaagaggaaaaaaagccttgttttttttcttcggagaaaggagagggggagaaaattatactactctcttctgtccagtccagccgcggacaccaaggcacagaggcaggcaggcggacagggtaggcaagaggcgagctcggcgaaggcgcggagaggggagacagccagccgctgcattgcgctacattgggcaggagggctcgccgccgggggaggctcggatcttgcgtctctggccgtggctgccgcgtgcttgcttcgtttggtggcgctgcgcccattggcgggcggcctcggtccagcgcggcgtgatctggcgcgcgccgccgactccactcgcgtggggaggcctggatcttgacgctctgctgtcgctgccgcgagaccctgggggagccacgctgtgctcagtcgcccgcagtccgctgagctgccgagtgcgtccggcgggcgggagatctggccgacggcgcggcgctgcagatcccctgcctgcgcgggcacggctcactgctgctgtggaggctgttgcgcgcggtggtgccgatgggctacgggtacgtggatcccttcccgccccctcagcagccacaacaggcggcatacgtcgcgccgcagcagggggactacgggcagccgcagccgcagccggctccgcggccaccggcttgcccgtactcgtcgtccgcctccgctccgccgggctccgcgtcctatcatttttcgcctccggcaccgtcccctccgccgtcgcattcgaactcgagccatgcagctagtggcagtggcaagaacatcgagatatcgagggaagcggccaccaccattgtagcactggccggtctcgccatgctcagctttattggcgcgaccatttggttcgtcaagaaaaagcgccggcgcatagagcctccggctacattgcctacacagcaaccagctcctccgccaccgcccaactacattccatcttcggctggatcctcgctagcatcagacggattctacttgagatcgccagggtatcctttcatgaggtacagcactgggagccatggttttccatactccccagccgactctgggattgggtattcccatatgctgttcacaccagagaatttggcagctatcacagatgactttgcagaagataaccttttgggagaaggtggatttgggtgtgtgttcaagggcattttgccggatggtcgccctgtcgccgtcaagaagctcaagattgggaatgggcaaggcgagcgtgagttcaaggctgaggtcgatactatcagcagagtacatcataggcatttggtttctctagtaggctattgcattgcggagggccagcgaatgcttgtttatgattttgttcccaacaacacactatattaccacctccatgtaagtgaaacatcactggattggcggacaagggttaagattgcagctggagcagcccgagggattggttacctccatgaagattgtcatccacgtattattcatagagatattaaatcatccaatattttgttggacaacaactttgaagctcaggtttctgattttggacttgcaaggttagcggctgattccaatacacatgttaccacacgtgtcatggggacatttgggtatttggctccagagtatgcattgtcaggaaagttaacagcaaagtctgatgtatattcttttggggttgttcttttggagctgatcacaggaagaaaacctgttgatgcttctcagccgttgggagatgaaagtctggttgaatgggtgagttcatcacttcattgtctataataagcggccttactgcatgtcactaatgttaggttctaaagtatgcgtaacttttctgttttttaaccataaccagtaaccatagtcatgagattgagatccactaataaatgacatgattatttcgtgatacaccaatggatgtgtctagacttcttcaagcttcaactgttgatttcctgttccactgtctgtcgataaatatccattaagctgaggtggaagtcggatgcctcaaagtttgagttctatcatgcagtcgctaaattctctgctgatgctttcgctagttcattcgttttctttaaaagatgaacggcccttgtacttcttccatgacatggtcattgcttcttataagatgtttaatcgttccactggtcccatttgcacaaacatgtcaaccaagagagcgatatggagagaacgcatttgctaaaagttccagtggctgtaccttttataaagtggggccagtgggcaaccagattattcttccagagtgtcacacaaaaggtggttagagtgctagggacctatttattgcagtcttcatagttcataccgctgttcggtgtgaaagaagttcggatgggaacttagcactcgacgcagatccttgcggtcatggaaggtaccgacacattacacaaacgacacctaaattgatctgaacaaattgcttgtgtctattgtcttggtaagggtttcatactgtcttcatgtactgtgtgcatcgtaaaaagatgccaatgatgctaacccgtagttgtttgaaatatttaggacgtcgctgtgtcttttacaacgaagattatgaattggacttggacaggtttgctgccgttacgatctcaacccagaaccttatgcatgctggaaaatttgcaggcccgctccgttctgacgaaggcgatcgagcatcgggagttcggggaccttcctgaccccaggatggagaacaggttcgacgaaaacgagatgtttcacatgatagtagccgcggccgcatgcatccggcactcggcggcaatgaggccacggatggggcaggtaagtaacacacagtgcgcaccatcttttcttcttcttatattcctgaacggctggcattggcaacgaaggatcaaaacgtgaccggtgtgtctcgttcccccccccaggtggttagagcactagatagcttagcggactctaatctgaacaacggcctccagcccgggcgctgcgaggtgttcttggagccgcagtccgaggagatcaggctgttccggctgagggagttcggcagcccggacggtagcgaggagctgagccaggcgagctggaggagccggagagacctgtgaacagacacactcggtacaaggtcattaacattcttttttttttgggggccattctttacatgtaattatctcgtttacatgattctttcttccttcttacttttcgtttgttactttactcctccctgaggcaattcttgttcctggtggaatagattttgcattttcgttcgggagataagtaaatgaatcctctgtcttttctctctctctctctctctctccagtgaatagtacacagaaagtttggttcctggcattctttctctgataagtactccagtgaacaatcttgatatgcttcgtcgctgcttttggagcaggacagttgctgaacttgcactgcaagtctctgtacaaggattagggcagcaggtgcaggtcactgtacgcttaagtgacaactatactatacaggcgctgcgttggacgggcacaagtacaatgattagcgggtgctaatttgtattcgcggaatgcat

SEQ ID NO: 36631 - DNA, 942 bp, Zea Mays
cgcgcctctcgccggcgcctcgcgatctcgaggcttcgctgatgccgatgcacaacgccaccgcgtcggcgctgctcacctccatgctcgggcttaaacctggctcttggggctggctctccgaaggatttgctacacctctataacaggaaaaaggagtatccgtgataagtgcctgtttttaaacctttgcactagaggattccaaaaacatttttacatgccttgcggagtacacccttggacttctgctgatggaatctgtactaaaatctgcgacaaaaaacttatggtcctatgtcccaattatcttggttctactatatccatcgaattattcgctttccacgctatctccttttccttgtctcgtgtggcattgccatgggattctaatatgacatcagcatggctagtatcaaatatttgttatccgaagcatcaaagcaccagtatgaatgatctatatccatcgaattattcgctttccacgccatcttcttttccttgtctcgtgtggcattgccatgggattctaatatcacatcagcatggctagtatcaaatatttgttatccgaagcatcaaagcaccagtatgaatgatatatttacatgttttgtgttgttaacaagcatcagccaactgaagcagatcgcagattaccagatatgaatatcacatatgtaatgatatataagcatgcaaattctatctggcaagatttcatttgcatgtctaagcataatgttaagaagggcaggtctgataagcataatgttaaggacatttcttgtgtaggggtgagaactctcactgagtcacctgagcgtgggcttgaagcagtctgtcttgtggagagaagtgttcatcggcgtcggcgttgatgaatatgccattccggtggaggaccaagggcgcaactaccaggcgaccccaaat

SEQ ID NO: 36632 - DNA, 1193 bp, Zea Mays
cttatgtccaccgagtcactcagcgcaaatctgcaagcagcccaagaagggtttagactttagaggaaggggacaacggaacccgtcgatggcggcggctgctggcggcgtgcggcgagccctcgcggcgctgcgctccggttccccgtctactatctctgcaacgctctcccgccaggcggcagctcgctctctggagctagcggccgcgtccctgccgcgcgcctctcgccggcgcctcgcgatctcgagggtgccggttgcggcgctcggcggcgtccaggcttcgctgatgccgatgcacaacgccaccgcgtcggcgctgctcacctccatgctcgggcttaaacctggctcttggggctggctctccgaaggatttgctacacctctataacaggaaaaaggagtatccgtgataagtgcctgtttttaaacctttgcactagaggattccaaaaacatttttacatgccttgcggagtacacccttggacttctgctgatggaatctgtactaaaatctgcgacaaaaaacttatggtcctatgtcccaattatcttggttctactatatccatcgaattattcgctttccacgctatctccttttccttgtctcgtgtggcattgccatgggattctaatatgacatcagcatggctagtatcaaatatttgttatccgaagcatcaaagcaccagtatgaatgatctatatccatcgaattattcgctttccacgccatcttcttttccttgtctcgtgtggcattgccatgggattctaatatcacatcagcatggctagtatcaaatatttgttatccgaagcatcaaagcaccagtatgaatgatatatttacatgttttgtgttgttaacaagcatcagccaactgaagcagatcgcagattaccagatatgaatatcacatatgtaatgatatataagcatgcaaattctatctggcaagatttcatttgcatgtctaagcataatgttaagaagggcaggtctgataagcataatgttaaggacatttcttgtgtaggggtgagaactctcactgagtcacctgagcgtgggcttgaagcagtctgtcttgtggagagaagtgttcatcggcgtcggcgttgatgaatatgccattccggtggaggaccaagggcgcaactaccaggcgaccccaaat

SEQ ID NO: 36633 - DNA, 948 bp, Zea Mays
cactaaactgactatagccgagcacccatttagcttattgtttgtgcagtttactatgaataatactacgaacgatgagtcagttcccccatggacgaaacgactgcatgcattgtcaaagaacaagagtgagcattgacttgtattggcacacaacctacaatggggagtggccatggaatgcatgatatcgattgggattcaataatggtagaagaaacgaccaacgaagaaggaagaaatgatgttactagtgaacaaggactatattttcaacttagactagataatcaagatgatggaagggaagatgattcaagtgcttcccgttttggaaatagcattccatgtgaagatgaattgggagcaggcattccatgttctgatttagtgcttaatgagactaggaccatatatgatatgaacaatccagtaatggagcctggcagcttgtatgcaacaatgcaccacttcagactcgcaattagacaatacgccataaataaaaaatttgagcttggaattgaggcaactaataagactagatttagagggtattgtaaagggtctaattgcccctggagaattcatgctagaccggagatgaaaggggctccaacaattcaagtgattgtcttgaattacaaacatacttgtacttcgagtggtagacgtaagacgactacacctacatgagcttgggttgcagcatgtgcgcttccattactgatgaagaagcctcatatgggtgctaaggagctacaaactacattgcagaacacttttggttgtaccattgcatatgacacagtttggcacgggaaagagaaagctttaaaggaattatttggtagttgggaagatagctttcagctactatggcattggagagaagcagttatgcaaaaagtcatcggatagtgtcattgagcttgatgtaaaaaatgg

SEQ ID NO: 36634 - DNA, 995 bp, Zea Mays
gtgggcttctagggttcagaacgcttaggcaagaactacagtcccagtccgcacaggcgcacagccgccctccagcccgcaatccgcacagctgccctccagtcccgcacagctgtcgttgaacaggaactaggagccggcggcgcacaaggaccaggagccgccggcgcacacagctgcaacccgcaccggcgaacacggctgcagctctcgccatcgccccaagcccccaggacagagccgctgcctaaggaggagctgccgtactccctgaccttgtgcagcgccctactccctgaccttgtgcagggctcctcgccctcaagatgaacacatcctcagatccttttcagcaccttcattcgagtcatccatgctgtgagcctaaaagaagtggagccatgcatgaagaatacatcaaaaggtgctttaggggctagtgtcaactccaaaatgctcatattgaagtctaaccatttctctcttcagatttgactcattcaatacatcagccgcttttccatcgctcttgtgattctgaaaacgaacatggtgaatctaactaagaaatcaaactagagtgaactgtaaagtaaacacatcgttttacagctccaaggtttaggattgaggaaagaatccttcatattccttttgtgtactaaaacaaaaggccacaattttccatatttacaaaaactaaaaactagtgagcacacctgcaccacatacttcataataagagtgacatgtgatttaaagctagttgtataagtgacagactgttacctccaccaatttgtgcaacttgtcacggtcatgatcctgcatgcaactcaaatctacaaagtatccataaggaaaacaaatcacaaaagctttgcgaaataaaaggcacatacctcaattgaatcaaaccccttcagatttgacattggaaataatgggtatgatgatgtagggaagcacacaacatggtaccacttagtattttc

SEQ ID NO: 36635 - DNA, 497 bp, Zea Mays
gtgggcttctagggttcagaacgcttaggcaagaactacagtcccagtccgcacaggcgcacagccgccctccagcccgcaatccgcacagctgccctccagtcccgcacagctgtcgttgaacaggaactaggagccggcggcgcacaaggaccaggagccgccggcgcacacagctgcaacccgcaccggcgaacacggctgcagctctcgccatcgccccaagcccccaggacagagccgctgcctaaggaggagctgccgtactccctgaccttgtgcagcgccctactccctgaccttgtgcagggctcctcgccctcaagatgaacacatcctcaggtaactgctaggagaaaaaagaagaatcaggtgttgggctttgcagcagtttccttttttgaggaaaagatgccagtgatttaccaattcacaatagcaggaaatcacttacagcctgctgagtgccaggctttaaggaaactactctaatgact

SEQ ID NO: 36636 - DNA, 2697 bp, Zea Mays
ggcaccgcagcaacccattccatagccacgcgagtgacgcgacgcgacgcacggcctgcctgaggcagcgcatctgcttggcggccgggagcagccgccgcttcgccttcgtgagggtttaagcgacgaagagaaaggggaggaagcgagcccccagggaggtgcagagggagagggtgggagatggctgcaatggttggagcgcgtagggcgctcttggccgctcggttctctcctcgcggcaccatcgcggcgtcggccgcgccagctcccctctaccggcccatggattcgccactcaggcttccagctgaaagagtttgtctacagtcttgggttccacatcgaggggctggtacctttgcatctgaaaggactgatgaagattatcagcgtgagtggggacaaaacaaagcaggtagctacactgactcccgttggaacggctctaatctccaacttcagagagatgtcacttcagctggttccacaacaggtactcacaaaaataagggtgtggatggtgttggtggcagttctgagcaacattacagaagtggtggatcatatggctttcaaaacaatcatcagccatatactggtacaagagcgaataatgagagatacaatgcatcacaaccttatagaggtagtggtccatacagccagcaaggccttgatggacatttttcaaatgatcgtcaacagtacaatggcacagaagctaatagtacatatagctctggatactacacccaaagtaagcagaagatttatgaaggagagggagctaataatgggcagtatggatatggtccttcaggacaaccatgtccgaacccagttggaaatagccagcgagttcagaaacagcaatatgttgatcatagatctgggggaagttatccagatagatctgggcatcatccctctcaatatgtaaatccaactcattcccgtaaggagcatgttgcagggtttcagcaaggcaacaatagtaattttggatataatgcttcgcaggcatatcaaagcccttatttcactaggcaggctgatacacatagtacttctcaaggatattccatgtacctaaatacagatgtgcaacgcctctctcatggagttcatcaagaaaaacattcacatgcacaatctgctggatcatttgggaaccatgtaaatagtgcacctcatgaatatggcaaatatcatcagtcactacaaggcaacccttcaaatgttggatcgccttacgaagtacctagtgaagctggcagcaaacacaaatgtactgttgaagaactggagaagttttgtgatgatggcaatgtaaaagaagctctggaagttttggctatgctaaaggaaaacagaattgtgctacatgctcctcagtacttcagattgatgcaagcatgtggtgatgcaactgccctttcagaagcaagattaatacatagtcaaatatctgaatcatcacttactgttgacacagattttcaaaacaaaattatggagatgtatgctaggtgtggttctatggaagatgcaaagaagattttcagttctatggatcatcataatttgacttcttggaacactatgatctcaggttttgtgcacaatgttcttggtgaagaagcaatagatttttttgaacggtttaagcagacaggggacaagccagatcatggcatgttcagacatgttttcttggcatgtggaattttgggatctgttaatgaaggaatgttgcattttgaatccatgcagaaagattttggcatacatcccactacagagcattatgcaagcattgttactatgcttggacagtctggctacattgtcgaggcttatgaattcgtggaacggatgcctgtggaaccaagcattgagatcttgcaaaggaaaaggaaaggaaaaaggcaagtgtcgccgaagctcggagcaaggtccatgaatacagagctggcgaccgatctcaccctgacactcctaagatctatgaagagctgaggtatttgttggctcacatgaaggaagctgggtatattgctgacactcgatttgttcttcacgatgttgatcaagaaaccaaagaggatgctttactggctcacagtgagaggctggctatcagttacggtcttataacaagtgctccccgctcacctattcgggttataaagaatcttcgatcctgtggggattgtcacacggctttcaagataatctcaaaacttgttggacgtcagatcattgcaagggatgcaaagaggttccaccacttcgaaaatggtgtgtgttcttgcaaagactactggtaaacaagatgaaagaaagtccacatcttggtcaatttttattggcacaagaccgctataggttgtttatgtgctgaaggtaggctgatgcctatctaacatttagttagctaatagtttcatgtgagagacatgctgtatgatgtcgtcagtgagaaacagccaaacaggtcctaagcagctctggtgttctattttgcagctcatacgttaagcctgagcttttactttaacaactgttgtctctgatttgttacttgccaccaaaataaaacagtagaatgtaactgggtagtggtcccttggcatgtaaactttgattcagctgattacaaagctttctgactgcattctggatccattgctt

SEQ ID NO: 36637 - DNA, 865 bp, Zea Mays
attagttctcaaactacttaatccaacgattggtattgcttggcttccaaatgaattttcatttatgaagcttatcctctctaaaacttccctgtgatgcatacaactgagggttctgctttcgtacaggcactgagtttgtgcagtaagacttgttgtgcttatacatgttggccttctccaatttagacaaataagttgtatgttagcgtccttgtgatgctgatagacgatgcacctattttgttcaggctgatttggtaagtatgttctatgatgcatttggggagttcctttacctgacacaaagatgtatgctgagggctcttttcttatgaacgtagtgaggttatgtgtttttattattcttctatcaaagaatgtgttgattgtgtttctatgtgttaacagatgaagacaaaagctcccagtttgaacaaagctcttatgttgtgaatcacttgtgggagttatgcgaagagaatgacatagatagtgctactgcacaatgtaattgttattgctctgaaatcatgtaattgtatagggaactgatgctctcaaccccttgtctgcttagggatgttgtaaagttcaccgatttttatgcttcagattgttaaaaataacttgatgttgatccaaatatgtagttcctagagttggaaaagtatgtaacactttttgtaaagagcgttacatagaacatattcagaagctatctgaaaaggtgtgtaatatgcgcttctggttgctgaatcaatttatggactctccacattagagagagagtgcatcacaactttcatgtgaatttggctaccattgcccgcttattcagatattagtccttaagtagatatta

SEQ ID NO: 36638 - DNA, 4730 bp, Zea Mays
ccgcaggcacccctttgcacagcagctccgaagccacaccacagttatttattactgttttttcgttgcctccaatccaatagagttgaccgaaccacgcgccgcccgctgacatggacgacgtagtaccagcgacagcgaagcagaccgtcgttctgtaccccggcggcggcgccgggcacgtcgcgccgatgacgcagctcgccaaggtcttcgtccgccacggctacgacgtcaccatggtgctcctggagccgcccatcaagtcgaacgcctccggcgccagcttcgtcgagagcttcgccgcctccaacccgtccatcaccttccacctcctcccgccgatccctccccccgacctcgccagctccaccaagcaccctttcctcgtcgtgctggagttgctgggccagtacaacgacaagctcgagagcttcctccgcaccatcccgcgcgagcgcctgcactcccttgtcatcgacatgttctgcaccgacgccatcgacgtggccgcgaaggtgggcgtccccgtctacacgttcttcgcggcgaacgccggagccctggccgtcttaacacagacggtggcgctgcttgacggccggcaaacgggcctcaaggagctcggggacacgcccatcgagttccttggcgtgccgccgatcccggcgtcgcacatcatcagggagatgctcgaggacgcggaggacgaggtgcgcacggcaatggcgaagatctggaagcgcgacacggacacccggggcgtcctcatcaataccttctactcgctggaggcccaggccctgcaggcgttcagtgacccgctgtgcgtccctggcaaagtgttgcctcctgtttaccccatcgggccgttggttggcaagggcgggagcgggacggacggaggagaggcggcggagaggccgcatgagtgcctcgcctggctcgacgcgcagccggagcgcagcgtcgtgttcctctgctgggggagcaggggcttgctgtcagaggagcagcttaaggagatagccgctggcctagagaagtccgggcaacggttcctgtgggtggtgcgcacgccggccagcagcgacgacccgaaacgattctggctgccacgcccggagccggaccttgacgcccttctgccggaggggttcttggagcggaccaaggaccgcggcctcgtcatcaagtcgtgggcgccgcaggtggacgtgctcagcaaccccgctgttggcgcgtttgtcacccactgcgggtggaactcgtcgcttgaggccatcacagcgggtgtgccgatgctgtgctggccacagggcgcagagcagaagatcaacaaggtacttatgaccgaggccatgggcatcgggctggagctggaggggtacaacacaggtttcatcaaggctgaggagatagagacgaaggtgaggcttgtgctggagtccgaggaggggagggagattaggacacgggcggcagaggtgaagaaagaagcacacgcggcgttggaggacgggggatcatcgaaggcagcatttctccaattcttgtcagatgtcaagaatattaattaggtcgggaagtgatcaatctttaaccgcccgatacaacgtaacacaaactattcaataaaatattagtatacatattgcttaggaaaaaaaatcccataaacaagtaataaagaaaacatgtgtgtagcaacaatatctatatctatactacttattaaggtagcaaggataatctgcctccccgccgttctgccttccaacgatctcaactgtccatccacgcctctgttttcgtcccgtcggatgctgccaacgcccgcgcgcatcccctggtcgtcagccccacccatccgtgcgagcgagcaacccattgcagccaccaccgccctacctactcacctcctcggcgcgaacagccgccgaacccttatcgctcgcccctcgcccgtgccagcaacccccgccaccgccgccgccctgcctctcgtccacccctccgccgcgagatgtcgccggcccctcaccatcctctatccacagcgcgcggggcgtagcccccctctagcgccgctcaagggtgaagggcccatccgcaccctgatgttggccacctccaccatgctctgatgcccatccttcgtcatgaccccctccagttccattactgacggacggtcctcttcataggcaaggtagagatggaggacagcaaaacactaacacccgagccatgccaccaccaatctattcctccaaacccttctgtacatgtgcgctacacatacatgaggctcctcctcctcgtcaaccccacatgatgaggcgtacttcagatgcagcgtgctcaagtgtaggagattgtcaatatcatcttgttgaatcgatgtgggggaggatgtctacttggtgagccacaagattcaggaatatcattgtagattgtttttgaattaggccacctatcctaatttttcgagtttgcatgggcctgcgatgcattacggaggcatttggaggaaaggttattcgtgcaccttctggaatgacgcatgagaaaatctctccagttcattatgatgaggaattaggaaattccttattcaatggcttgccaaaatgtcgtgcggtactacaagcagaacgccgatgaaacatggttcgacgtctcgctgaatagcctgcttcccggctcagtcctcaattgccagcgccaggtgtcaggatgtctcatccagaaaaagcctaatggctactcaaagatacgaaatggccaaggactgctgacgatgatgacgacatggccaccatcgccgccctctggacctcaacaaccatccataagagaaacgccaagaaagaagatacaactgtctatagaaacaataaacaatttttcttctcggactgctcaatctgacgattggtattgcttggcttccaaatgaattttcatttatgaagcttatcctctctaaagtaaggcttcttcgcacgttgtatgttgatagaaacctagatgattttgataatcaggcttctactatacataattttcttctttttccctttattggtaattgaaccttataattacatagaatggatgataaaaagagtgtgcattgttgttgaactgaattagtagcttttccatttttatgatggcatatgagaagtgtactaaagtccaatgatttttggttgcatatatattcatatatgttcttattcatgctttagatggctcatcccatggtagtgtgcttccatgctgctgtattttcatgtataatatcttgtcatgattagttttgtcaaatagtcatcaaatgtgtatcttgaagatatttgtctgcttattgttttaggtcatatatgacattttttaagtgatgtatgcacaaactcaattatgttctctaattcactcatcctgtgaaactatgctttttataactgcataaatcctatcctcatatatgtagtctgcctgtggtggccctgtgaatgctgtgacaatgctgttgagtatgctggccatgtgactcctttgaccatgttgttgagcttgatggccctgtgaatcctatgaatcttatagacgatgaccaggttttttgtaaactcattcatttagtgtagtttgcactatgatgcataaatctaagggcctttctttgcatagccattgagtttgtgattttataactccacaaattctatcctcatatatgcagtctgctctatgatggccctgtgatgcttggagatgatgaacctgttctgttaactcacttattttgtgcgatctgtcctgtgatggatggagctgaggggcctactttttttataggcattaagtttgtgcagtaacacctgtaatgcttatacatgctgacactatttggttcactcactaattttgtgcagacttccctgtgatgcatacaactgagggttctgctttcgtacaggcactgagtttgtgcagtaagacttgttgtgcttatacatgttggccttctccaatttagacaaataagttgtatgttagcgtccttgtgatgctgatagacgatgcacctattttgttcaggctgatttggtaagtatgttctatgatgcatttggggagttcctttacctgacacaaagatgtatgctgagggctcttttcttatgaacgtagtgaggttatgtgtttttattattcttctatcaaagaatgtgttgattgtgtttctatgtgttaacagatgaagacaaaagctcccagtttgaacaaagctcttatgttgtgaatcacttgtgggagttatgcgaagagaatgacatagatagtgctactgcacaatgtaattgttattgctctgaaatcatgtaattgtatagggaactgatgctctcaaccccttgtctgcttagggatgttgtaaagttcaccgatttttatgcttcagattgttaaaaataacttgatgttgatccaaatatgtagttcctagagttggaaaagtatgtaacactttttgtaaagagcgttacatagaacatattcagaagctatctgaaaaggtgtgtaatatgcgcttctggttgctgaatcaatttatggactctccacattagagagagagtgcatcacaactttcatgtgaatttggctaccattgcccgcttattcagatattagtccttaagtagatatta

SEQ ID NO: 36639 - DNA, 3767 bp, Zea Mays
ccgcaggcacccctttgcacagcagctccgaagccacaccacagttatttattactgttttttcgttgcctccaatccaatagagttgaccgaaccacgcgccgcccgctgacatggacgacgtagtaccagcgacagcgaagcagaccgtcgttctgtaccccggcggcggcgccgggcacgtcgcgccgatgacgcagctcgccaaggtcttcgtccgccacggctacgacgtcaccatggtgctcctggagccgcccatcaagtcgaacgcctccggcgccagcttcgtcgagagcttcgccgcctccaacccgtccatcaccttccacctcctcccgccgatccctccccccgacctcgccagctccaccaagcaccctttcctcgtcgtgctggagttgctgggccagtacaacgacaagctcgagagcttcctccgcaccatcccgcgcgagcgcctgcactcccttgtcatcgacatgttctgcaccgacgccatcgacgtggccgcgaaggtgggcgtccccgtctacacgttcttcgcggcgaacgccggagccctggccgtcttaacacagacggtggcgctgcttgacggccggcaaacgggcctcaaggagctcggggacacgcccatcgagttccttggcgtgccgccgatcccggcgtcgcacatcatcagggagatgctcgaggacgcggaggacgaggtgcgcacggcaatggcgaagatctggaagcgcgacacggacacccggggcgtcctcatcaataccttctactcgctggaggcccaggccctgcaggcgttcagtgacccgctgtgcgtccctggcaaagtgttgcctcctgtttaccccatcgggccgttggttggcaagggcgggagcgggacggacggaggagaggcggcggagaggccgcatgagtgcctcgcctggctcgacgcgcagccggagcgcagcgtcgtgttcctctgctgggggagcaggggcttgctgtcagaggagcagcttaaggagatagccgctggcctagagaagtccgggcaacggttcctgtgggtggtgcgcacgccggccagcagcgacgacccgaaacgattctggctgccacgcccggagccggaccttgacgcccttctgccggaggggttcttggagcggaccaaggaccgcggcctcgtcatcaagtcgtgggcgccgcaggtggacgtgctcagcaaccccgctgttggcgcgtttgtcacccactgcgggtggaactcgtcgcttgaggccatcacagcgggtgtgccgatgctgtgctggccacagggcgcagagcagaagatcaacaaggtacttatgaccgaggccatgggcatcgggctggagctggaggggtacaacacaggtttcatcaaggctgaggagatagagacgaaggtgaggcttgtgctggagtccgaggaggggagggagattaggacacgggcggcagaggtgaagaaagaagcacacgcggcgttggaggacgggggatcatcgaaggcagcatttctccaattcttgtcagatgtcaagaatattaattaggtcgggaagtgatcaatctttaaccgcccgatacaacgtaacacaaactattcaataaaatattagtatacatattgcttaggaaaaaaaatcccataaacaagtaataaagaaaacatgtgtgtagcaacaatatctatatctatactacttattaaggtagcaaggataatctgcctccccgccgttctgccttccaacgatctcaactgtccatccacgcctctgttttcgtcccgtcggatgctgccaacgcccgcgcgcatcccctggtcgtcagccccacccatccgtgcgagcgagcaacccattgcagccaccaccgccctacctactcacctcctcggcgcgaacagccgccgaacccttatcgctcgcccctcgcccgtgccagcaacccccgccaccgccgccgccctgcctctcgtccacccctccgccgcgagatgtcgccggcccctcaccatcctctatccacagcgcgcggggcgtagcccccctctagcgccgctcaagggtgaagggcccatccgcaccctgatgttggccacctccaccatgctctgatgcccatccttcgtcatgaccccctccagttccattactgacggacggtcctcttcataggcaagatgaggcgtacttcagatgcagcgtgctcaagtgtaggagattgtcaatatcatcttgttgaatcgatgtgggggaggatgtctacttggtgaaacatccaaaaaagggactttgtcctttattttgaatcctttatcattctgttattagtacattggggatgcattatgattgtaataaaatatgttcacatttgttcttaaggtgagccacaagattcaggaatatcattgtagattgtttttgaattaggccacctatcctaatttttcgagtttgcatgggcctgcgatgcattacggaggcatttggaggaaaggttattcgtgcaccttctggaatgacgcatgagaaaatctctccagttcattatgatgaggaattaggaaattccttattcaatggcttgccaaaatgtcgtgcggtactacaagcagaacgccgatgaaacatggttcgacgtctcgctgaatagcctgcttcccggctcagtcctcaattgccagcgccaggtgtcaggatgtctcatccagaaaaagcctaatggctactcaaagatacgaaatggccaaggactgctgacgatgatgacgacatggccaccatcgccgccctctggacctcaacaaccatccataagagaaacgccaagaaagaagatacaactgtctatagaaacaataaacaatttttcttctcggactgctcaatctgacgattggtattgcttggcttccaaatgaattttcatttatgaagcttatcctctctaaaacttccctgtgatgcatacaactgagggttctgctttcgtacaggcactgagtttgtgcagtaagacttgttgtgcttatacatgttggccttctccaatttagacaaataagttgtatgttagcgtccttgtgatgctgatagacgatgcacctattttgttcaggctgatttggtaagtatgttctatgatgcatttggggagttcctttacctgacacaaagatgtatgctgagggctcttttcttatgaacgtagtgaggttatgtgtttttattattcttctatcaaagaatgtgttgattgtgtttctatgtgttaacagatgaagacaaaagctcccagtttgaacaaagctcttatgttgtgaatcacttgtgggagttatgcgaagagaatgacatagatagtgctactgcacaatgtaattgttattgctctgaaatcatgtaattgtatagggaactgatgctctcaaccccttgtctgcttagggatgttgtaaagttcaccgatttttatgcttcagattgttaaaaataacttgatgttgatccaaatatgtagttcctagagttggaaaagtatgtaacactttttgtaaagagcgttacatagaacatattcagaagctatctgaaaaggtgtgtaatatgcgcttctggttgctgaatcaatttatggactctccacattagagagagagtgcatcacaactttcatgtgaatttggctaccattgcccgcttattcagatattagtccttaagtagatatta

SEQ ID NO: 36640 - DNA, 3892 bp, Zea Mays
ccgcaggcacccctttgcacagcagctccgaagccacaccacagttatttattactgttttttcgttgcctccaatccaatagagttgaccgaaccacgcgccgcccgctgacatggacgacgtagtaccagcgacagcgaagcagaccgtcgttctgtaccccggcggcggcgccgggcacgtcgcgccgatgacgcagctcgccaaggtcttcgtccgccacggctacgacgtcaccatggtgctcctggagccgcccatcaagtcgaacgcctccggcgccagcttcgtcgagagcttcgccgcctccaacccgtccatcaccttccacctcctcccgccgatccctccccccgacctcgccagctccaccaagcaccctttcctcgtcgtgctggagttgctgggccagtacaacgacaagctcgagagcttcctccgcaccatcccgcgcgagcgcctgcactcccttgtcatcgacatgttctgcaccgacgccatcgacgtggccgcgaaggtgggcgtccccgtctacacgttcttcgcggcgaacgccggagccctggccgtcttaacacagacggtggcgctgcttgacggccggcaaacgggcctcaaggagctcggggacacgcccatcgagttccttggcgtgccgccgatcccggcgtcgcacatcatcagggagatgctcgaggacgcggaggacgaggtgcgcacggcaatggcgaagatctggaagcgcgacacggacacccggggcgtcctcatcaataccttctactcgctggaggcccaggccctgcaggcgttcagtgacccgctgtgcgtccctggcaaagtgttgcctcctgtttaccccatcgggccgttggttggcaagggcgggagcgggacggacggaggagaggcggcggagaggccgcatgagtgcctcgcctggctcgacgcgcagccggagcgcagcgtcgtgttcctctgctgggggagcaggggcttgctgtcagaggagcagcttaaggagatagccgctggcctagagaagtccgggcaacggttcctgtgggtggtgcgcacgccggccagcagcgacgacccgaaacgattctggctgccacgcccggagccggaccttgacgcccttctgccggaggggttcttggagcggaccaaggaccgcggcctcgtcatcaagtcgtgggcgccgcaggtggacgtgctcagcaaccccgctgttggcgcgtttgtcacccactgcgggtggaactcgtcgcttgaggccatcacagcgggtgtgccgatgctgtgctggccacagggcgcagagcagaagatcaacaaggtacttatgaccgaggccatgggcatcgggctggagctggaggggtacaacacaggtttcatcaaggctgaggagatagagacgaaggtgaggcttgtgctggagtccgaggaggggagggagattaggacacgggcggcagaggtgaagaaagaagcacacgcggcgttggaggacgggggatcatcgaaggcagcatttctccaattcttgtcagatgtcaagaatattaattaggtcgggaagtgatcaatctttaaccgcccgatacaacgtaacacaaactattcaataaaatattagtatacatattgcttaggaaaaaaaatcccataaacaagtaataaagaaaacatgtgtgtagcaacaatatctatatctatactacttattaaggtagcaaggataatctgcctccccgccgttctgccttccaacgatctcaactgtccatccacgcctctgttttcgtcccgtcggatgctgccaacgcccgcgcgcatcccctggtcgtcagccccacccatccgtgcgagcgagcaacccattgcagccaccaccgccctacctactcacctcctcggcgcgaacagccgccgaacccttatcgctcgcccctcgcccgtgccagcaacccccgccaccgccgccgccctgcctctcgtccacccctccgccgcgagatgtcgccggcccctcaccatcctctatccacagcgcgcggggcgtagcccccctctagcgccgctcaagggtgaagggcccatccgcaccctgatgttggccacctccaccatgctctgatgcccatccttcgtcatgaccccctccagttccattactgacggacggtcctcttcataggcaaggtagagatggaggacagcaaaacactaacacccgagccatgccaccaccaatctattcctccaaacccttctgtacatgtgcgctacacatacatgaggctcctcctcctcgtcaaccccacatgatgaggcgtacttcagatgcagcgtgctcaagtgtaggagattgtcaatatcatcttgttgaatcgatgtgggggaggatgtctacttggtgaaacatccaaaaaagggactttgtcctttattttgaatcctttatcattctgttattagtacattggggatgcattatgattgtaataaaatatgttcacatttgttcttaaggtgagccacaagattcaggaatatcattgtagattgtttttgaattaggccacctatcctaatttttcgagtttgcatgggcctgcgatgcattacggaggcatttggaggaaaggttattcgtgcaccttctggaatgacgcatgagaaaatctctccagttcattatgatgaggaattaggaaattccttattcaatggcttgccaaaatgtcgtgcggtactacaagcagaacgccgatgaaacatggttcgacgtctcgctgaatagcctgcttcccggctcagtcctcaattgccagcgccaggtgtcaggatgtctcatccagaaaaagcctaatggctactcaaagatacgaaatggccaaggactgctgacgatgatgacgacatggccaccatcgccgccctctggacctcaacaaccatccataagagaaacgccaagaaagaagatacaactgtctatagaaacaataaacaatttttcttctcggactgctcaatctgacgattggtattgcttggcttccaaatgaattttcatttatgaagcttatcctctctaaaacttccctgtgatgcatacaactgagggttctgctttcgtacaggcactgagtttgtgcagtaagacttgttgtgcttatacatgttggccttctccaatttagacaaataagttgtatgttagcgtccttgtgatgctgatagacgatgcacctattttgttcaggctgatttggtaagtatgttctatgatgcatttggggagttcctttacctgacacaaagatgtatgctgagggctcttttcttatgaacgtagtgaggttatgtgtttttattattcttctatcaaagaatgtgttgattgtgtttctatgtgttaacagatgaagacaaaagctcccagtttgaacaaagctcttatgttgtgaatcacttgtgggagttatgcgaagagaatgacatagatagtgctactgcacaatgtaattgttattgctctgaaatcatgtaattgtatagggaactgatgctctcaaccccttgtctgcttagggatgttgtaaagttcaccgatttttatgcttcagattgttaaaaataacttgatgttgatccaaatatgtagttcctagagttggaaaagtatgtaacactttttgtaaagagcgttacatagaacatattcagaagctatctgaaaaggtgtgtaatatgcgcttctggttgctgaatcaatttatggactctccacattagagagagagtgcatcacaactttcatgtgaatttggctaccattgcccgcttattcagatattagtccttaagtagatatta

SEQ ID NO: 36641 - DNA, 4420 bp, Zea Mays
ccgcaggcacccctttgcacagcagctccgaagccacaccacagttatttattactgttttttcgttgcctccaatccaatagagttgaccgaaccacgcgccgcccgctgacatggacgacgtagtaccagcgacagcgaagcagaccgtcgttctgtaccccggcggcggcgccgggcacgtcgcgccgatgacgcagctcgccaaggtcttcgtccgccacggctacgacgtcaccatggtgctcctggagccgcccatcaagtcgaacgcctccggcgccagcttcgtcgagagcttcgccgcctccaacccgtccatcaccttccacctcctcccgccgatccctccccccgacctcgccagctccaccaagcaccctttcctcgtcgtgctggagttgctgggccagtacaacgacaagctcgagagcttcctccgcaccatcccgcgcgagcgcctgcactcccttgtcatcgacatgttctgcaccgacgccatcgacgtggccgcgaaggtgggcgtccccgtctacacgttcttcgcggcgaacgccggagccctggccgtcttaacacagacggtggcgctgcttgacggccggcaaacgggcctcaaggagctcggggacacgcccatcgagttccttggcgtgccgccgatcccggcgtcgcacatcatcagggagatgctcgaggacgcggaggacgaggtgcgcacggcaatggcgaagatctggaagcgcgacacggacacccggggcgtcctcatcaataccttctactcgctggaggcccaggccctgcaggcgttcagtgacccgctgtgcgtccctggcaaagtgttgcctcctgtttaccccatcgggccgttggttggcaagggcgggagcgggacggacggaggagaggcggcggagaggccgcatgagtgcctcgcctggctcgacgcgcagccggagcgcagcgtcgtgttcctctgctgggggagcaggggcttgctgtcagaggagcagcttaaggagatagccgctggcctagagaagtccgggcaacggttcctgtgggtggtgcgcacgccggccagcagcgacgacccgaaacgattctggctgccacgcccggagccggaccttgacgcccttctgccggaggggttcttggagcggaccaaggaccgcggcctcgtcatcaagtcgtgggcgccgcaggtggacgtgctcagcaaccccgctgttggcgcgtttgtcacccactgcgggtggaactcgtcgcttgaggccatcacagcgggtgtgccgatgctgtgctggccacagggcgcagagcagaagatcaacaaggtacttatgaccgaggccatgggcatcgggctggagctggaggggtacaacacaggtttcatcaaggctgaggagatagagacgaaggtgaggcttgtgctggagtccgaggaggggagggagattaggacacgggcggcagaggtgaagaaagaagcacacgcggcgttggaggacgggggatcatcgaaggcagcatttctccaattcttgtcagatgtcaagaatattaattaggtcgggaagtgatcaatctttaaccgcccgatacaacgtaacacaaactattcaataaaatattagtatacatattgcttaggaaaaaaaatcccataaacaagtaataaagaaaacatgtgtgtagcaacaatatctatatctatactacttattaaggtagcaaggataatctgcctccccgccgttctgccttccaacgatctcaactgtccatccacgcctctgttttcgtcccgtcggatgctgccaacgcccgcgcgcatcccctggtcgtcagccccacccatccgtgcgagcgagcaacccattgcagccaccaccgccctacctactcacctcctcggcgcgaacagccgccgaacccttatcgctcgcccctcgcccgtgccagcaacccccgccaccgccgccgccctgcctctcgtccacccctccgccgcgagatgtcgccggcccctcaccatcctctatccacagcgcgcggggcgtagcccccctctagcgccgctcaagggtgaagggcccatccgcaccctgatgttggccacctccaccatgctctgatgcccatccttcgtcatgaccccctccagttccattactgacggacggtcctcttcataggcaaggtagagatggaggacagcaaaacactaacacccgagccatgccaccaccaatctattcctccaaacccttctgtacatgtgcgctacacatacatgaggctcctcctcctcgtcaaccccacatgatgaggcgtacttcagatgcagcgtgctcaagtgtaggagattgtcaatatcatcttgttgaatcgatgtgggggaggatgtctacttggtgaaacatccaaaaaagggactttgtcctttattttgaatcctttatcattctgttattagtacattggggatgcattatgattgtaataaaatatgttcacatttgttcttaaggtgagccacaagattcaggaatatcattgtagattgtttttgaattaggccacctatcctaatttttcgagtttgcatgggcctgcgatgcattacggaggcatttggaggtagcatttatctttataccaggtcagtagtttttaatggcctctgcttttgttactcaaacatttatgacatgaaaatgcaggaaaggttattcgtgcaccttctggaatgacgcatgagaaaatctctccagttcattatgatgaggaattaggaaattccttattcaatggcttgccaaaatgtcgtgcggtactacaagcagaacgccgatgaaacatggttcgacgtctcgctgaatagcctgcttcccggctcagtcctcaattgccagcgccaggtgtcaggatgtctcatccagaaaaagcctaatggctactcaaagatacgaaatggccaaggactgctgacgatgatgacgacatggccaccatcgccgccctctggacctcaacaaccatccataagagaaacgccaagaaagaagatacaactgtctatagaaacaataaacaatttttcttctcggactgctcaatctgacgattggtattgcttggcttccaaatgaattttcatttatgaagcttatcctctctaaatctgcctgtggtggccctgtgaatgctgtgacaatgctgttgagtatgctggccatgtgactcctttgaccatgttgttgagcttgatggccctgtgaatcctatgaatcttatagacgatgaccaggttttttgtaaactcattcatttagtgtagtttgcactatgatgcataaatctaagggcctttctttgcatagccattgagtttgtgattttataactccacaaattctatcctcatatatgcagtctgctctatgatggccctgtgatgcttggagatgatgaacctgttctgttaactcacttattttgtgcgatctgtcctgtgatggatggagctgaggggcctactttttttataggcattaagtttgtgcagtaacacctgtaatgcttatacatgctgacactatttggttcactcactaattttgtgcagacttccctgtgatgcatacaactgagggttctgctttcgtacaggcactgagtttgtgcagtaagacttgttgtgcttatacatgttggccttctccaatttagacaaataagttgtatgttagcgtccttgtgatgctgatagacgatgcacctattttgttcaggctgatttggtaagtatgttctatgatgcatttggggagttcctttacctgacacaaagatgtatgctgagggctcttttcttatgaacgtagtgaggttatgtgtttttattattcttctatcaaagaatgtgttgattgtgtttctatgtgttaacagatgaagacaaaagctcccagtttgaacaaagctcttatgttgtgaatcacttgtgggagttatgcgaagagaatgacatagatagtgctactgcacaatgtaattgttattgctctgaaatcatgtaattgtatagggaactgatgctctcaaccccttgtctgcttagggatgttgtaaagttcaccgatttttatgcttcagattgttaaaaataacttgatgttgatccaaatatgtagttcctagagttggaaaagtatgtaacactttttgtaaagagcgttacatagaacatattcagaagctatctgaaaaggtgtgtaatatgcgcttctggttgctgaatcaatttatggactctccacattagagagagagtgcatcacaactttcatgtgaatttggctaccattgcccgcttattcagatattagtccttaagtagatatta

SEQ ID NO: 36642 - DNA, 3331 bp, Zea Mays
ccgcaggcacccctttgcacagcagctccgaagccacaccacagttatttattactgttttttcgttgcctccaatccaatagagttgaccgaaccacgcgccgcccgctgacatggacgacgtagtaccagcgacagcgaagcagaccgtcgttctgtaccccggcggcggcgccgggcacgtcgcgccgatgacgcagctcgccaaggtcttcgtccgccacggctacgacgtcaccatggtgctcctggagccgcccatcaagtcgaacgcctccggcgccagcttcgtcgagagcttcgccgcctccaacccgtccatcaccttccacctcctcccgccgatccctccccccgacctcgccagctccaccaagcaccctttcctcgtcgtgctggagttgctgggccagtacaacgacaagctcgagagcttcctccgcaccatcccgcgcgagcgcctgcactcccttgtcatcgacatgttctgcaccgacgccatcgacgtggccgcgaaggtgggcgtccccgtctacacgttcttcgcggcgaacgccggagccctggccgtcttaacacagacggtggcgctgcttgacggccggcaaacgggcctcaaggagctcggggacacgcccatcgagttccttggcgtgccgccgatcccggcgtcgcacatcatcagggagatgctcgaggacgcggaggacgaggtgcgcacggcaatggcgaagatctggaagcgcgacacggacacccggggcgtcctcatcaataccttctactcgctggaggcccaggccctgcaggcgttcagtgacccgctgtgcgtccctggcaaagtgttgcctcctgtttaccccatcgggccgttggttggcaagggcgggagcgggacggacggaggagaggcggcggagaggccgcatgagtgcctcgcctggctcgacgcgcagccggagcgcagcgtcgtgttcctctgctgggggagcaggggcttgctgtcagaggagcagcttaaggagatagccgctggcctagagaagtccgggcaacggttcctgtgggtggtgcgcacgccggccagcagcgacgacccgaaacgattctggctgccacgcccggagccggaccttgacgcccttctgccggaggggttcttggagcggaccaaggaccgcggcctcgtcatcaagtcgtgggcgccgcaggtggacgtgctcagcaaccccgctgttggcgcgtttgtcacccactgcgggtggaactcgtcgcttgaggccatcacagcgggtgtgccgatgctgtgctggccacagggcgcagagcagaagatcaacaaggtacttatgaccgaggccatgggcatcgggctggagctggaggggtacaacacaggtttcatcaaggctgaggagatagagacgaaggtgaggcttgtgctggagtccgaggaggggagggagattaggacacgggcggcagaggtgaagaaagaagcacacgcggcgttggaggacgggggatcatcgaaggcagcatttctccaattcttgtcagatgtcaagaatattaattaggtcgggaagtgatcaatctttaaccgcccgatacaacgtaacacaaactattcaataaaatattagtatacatattgcttaggaaaaaaaatcccataaacaagtaataaagaaaacatgtgtgtagcaacaatatctatatctatactacttattaaggtagcaaggataatctgcctccccgccgttctgccttccaacgatctcaactgtccatccacgcctctgttttcgtcccgtcggatgctgccaacgcccgcgcgcatcccctggtcgtcagccccacccatccgtgcgagcgagcaacccattgcagccaccaccgccctacctactcacctcctcggcgcgaacagccgccgaacccttatcgctcgcccctcgcccgtgccagcaacccccgccaccgccgccgccctgcctctcgtccacccctccgccgcgagatgtcgccggcccctcaccatcctctatccacagcgcgcggggcgtagcccccctctagcgccgctcaagggtgaagggcccatccgcaccctgatgttggccacctccaccatgctctgatgcccatccttcgtcatgaccccctccagttccattactgacggacggtcctcttcataggcaaggtagagatggaggacagcaaaacactaacacccgagccatgccaccaccaatctattcctccaaacccttctgtacatgtgcgctacacatacatgaggctcctcctcctcgtcaaccccacatgatgaggcgtacttcagatgcagcgtgctcaagtgtaggagattgtcaatatcatcttgttgaatcgatgtgggggaggatgtctacttggtgaaacatccaaaaaagggactttgtcctttattttgaatcctttatcattctgttattagtacattggggatgcattatgattgtaataaaatatgttcacatttgttcttaaggtgagccacaagattcaggaatatcattgtagattgtttttgaattaggccacctatcctaatttttcgagtttgcatgggcctgcgatgcattacggaggcatttggaggtagcatttatctttataccaggtcagtagtttttaatggcctctgcttttgttactcaaacatttatgacatgaaaatgcaggaaaggttattcgtgcaccttctggaatgacgcatgagaaaatctctccagttcattatgatgaggaattaggaaattccttattcaatggcttgccaaaatgtcgtgcggtactacaagcagaacgccgatgaaacatggttcgacgtctcgctgaatagcctgcttcccggctcagtcctcaattgccagcgccaggtgtcaggatgtctcatccagaaaaagcctaatggctactcaaagatacgaaatggccaaggactgctgacgatgatgacgacatggccaccatcgccgccctctggacctcaacaaccatccataagagaaacgccaagaaagaagatacaactgtctatagaaacaataaacaatttttcttctcggactgctcaatctgtgcataatgtgcctgacgctacacaacaacgaggggaactacctgggaagcggccagaccaacctcgccaagtgcgctgcctgcgaggccaaagacgcgcccgcacaaccgttgcccaacaaggtcaagatcgcccccaagtctggtgcatgaaaaaacataatctctccactccccttttatctgcaaaactgat

SEQ ID NO: 36643 - DNA, 3007 bp, Zea Mays
ccgcaggcacccctttgcacagcagctccgaagccacaccacagttatttattactgttttttcgttgcctccaatccaatagagttgaccgaaccacgcgccgcccgctgacatggacgacgtagtaccagcgacagcgaagcagaccgtcgttctgtaccccggcggcggcgccgggcacgtcgcgccgatgacgcagctcgccaaggtcttcgtccgccacggctacgacgtcaccatggtgctcctggagccgcccatcaagtcgaacgcctccggcgccagcttcgtcgagagcttcgccgcctccaacccgtccatcaccttccacctcctcccgccgatccctccccccgacctcgccagctccaccaagcaccctttcctcgtcgtgctggagttgctgggccagtacaacgacaagctcgagagcttcctccgcaccatcccgcgcgagcgcctgcactcccttgtcatcgacatgttctgcaccgacgccatcgacgtggccgcgaaggtgggcgtccccgtctacacgttcttcgcggcgaacgccggagccctggccgtcttaacacagacggtggcgctgcttgacggccggcaaacgggcctcaaggagctcggggacacgcccatcgagttccttggcgtgccgccgatcccggcgtcgcacatcatcagggagatgctcgaggacgcggaggacgaggtgcgcacggcaatggcgaagatctggaagcgcgacacggacacccggggcgtcctcatcaataccttctactcgctggaggcccaggccctgcaggcgttcagtgacccgctgtgcgtccctggcaaagtgttgcctcctgtttaccccatcgggccgttggttggcaagggcgggagcgggacggacggaggagaggcggcggagaggccgcatgagtgcctcgcctggctcgacgcgcagccggagcgcagcgtcgtgttcctctgctgggggagcaggggcttgctgtcagaggagcagcttaaggagatagccgctggcctagagaagtccgggcaacggttcctgtgggtggtgcgcacgccggccagcagcgacgacccgaaacgattctggctgccacgcccggagccggaccttgacgcccttctgccggaggggttcttggagcggaccaaggaccgcggcctcgtcatcaagtcgtgggcgccgcaggtggacgtgctcagcaaccccgctgttggcgcgtttgtcacccactgcgggtggaactcgtcgcttgaggccatcacagcgggtgtgccgatgctgtgctggccacagggcgcagagcagaagatcaacaaggtacttatgaccgaggccatgggcatcgggctggagctggaggggtacaacacaggtttcatcaaggctgaggagatagagacgaaggtgaggcttgtgctggagtccgaggaggggagggagattaggacacgggcggcagaggtgaagaaagaagcacacgcggcgttggaggacgggggatcatcgaaggcagcatttctccaattcttgtcagatgtcaagaatattaattaggtcgggaagtgatcaatctttaaccgcccgatacaacgtaacacaaactattcaataaaatattagtatacatattgcttaggaaaaaaaatcccataaacaagtaataaagaaaacatgtgtgtagcaacaatatctatatctatactacttattaaggtagcaaggataatctgcctccccgccgttctgccttccaacgatctcaactgtccatccacgcctctgttttcgtcccgtcggatgctgccaacgcccgcgcgcatcccctggtcgtcagccccacccatccgtgcgagcgagcaacccattgcagccaccaccgccctacctactcacctcctcggcgcgaacagccgccgaacccttatcgctcgcccctcgcccgtgccagcaacccccgccaccgccgccgccctgcctctcgtccacccctccgccgcgagatgtcgccggcccctcaccatcctctatccacagcgcgcggggcgtagcccccctctagcgccgctcaagggtgaagggcccatccgcaccctgatgttggccacctccaccatgctctgatgcccatccttcgtcatgaccccctccagttccattactgacggacggtcctcttcataggcaagatgaggcgtacttcagatgcagcgtgctcaagtgtaggagattgtcaatatcatcttgttgaatcgatgtgggggaggatgtctacttggtgagccacaagattcaggaatatcattgtagattgtttttgaattaggccacctatcctaatttttcgagtttgcatgggcctgcgatgcattacggaggcatttggaggaaaggttattcgtgcaccttctggaatgacgcatgagaaaatctctccagttcattatgatgaggaattaggaaattccttattcaatggcttgccaaaatgtcgtgcggtactacaagcagaacgccgatgaaacatggttcgacgtctcgctgaatagcctgcttcccggctcagtcctcaattgccagcgccaggtgtcaggatgtctcatccagaaaaagcctaatggctactcaaagatacgaaatggccaaggactgctgacgatgatgacgacatggccaccatcgccgccctctggacctcaacaaccatccataagagaaacgccaagaaagaagatacaactgtctatagaaacaataaacaatttttcttctcggactgctcaatctgtgcataatgtgcctgacgctacacaacaacgaggggaactacctgggaagcggccagaccaacctcgccaagtgcgctgcctgcgaggccaaagacgcgcccgcacaaccgttgcccaacaaggtcaagatcgcccccaagtctggtgcatgaaaaaacataatctctccactccccttttatctgcaaaactgat

SEQ ID NO: 36644 - DNA, 336 bp, Zea Mays
ctcaacctccacgcctctgttctaaaggacctcaacaaccatccataagagaaacgccaagaaagaagatacaactgtctatagaaacaataaacaatttttcttctcggactgctcaatctgaagagctcgaaagaacacaaacaaatcactctctctagtcactatggtgttgtgtggaatttggagaggatttgatctctttggtgtgtctagagttgaatgctagagctcttgtagtagttgggaagtggaaaacttggatgcaatgaatggtggggtggttgggatatttatatccccaaccaccaaaagtggccgttgggaggttgtctg

SEQ ID NO: 36645 - DNA, 3149 bp, Zea Mays
ccgcaggcacccctttgcacagcagctccgaagccacaccacagttatttattactgttttttcgttgcctccaatccaatagagttgaccgaaccacgcgccgcccgctgacatggacgacgtagtaccagcgacagcgaagcagaccgtcgttctgtaccccggcggcggcgccgggcacgtcgcgccgatgacgcagctcgccaaggtcttcgtccgccacggctacgacgtcaccatggtgctcctggagccgcccatcaagtcgaacgcctccggcgccagcttcgtcgagagcttcgccgcctccaacccgtccatcaccttccacctcctcccgccgatccctccccccgacctcgccagctccaccaagcaccctttcctcgtcgtgctggagttgctgggccagtacaacgacaagctcgagagcttcctccgcaccatcccgcgcgagcgcctgcactcccttgtcatcgacatgttctgcaccgacgccatcgacgtggccgcgaaggtgggcgtccccgtctacacgttcttcgcggcgaacgccggagccctggccgtcttaacacagacggtggcgctgcttgacggccggcaaacgggcctcaaggagctcggggacacgcccatcgagttccttggcgtgccgccgatcccggcgtcgcacatcatcagggagatgctcgaggacgcggaggacgaggtgcgcacggcaatggcgaagatctggaagcgcgacacggacacccggggcgtcctcatcaataccttctactcgctggaggcccaggccctgcaggcgttcagtgacccgctgtgcgtccctggcaaagtgttgcctcctgtttaccccatcgggccgttggttggcaagggcgggagcgggacggacggaggagaggcggcggagaggccgcatgagtgcctcgcctggctcgacgcgcagccggagcgcagcgtcgtgttcctctgctgggggagcaggggcttgctgtcagaggagcagcttaaggagatagccgctggcctagagaagtccgggcaacggttcctgtgggtggtgcgcacgccggccagcagcgacgacccgaaacgattctggctgccacgcccggagccggaccttgacgcccttctgccggaggggttcttggagcggaccaaggaccgcggcctcgtcatcaagtcgtgggcgccgcaggtggacgtgctcagcaaccccgctgttggcgcgtttgtcacccactgcgggtggaactcgtcgcttgaggccatcacagcgggtgtgccgatgctgtgctggccacagggcgcagagcagaagatcaacaaggtacttatgaccgaggccatgggcatcgggctggagctggaggggtacaacacaggtttcatcaaggctgaggagatagagacgaaggtgaggcttgtgctggagtccgaggaggggagggagattaggacacgggcggcagaggtgaagaaagaagcacacgcggcgttggaggacgggggatcatcgaaggcagcatttctccaattcttgtcagatgtcaagaatattaattaggtcgggaagtgatcaatctttaaccgcccgatacaacgtaacacaaactattcaataaaatattagtatacatattgcttaggaaaaaaaatcccataaacaagtaataaagaaaacatgtgtgtagcaacaatatctatatctatactacttattaaggtagcaaggataatctgcctccccgccgttctgccttccaacgatctcaactgtccatccacgcctctgttttcgtcccgtcggatgctgccaacgcccgcgcgcatcccctggtcgtcagccccacccatccgtgcgagcgagcaacccattgcagccaccaccgccctacctactcacctcctcggcgcgaacagccgccgaacccttatcgctcgcccctcgcccgtgccagcaacccccgccaccgccgccgccctgcctctcgtccacccctccgccgcgagatgtcgccggcccctcaccatcctctatccacagcgcgcggggcgtagcccccctctagcgccgctcaagggtgaagggcccatccgcaccctgatgttggccacctccaccatgctctgatgcccatccttcgtcatgaccccctccagttccattactgacggacggtcctcttcataggcaaggtagagatggaggacagcaaaacactaacacccgagccatgccaccaccaatctattcctccaaacccttctgtacatgtgcgctacacatacatgaggctcctcctcctcgtcaaccccacatgatgaggcgtacttcagatgcagcgtgctcaagtgtaggagattgtcaatatcatcttgttgaatcgatgtgggggaggatgtctacttggtgagccacaagattcaggaatatcattgtagattgtttttgaattaggccacctatcctaatttttcgagtttgcatgggcctgcgatgcattacggaggcatttggaggaaaggttattcgtgcaccttctggaatgacgcatgagaaaatctctccagttcattatgatgaggaattaggaaattccttattcaatggcttgccaaaatgtcgtgcggtactacaagcagaacgccgatgaaacatggttcgacgtctcgctgaatagcctgcttcccggctcagtcctcaattgccagcgccaggtgtcaggatgtctcatccagaaaaagcctaatggctactcaaagatacgaaatggccaaggactgctgacgatgatgacgacatggccaccatcgccgccctctggacctcaacaaccatccataagagaaacgccaagaaagaagatacaactgtctatagaaacaataaacaatttttcttctcggactgctcaatctgaagagctcgaaagaacacaaacaaatcactctctctagtcactatggtgttgtgtggaatttggagaggatttgatctctttggtgtgtctagagttgaatgctagagctcttgtagtagttgggaagtggaaaacttggatgcaatgaatggtggggtggttgggatatttatatccccaaccaccaaaagtggccgttgggaggttgtctg

SEQ ID NO: 36646 - DNA, 2591 bp, Zea Mays
ccgcaggcacccctttgcacagcagctccgaagccacaccacagttatttattactgttttttcgttgcctccaatccaatagagttgaccgaaccacgcgccgcccgctgacatggacgacgtagtaccagcgacagcgaagcagaccgtcgttctgtaccccggcggcggcgccgggcacgtcgcgccgatgacgcagctcgccaaggtcttcgtccgccacggctacgacgtcaccatggtgctcctggagccgcccatcaagtcgaacgcctccggcgccagcttcgtcgagagcttcgccgcctccaacccgtccatcaccttccacctcctcccgccgatccctccccccgacctcgccagctccaccaagcaccctttcctcgtcgtgctggagttgctgggccagtacaacgacaagctcgagagcttcctccgcaccatcccgcgcgagcgcctgcactcccttgtcatcgacatgttctgcaccgacgccatcgacgtggccgcgaaggtgggcgtccccgtctacacgttcttcgcggcgaacgccggagccctggccgtcttaacacagacggtggcgctgcttgacggccggcaaacgggcctcaaggagctcggggacacgcccatcgagttccttggcgtgccgccgatcccggcgtcgcacatcatcagggagatgctcgaggacgcggaggacgaggtgcgcacggcaatggcgaagatctggaagcgcgacacggacacccggggcgtcctcatcaataccttctactcgctggaggcccaggccctgcaggcgttcagtgacccgctgtgcgtccctggcaaagtgttgcctcctgtttaccccatcgggccgttggttggcaagggcgggagcgggacggacggaggagaggcggcggagaggccgcatgagtgcctcgcctggctcgacgcgcagccggagcgcagcgtcgtgttcctctgctgggggagcaggggcttgctgtcagaggagcagcttaaggagatagccgctggcctagagaagtccgggcaacggttcctgtgggtggtgcgcacgccggccagcagcgacgacccgaaacgattctggctgccacgcccggagccggaccttgacgcccttctgccggaggggttcttggagcggaccaaggaccgcggcctcgtcatcaagtcgtgggcgccgcaggtggacgtgctcagcaaccccgctgttggcgcgtttgtcacccactgcgggtggaactcgtcgcttgaggccatcacagcgggtgtgccgatgctgtgctggccacagggcgcagagcagaagatcaacaaggtacttatgaccgaggccatgggcatcgggctggagctggaggggtacaacacaggtttcatcaaggctgaggagatagagacgaaggtgaggcttgtgctggagtccgaggaggggagggagattaggacacgggcggcagaggtgaagaaagaagcacacgcggcgttggaggacgggggatcatcgaaggcagcatttctccaattcttgtcagatgtcaagaatattaattagatgaggcgtacttcagatgcagcgtgctcaagtgtaggagattgtcaatatcatcttgttgaatcgatgtgggggaggatgtctacttggtgaaacatccaaaaaagggactttgtcctttattttgaatcctttatcattctgttattagtacattggggatgcattatgattgtaataaaatatgttcacatttgttcttaaggtgagccacaagattcaggaatatcattgtagattgtttttgaattaggccacctatcctaatttttcgagtttgcatgggcctgcgatgcattacggaggcatttggaggtagcatttatctttataccaggtcagtagtttttaatggcctctgcttttgttactcaaacatttatgacatgaaaatgcaggaaaggttattcgtgcaccttctggaatgacgcatgagaaaatctctccagttcattatgatgaggaattaggaaattccttattcaatggcttgccaaaatgtcgtgcggtactacaagcagaacgccgatgaaacatggttcgacgtctcgctgaatagcctgcttcccggctcagtcctcaattgccagcgccaggtgtcaggatgtctcatccagaaaaagcctaatggctactcaaagatacgaaatggccaaggactgctgacgatgatgacgacatggccaccatcgccgccctctggacctcaacaaccatccataagagaaacgccaagaaagaagatacaactgtctatagaaacaataaacaatttttcttctcggactgctcaatctgaagagctcgaaagaacacaaacaaatcactctctctagtcactatggtgttgtgtggaatttggagaggatttgatctctttggtgtgtctagagttgaatgctagagctcttgtagtagttgggaagtggaaaacttggatgcaatgaatggtggggtggttgggatatttatatccccaaccaccaaaagtggccgttgggaggttgtctg

SEQ ID NO: 36647 - DNA, 1956 bp, Zea Mays
ccgcaggcacccctttgcacagcagctccgaagccacaccacagttatttattactgttttttcgttgcctccaatccaatagagttgaccgaaccacgcgccgcccgctgacatggacgacgtagtaccagcgacagcgaagcagaccgtcgttctgtaccccggcggcggcgccgggcacgtcgcgccgatgacgcagctcgccaaggtcttcgtccgccacggctacgacgtcaccatggtgctcctggagccgcccatcaagtcgaacgcctccggcgccagcttcgtcgagagcttcgccgcctccaacccgtccatcaccttccacctcctcccgccgatccctccccccgacctcgccagctccaccaagcaccctttcctcgtcgtgctggagttgctgggccagtacaacgacaagctcgagagcttcctccgcaccatcccgcgcgagcgcctgcactcccttgtcatcgacatgttctgcaccgacgccatcgacgtggccgcgaaggtgggcgtccccgtctacacgttcttcgcggcgaacgccggagccctggccgtcttaacacagacggtggcgctgcttgacggccggcaaacgggcctcaaggagctcggggacacgcccatcgagttccttggcgtgccgccgatcccggcgtcgcacatcatcagggagatgctcgaggacgcggaggacgaggtgcgcacggcaatggcgaagatctggaagcgcgacacggacacccggggcgtcctcatcaataccttctactcgctggaggcccaggccctgcaggcgttcagtgacccgctgtgcgtccctggcaaagtgttgcctcctgtttaccccatcgggccgttggttggcaagggcgggagcgggacggacggaggagaggcggcggagaggccgcatgagtgcctcgcctggctcgacgcgcagccggagcgcagcgtcgtgttcctctgctgggggagcaggggcttgctgtcagaggagcagcttaaggagatagccgctggcctagagaagtccgggcaacggttcctgtgggtggtgcgcacgccggccagcagcgacgacccgaaacgattctggctgccacgcccggagccggaccttgacgcccttctgccggaggggttcttggagcggaccaaggaccgcggcctcgtcatcaagtcgtgggcgccgcaggtggacgtgctcagcaaccccgctgttggcgcgtttgtcacccactgcgggtggaactcgtcgcttgaggccatcacagcgggtgtgccgatgctgtgctggccacagggcgcagagcagaagatcaacaaggaaaggttattcgtgcaccttctggaatgacgcatgagaaaatctctccagttcattatgatgaggaattaggaaattccttattcaatggcttgccaaaatgtcgtgcggtactacaagcagaacgccgatgaaacatggttcgacgtctcgctgaatagcctgcttcccggctcagtcctcaattgccagcgccaggtgtcaggatgtctcatccagaaaaagcctaatggctactcaaagatacgaaatggccaaggactgctgacgatgatgacgacatggccaccatcgccgccctctggacctcaacaaccatccataagagaaacgccaagaaagaagatacaactgtctatagaaacaataaacaatttttcttctcggactgctcaatctgaagagctcgaaagaacacaaacaaatcactctctctagtcactatggtgttgtgtggaatttggagaggatttgatctctttggtgtgtctagagttgaatgctagagctcttgtagtagttgggaagtggaaaacttggatgcaatgaatggtggggtggttgggatatttatatccccaaccaccaaaagtggccgttgggaggttgtctg

SEQ ID NO: 36648 - DNA, 3024 bp, Zea Mays
ccgcaggcacccctttgcacagcagctccgaagccacaccacagttatttattactgttttttcgttgcctccaatccaatagagttgaccgaaccacgcgccgcccgctgacatggacgacgtagtaccagcgacagcgaagcagaccgtcgttctgtaccccggcggcggcgccgggcacgtcgcgccgatgacgcagctcgccaaggtcttcgtccgccacggctacgacgtcaccatggtgctcctggagccgcccatcaagtcgaacgcctccggcgccagcttcgtcgagagcttcgccgcctccaacccgtccatcaccttccacctcctcccgccgatccctccccccgacctcgccagctccaccaagcaccctttcctcgtcgtgctggagttgctgggccagtacaacgacaagctcgagagcttcctccgcaccatcccgcgcgagcgcctgcactcccttgtcatcgacatgttctgcaccgacgccatcgacgtggccgcgaaggtgggcgtccccgtctacacgttcttcgcggcgaacgccggagccctggccgtcttaacacagacggtggcgctgcttgacggccggcaaacgggcctcaaggagctcggggacacgcccatcgagttccttggcgtgccgccgatcccggcgtcgcacatcatcagggagatgctcgaggacgcggaggacgaggtgcgcacggcaatggcgaagatctggaagcgcgacacggacacccggggcgtcctcatcaataccttctactcgctggaggcccaggccctgcaggcgttcagtgacccgctgtgcgtccctggcaaagtgttgcctcctgtttaccccatcgggccgttggttggcaagggcgggagcgggacggacggaggagaggcggcggagaggccgcatgagtgcctcgcctggctcgacgcgcagccggagcgcagcgtcgtgttcctctgctgggggagcaggggcttgctgtcagaggagcagcttaaggagatagccgctggcctagagaagtccgggcaacggttcctgtgggtggtgcgcacgccggccagcagcgacgacccgaaacgattctggctgccacgcccggagccggaccttgacgcccttctgccggaggggttcttggagcggaccaaggaccgcggcctcgtcatcaagtcgtgggcgccgcaggtggacgtgctcagcaaccccgctgttggcgcgtttgtcacccactgcgggtggaactcgtcgcttgaggccatcacagcgggtgtgccgatgctgtgctggccacagggcgcagagcagaagatcaacaaggtacttatgaccgaggccatgggcatcgggctggagctggaggggtacaacacaggtttcatcaaggctgaggagatagagacgaaggtgaggcttgtgctggagtccgaggaggggagggagattaggacacgggcggcagaggtgaagaaagaagcacacgcggcgttggaggacgggggatcatcgaaggcagcatttctccaattcttgtcagatgtcaagaatattaattaggtcgggaagtgatcaatctttaaccgcccgatacaacgtaacacaaactattcaataaaatattagtatacatattgcttaggaaaaaaaatcccataaacaagtaataaagaaaacatgtgtgtagcaacaatatctatatctatactacttattaaggtagcaaggataatctgcctccccgccgttctgccttccaacgatctcaactgtccatccacgcctctgttttcgtcccgtcggatgctgccaacgcccgcgcgcatcccctggtcgtcagccccacccatccgtgcgagcgagcaacccattgcagccaccaccgccctacctactcacctcctcggcgcgaacagccgccgaacccttatcgctcgcccctcgcccgtgccagcaacccccgccaccgccgccgccctgcctctcgtccacccctccgccgcgagatgtcgccggcccctcaccatcctctatccacagcgcgcggggcgtagcccccctctagcgccgctcaagggtgaagggcccatccgcaccctgatgttggccacctccaccatgctctgatgcccatccttcgtcatgaccccctccagttccattactgacggacggtcctcttcataggcaagatgaggcgtacttcagatgcagcgtgctcaagtgtaggagattgtcaatatcatcttgttgaatcgatgtgggggaggatgtctacttggtgagccacaagattcaggaatatcattgtagattgtttttgaattaggccacctatcctaatttttcgagtttgcatgggcctgcgatgcattacggaggcatttggaggaaaggttattcgtgcaccttctggaatgacgcatgagaaaatctctccagttcattatgatgaggaattaggaaattccttattcaatggcttgccaaaatgtcgtgcggtactacaagcagaacgccgatgaaacatggttcgacgtctcgctgaatagcctgcttcccggctcagtcctcaattgccagcgccaggtgtcaggatgtctcatccagaaaaagcctaatggctactcaaagatacgaaatggccaaggactgctgacgatgatgacgacatggccaccatcgccgccctctggacctcaacaaccatccataagagaaacgccaagaaagaagatacaactgtctatagaaacaataaacaatttttcttctcggactgctcaatctgaagagctcgaaagaacacaaacaaatcactctctctagtcactatggtgttgtgtggaatttggagaggatttgatctctttggtgtgtctagagttgaatgctagagctcttgtagtagttgggaagtggaaaacttggatgcaatgaatggtggggtggttgggatatttatatccccaaccaccaaaagtggccgttgggaggttgtctg

SEQ ID NO: 36649 - DNA, 3721 bp, Zea Mays
ctagttctttggatacccattcaattcaacggtagattaaatacagggttactaataaaatggtacatactggtggaaaattgattgcacatatgcatgtagagtctgcttacatattagtagatgacaatgtggataattaaatagagttgtgcatttgcgtggcccggcccaccgtactcgccttctcatcctcatatattgctgtctcgttgcgcttcctctttcatcggctcgagctcccgctcggacgcgtcgcgggcgcctttccccagagattccaaggccacccacaaaatcgatccatccagtcgtcgagcgcgtctcctcttcgagcattggactgttccgggagccgcgctggaaagcggcttctgattgggtcggcgatgaggggcgccgccgccccgggccaccagcgatggagcggctcggcggggacgacgccgcggtcactcagcacgggctcctcgccgcggggctccgaacgcagctccgacgacggggaggagctggtcgaggtcacgctcgacctgcaggaggacgacaccatcattctgcggagcgtcgagccggccgcggcggggggcgccaccgcgctgccgctgggcgcgcgcggggaccatgccggcggcgcgtcgtcgtcgtcgcggtccttgtcgccgtcgatcaggcggacctcgtcgcaccggctcctgcagttctcgcaggagctcaaggcggaggccatgtccatcgcgcgccagttctcgcaggacctcaccaagcgcttcggccgcacccaaagccgcgcggaagggcaggggcagcagcagcagccgtcgtcaggcatcgagtcggccctcgctgcccgcgccgcgcggcggcagcgcgcgcagctcgaccgcacgcgctccggcgcgcacaaggcgctccgcggcctccgcttcatcagcagcaacaaggccaacaacgcctggatggaggtgcaggccaacttcgaccgcctcgcttccgagggtttcctctcccgctccgacttcgcggaatgcattgggatgacggaatcgaaagagttcgcgctcgagctgtttgacacattgagccgccgccgtcaggtgcaggttgacaaaatcaacaaggaggagctgcgcgagatctggcagcagatcacggacaacagcttcgattcccgcctccagatcttcttcgacatggtggataagaacgcggacggccggattggggaggaggaggtgaaagagattatcatgttaagtgcatctgccaataagctgtccaggcttaaggagcaagccgaagagtatgccgccctgattatggaggagcttgatcctgaaggacttggctacattgagttgtggcagttggagacccttctgttgcagaaggatacctacatgaactacagtcaggcgctaagttacacaagccaagcactaagtcagaacctagcaggcttaaggaaaaagagtccaattcgcaagataagtaccacattgagttactatttggaggataattggaaacgcctatgggtgcttgcattatggattggaataatggctggactgttcacttggaagttcatgcagtatcgcaacaggtatgtctttaatgtgatgggctactgtgtgaccactgcaaaaggcgctgctgaaaccctgaagctgaacatggcaattatcctcctcccagtatgccgtaacaccattacttggttgagaaatacaagggctgcacgggcattgccatttgatgataatattaacttccacaagactattgcagcagcaatcgttgttggtataatcctccatgcagggaaccatcttgtgtgtgattttccacggcttataaattcatcaaatgagaaatatgctcctctgggccagtacttcggtgaaacaaagccaacatactttacattggtcaaaggagtggaaggcatcactggtgtaattatggttatctgtatgattattgctttcactttagctacacggtggttccgtcgtagcctggtgaagcttccaaaaccatttgacaaactgactggcttcaatgccttctggtactctcatcatttattcataattgtgtatttggctctcattgttcatggccagttcctttacctcattcatgtctggtaccgaaaaacgacatggatgtatctggcagtgcctgtttgcctgtatgtaggggagagggtgctgaggttcttcaggtctggcagttattctgtcaggctattgaaggtggccatatatcctggtaatgtgttgacactgcaaatgtccaagcctccggctttccgatacaagagtgggcaatatatgtttgttcaatgtccagcagtgtcaccctttgaatggcatccgttctcaattacttcagcgcctggggatgattatctaagcattcatgttcgacaacttggtgactggacacgagagctcaagagggtttttgcagcagcttgtgaacccccagtgggcggtaaaagtggccttcttagagcagacgagacaaccaagaaagccttaccaaaacttctgattgatggaccttatggttctcctgctcaggattacagcaagtatgatgttcttctacttgttggattagggattggtgcaactccttttatcagcatactgaaagatcttcttaacaatattataaggatggaggaagaggaggatgcttccactgatctttatcctccagttggtccgaacaagccgcacattgatctcagcacacttatgacggtcacatcaagaccaaagagggttctaaggaccacaaacgcttacttctattgggttacacgtgagcaaggttcttttgattggttcaagggagtcatgaatgaaattgctgaactggaccaaaggaatattattgagatgcacaactaccttacgagtgtttatgaggaaggagatgctcggtcagcgctcatcaccatgcttcaagctttgaaccatgcaaagaatggcgttgacattgtctctggaactaaagtccggacacactttgcaagaccaaattggaaaaaagtcctatctaaaattgcctcgaagcatccatttgctaagatagcatttttgtcttggtatgttcatctggagttctggacgaacatgagagcaaagtggagaagctaccatcaaatgcttaacagctgacggcctgcactctttgttaactgctcctaaatgaaccagaccaccaagaagtgggatttttgtgtacatatacatgtgatgtccaaacgtccatctgcagattggacccctcaactgtgaagagattcctcccaggtggtcaccaatgtacagagcacacatgaagataaagagtagttgggattgtcggtagcatgctattcgtataggacaggagggataccactagtcacaacacacaaggctatttaattgtatattttcatgcagctgatgccctgcactttctgctgctggccaatgcggcaaggacagaagcattttttctcatttgtaccgcatacagaaaaggcataacaaaaaagaggtgaaagggagaatagcattttagcacacttatgggtccctcgatttatttgaccctgcggtgctacgagcctacgaggaggagatgaagtagaataaaattgtcatttcattaaataaagcaaatgtttagaatattttaatatacttgtatgggc

SEQ ID NO: 36650 - DNA, 3789 bp, Zea Mays
ctagttctttggatacccattcaattcaacggtagattaaatacagggttactaataaaatggtacatactggtggaaaattgattgcacatatgcatgtagagtctgcttacatattagtagatgacaatgtggataattaaatagagttgtgcatttgcgtggcccggcccaccgtactcgccttctcatcctcatatattgctgtctcgttgcgcttcctctttcatcggctcgagctcccgctcggacgcgtcgcgggcgcctttccccagagattccaaggccacccacaaaatcgatccatccagtcgtcgagcgcgtctcctcttcgagcattggactgttccgggagccgcgctggaaagcggcttctgattgggtcggcgatgaggggcgccgccgccccgggccaccagcgatggagcggctcggcggggacgacgccgcggtcactcagcacgggctcctcgccgcggggctccgaacgcagctccgacgacggggaggagctggtcgaggtcacgctcgacctgcaggaggacgacaccatcattctgcggagcgtcgagccggccgcggcggggggcgccaccgcgctgccgctgggcgcgcgcggggaccatgccggcggcgcgtcgtcgtcgtcgcggtccttgtcgccgtcgatcaggcggacctcgtcgcaccggctcctgcagttctcgcaggagctcaaggcggaggccatgtccatcgcgcgccagttctcgcaggacctcaccaagcgcttcggccgcacccaaagccgcgcggaagggcaggggcagcagcagcagccgtcgtcaggcatcgagtcggccctcgctgcccgcgccgcgcggcggcagcgcgcgcagctcgaccgcacgcgctccggcgcgcacaaggcgctccgcggcctccgcttcatcagcagcaacaaggccaacaacgcctggatggaggtgcaggccaacttcgaccgcctcgcttccgagggtttcctctcccgctccgacttcgcggaatgcattgggatgacggaatcgaaagagttcgcgctcgagctgtttgacacattgagccgccgccgtcaggtgcaggttgacaaaatcaacaaggaggagctgcgcgagatctggcagcagatcacggacaacagcttcgattcccgcctccagatcttcttcgacatggtggataagaacgcggacggccggattggggaggaggaggtgaaagagattatcatgttaagtgcatctgccaataagctgtccaggcttaaggagcaagccgaagagtatgccgccctgattatggaggagcttgatcctgaaggacttggctacattgagttgtggcagttggagacccttctgttgcagaaggatacctacatgaactacagtcaggcgctaagttacacaagccaagcactaagtcagaacctagcaggcttaaggaaaaagagtccaattcgcaagataagtaccacattgagttactatttggaggataattggaaacgcctatgggtgcttgcattatggattggaataatggctggactgttcacttggaagttcatgcagtatcgcaacagtatgccgtaacaccattacttggttgagaaatacaagggctgcacgggcattgccatttgatgataatattaacttccacaagactattgcagcagcaatcgttgttggtataatcctccatgcagggaaccatcttgtgtgtgattttccacggcttataaattcatcaaatgagaaatatgctcctctgggccagtacttcggtgaaacaaagccaacatactttacattggtcaaaggagtggaaggcatcactggtgtaattatggttatctgtatgattattgctttcactttagctacacggtggttccgtcgtagcctggtgaagcttccaaaaccatttgacaaactgactggcttcaatgccttctggtactctcatcatttattcataattgtgtatttggctctcattgttcatggccagttcctttacctcattcatgtctggtaccgaaaaacgacatggatgtatctggcagtgcctgtttgcctgtatgtaggggagagggtgctgaggttcttcaggtctggcagttattctgtcaggctattgaaggtggccatatatcctggtaatgtgttgacactgcaaatgtccaagcctccggctttccgatacaagagtgggcaatatatgtttgttcaatgtccagcagtgtcaccctttgaatggcatccgttctcaattacttcagcgcctggggatgattatctaagcattcatgttcgacaacttggtgactggacacgagagctcaagagggtttttgcagcagcttgtgaacccccagtgggcggtaaaagtggccttcttagagcagacgagacaaccaagaaagccttaccaaaacttctgattgatggaccttatggttctcctgctcaggattacagcaagtatgatgttcttctacttgttggattagggattggtgcaactccttttatcagcatactgaaagatcttcttaacaatattataaggatggaggaagaggaggatgcttccactgatctttatcctccagttggtccgaacaagccgcacattgatctcagcacacttatgacggtcacatcaagaccaaagagggttctaaggaccacaaacgcttacttctattgggttacacgtgagcaaggttcttttgattggttcaagggagtcatgaatgaaattgctgaactggaccaaaggaatattattgagatgcacaactaccttacgagtgtttatgaggaaggagatgctcggtcagcgctcatcaccatgcttcaagctttgaaccatgcaaagaatggcgttgacattgtctctggaactaaagtccggacacactttgcaagaccaaattggaaaaaagtcctatctaaaattgcctcgaagcatccatttgctaagataggtgtattctactgtggagctccagttcttgcacaagaactaaacaaactgtgccatgaattcaatgggaaaagcacaacgaaatttgagttccacaaggaacatttctgaattccagtaatacttggtgcgcagaaatgatatattatgtgtgtgtacagcatttttgtcttggtatgttcatctggagttctggacgaacatgagagcaaagtggagaagctaccatcaaatgcttaacagctgacggcctgcactctttgttaactgctcctaaatgaaccagaccaccaagaagtgggatttttgtgtacatatacatgtgatgtccaaacgtccatctgcagattggacccctcaactgtgaagagattcctcccaggtggtcaccaatgtacagagcacacatgaagataaagagtagttgggattgtcggtagcatgctattcgtataggacaggagggataccactagtcacaacacacaaggctatttaattgtatattttcatgcagctgatgccctgcactttctgctgctggccaatgcggcaaggacagaagcattttttctcatttgtaccgcatacagaaaaggcataacaaaaaagaggtgaaagggagaatagcattttagcacacttatgggtccctcgatttatttgaccctgcggtgctacgagcctacgaggaggagatgaagtagaataaaattgtcatttcattaaataaagcaaatgtttagaatattttaatatacttgtatgggc

SEQ ID NO: 36651 - DNA, 3157 bp, Zea Mays
gaaaaaacaccttttggtgcaaaggttgttgttttaggaggtgatgctagacaaatactcccagttattgaaggtggtacacggtcgcagattatagatgctgcaataactagctctcctctatggaattctattattgtcttatacttgactgaaaatatgagattaaactcatcccatttggatcctacaagtaagaatgagattgcttcctttagcaaatggttgttggacataggtgacggcaaagtacccgcaagagcaagagacagtgaaaccgaaagatattggataaaaattccgcatgacattttactaacatctcaaaataatagtcttcaatgcattgttgactccgcgtatccagatataagagataggtatgcagagatacaatacttaaaagaacatgcaatactttctccaacaaatgaaattattgacacggtcaacgactttgttgtcactctaatacatggtgatccaaaggaatatcttagctgtgatagcatagtaaaaggaccagacaacaatgattcatatgacttattatatcctgttgaattcctcaattaagttactggcaacaatttcccgcaacatcaattaatactgaaaaaaggagtaccaattatgcttttgcgtaacattaaccaatctgaaggtctttgcaatcgaacgaggttaattattgttactctaggagatctgattattgaagccaagatcatgaccggaaaatataaagacaaaattgtgctgattccacgtgtatgtttaactttaaaaacaccaaggctaccattcactctagaaagaagacaatatcccattaaagtttgttacgccatgacaaataacaggagccaaggacaaactctgtccaatgttactgtgttcttgaaaaaacctattttcacacatggacaactatatgttgctttctctagagttacttcaaaaaaggactcagagtgctgattgaagatgatgatggaaaatcaatagatgaaacgaagaatattgtttaccaggaaatctttactcgatttccttcacattaaggaagttctataattgccgcccatgtatagaataatgtctatataagtgagttttatattccattttatatccaagacaagcctattatgtataatatatgcatctactgaagatggtttctatggcttacaacattcctacttcctttattacaggtacatttcattactctctcccccccttttccctccaattacatacaattttacactcttttaactcacttgaaaaaaatagtaaacctatctacatatacaaaattccatttgttttcatcgttttgtataatactatatattaactcatacatatatctcataaataaatttattataggatacttataaacaaaatgctaactacattttttatctgttccatgttacacagaatgcctaataaaccactttcagcattgactctacaagatcgagacatagaaattcaaatagaggtccacaggaaatgggaatttcgaggtgctattgacaatggacccatattacacatagacatgatcctgacggattgcataggcaatgctatccattgtcaaataccatcattcccagcagctaaaagaggtgatgaatttcaagtgggaaaaatatacaagatgtcccgctttccagtagctcgtgcaaaatcttcctacaaacctgttgatggtgatctcatgtttctaacaagttacgacaagattgatccaaatgaaccaaatgcaaggaacttccatgatgtcattagcattattacagaaatctctgcgattaaacctgtgggaaatgcacgcataccctcatcttacaatcgacatgttctaataaaaaacctcagtgatagcattctgaaaattactctatgggggaaacgtgcacaagaattttatttgaccaacacttatgacccacagaaacaaactcttgtcattgtcttatttgttggttgtttaccaaaagaattccaaggattgaatctgagaagataaacatagaattacccagccttgacggacaagaaattacacctccacaacttccacaacgagaacatcatgaccttaaatacatattacctctaaacccacatgatgtaccggatgaaggatatgaatgcacagtaaccattacaagtattcctgaaggcaagacttggtattatattgcttgcaatacttgcccaaacaaaccaagcattgatcctatcatccgtcaatgctccacatgtggatcaacaaaatactgcttcaggtacaagctcactttcaaggcatcagatggaactgcagaagctgaaatgtttgctttcgacactgttgcaaggacaattattgggaaaccatgtccaatggttgttgcatcattttccagatgcatcagctatcccacctgaaattacagcaatcgtttcacggaaatacacattcattgtagtgttcaacaaccaatcatacagatttctagaaaaagcattgctcataaaaggaattgtagcatcatatggaagaatgacatcactaccaagagttcaagaaaaacttgatgtgcaccttcctcccaatccagccaaaaacaaactgataacaacagctgctcaatctccctctacagtcatgtctagactttccacggcggactcaccaagtgtgagtcgaaagctaacctattctccagcaaaggataaacctgagacaaaccctcttgatgctgataaaaatagagctcctgcaacaacacttgaatcacctacaaaaaggatcaaacaagaccctaagaatcaacaagagtagacgttgtgtgcaacacagtaaggaatacttctgaacatcacgcccaaacttcaacaaacgaagcatattcctcactattttgtctataaatattatgtgtgccttcttctatgaagcaaaccttaccctcgatatgctatatataatatctatgtattgtcatgtaatataaccatctataaactcatcagttgctacaatatattctaagcaaaccttaccctcgatatgctatatataatatctatgtattgccatgtaatataaccatctataaactcatcagttgctacaacatattct

SEQ ID NO: 36652 - DNA, 3129 bp, Zea Mays
gaaaaaacaccttttggtgcaaaggttgttgttttaggaggtgatgctagacaaatactcccagttattgaaggtggtacacggtcgcagattatagatgctgcaataactagctctcctctatggaattctattattgtcttatacttgactgaaaatatgagattaaactcatcccatttggatcctacaagtaagaatgagattgcttcctttagcaaatggttgttggacataggtgacggcaaagtacccgcaagagcaagagacagtgaaaccgaaagatattggataaaaattccgcatgacattttactaacatctcaaaataatagtcttcaatgcattgttgactccgcgtatccagatataagagataggtatgcagagatacaatacttaaaagaacatgcaatactttctccaacaaatgaaattattgacacggtcaacgactttgttgtcactctaatacatggtgatccaaaggaatatcttagctgtgatagcatagtaaaaggaccagacaacaatgattcatatgacttattatatcctgttgaattcctcaattaagttactggcaacaatttcccgcaacatcaattaatactgaaaaaaggagtaccaattatgcttttgcgtaacattaaccaatctgaaggtctttgcaatcgaacgaggttaattattgttactctaggagatctgattattgaagccaagatcatgaccggaaaatataaagacaaaattgtgctgattccacgtgtatgtttaactttaaaaacaccaaggctaccattcactctagaaagaagacaatatcccattaaagtttgttacgccatgacaaataacaggagccaaggacaaactctgtccaatgttactgtgttcttgaaaaaacctattttcacacatggacaactatatgttgctttctctagagttacttcaaaaaaggactcagagtgctgattgaagatgatgatggaaaatcaatagatgaaacgaagaatattgtttaccaggaaatctttactcgatttccttcacattaaggaagttctataattgccgcccatgtatagaataatgtctatataagtgagttttatattccattttatatccaagacaagcctattatgtataatatatgcatctactgaagatggtttctatggcttacaacattcctacttcctttattacaggtacatttcattactctctcccccccttttccctccaattacatacaattttacactcttttaactcacttgaaaaaaatagtaaacctatctacatatacaaaattccatttgttttcatcgttttgtataatactatatattaactcatacatatatctcataaataaatttattataggatacttataaacaaaatgctaactacattttttatctgttccatgttacacagaatgcctaataaaccactttcagcattgactctacaagatcgagacatagaaattcaaatagaggtccacaggaaatgggaatttcgaggtgctattgacaatggacccatattacacatagacatgatcctgacggattgcataggcaatgctatccattgtcaaataccatcattcccagcagctaaaagaggtgatgaatttcaagtgggaaaaatatacaagatgtcccgctttccagtagctcgtgcaaaatcttcctacaaacctgttgatggtgatctcatgttgtatgtgacaccatacacaacccttgaactttgtcataattcaccctcaagttttcctctctatgtttatagtctaacaagttacgacaagattgatccaaatgaaccaaatgcaaggaacttccatggtatagcattctgaaaattactctatgggggaaacgtgcacaagaattttatttgaccaacacttatgacccacagaaacaaactcttgtcattgtcttatttgttggttgtttaccaaaagaattccaaggattgaatctgagaagataaacatagaattacccagccttgacggacaagaaattacacctccacaacttccacaacgagaacatcatgaccttaaatacatattacctctaaacccacatgatgtaccggatgaaggatatgaatgcacagtaaccattacaagtattcctgaaggcaagacttggtattatattgcttgcaatacttgcccaaacaaaccaagcattgatcctatcatccgtcaatgctccacatgtggatcaacaaaatactgcttcaggtacaagctcactttcaaggcatcagatggaactgcagaagctgaaatgtttgctttcgacactgttgcaaggacaattattgggaaaccatgtccaatggttgttgcatcattttccagatgcatcagctatcccacctgaaattacagcaatcgtttcacggaaatacacattcattgtagtgttcaacaaccaatcatacagatttctagaaaaagcattgctcataaaaggaattgtagcatcatatggaagaatgacatcactaccaagagttcaagaaaaacttgatgtgcaccttcctcccaatccagccaaaaacaaactgataacaacagctgctcaatctccctctacagtcatgtctagactttccacggcggactcaccaagtgtgagtcgaaagctaacctattctccagcaaaggataaacctgagacaaaccctcttgatgctgataaaaatagagctcctgcaacaacacttgaatcacctacaaaaaggatcaaacaagaccctaagaatcaacaagagtagacgttgtgtgcaacacagtaaggaatacttctgaacatcacgcccaaacttcaacaaacgaagcatattcctcactattttgtctataaatattatgtgtgccttcttctatgaagcaaaccttaccctcgatatgctatatataatatctatgtattgtcatgtaatataaccatctataaactcatcagttgctacaatatattctaagcaaaccttaccctcgatatgctatatataatatctatgtattgccatgtaatataaccatctataaactcatcagttgctacaacatattct

SEQ ID NO: 36653 - DNA, 2981 bp, Zea Mays
gaaaaaacaccttttggtgcaaaggttgttgttttaggaggtgatgctagacaaatactcccagttattgaaggtggtacacggtcgcagattatagatgctgcaataactagctctcctctatggaattctattattgtcttatacttgactgaaaatatgagattaaactcatcccatttggatcctacaagtaagaatgagattgcttcctttagcaaatggttgttggacataggtgacggcaaagtacccgcaagagcaagagacagtgaaaccgaaagatattggataaaaattccgcatgacattttactaacatctcaaaataatagtcttcaatgcattgttgactccgcgtatccagatataagagataggtatgcagagatacaatacttaaaagaacatgcaatactttctccaacaaatgaaattattgacacggtcaacgactttgttgtcactctaatacatggtgatccaaaggaatatcttagctgtgatagcatagtaaaaggaccagacaacaatgattcatatgacttattatatcctgttgaattcctcaattaagttactggcaacaatttcccgcaacatcaattaatactgaaaaaaggagtaccaattatgcttttgcgtaacattaaccaatctgaaggtctttgcaatcgaacgaggttaattattgttactctaggagatctgattattgaagccaagatcatgaccggaaaatataaagacaaaattgtgctgattccacgtgtatgtttaactttaaaaacaccaaggctaccattcactctagaaagaagacaatatcccattaaagtttgttacgccatgacaaataacaggagccaaggacaaactctgtccaatgttactgtgttcttgaaaaaacctattttcacacatggacaactatatgttgctttctctagagttacttcaaaaaaggactcagagtgctgattgaagatgatgatggaaaatcaatagatgaaacgaagaatattgtttaccaggaaatctttactcgatttccttcacattaaggaagttctataattgccgcccatgtatagaataatgtctatataagtgagttttatattccattttatatccaagacaagcctattatgtataatatatgcatctactgaagatggtttctatggcttacaacattcctacttcctttattacaggtacatttcattactctctcccccccttttccctccaattacatacaattttacactcttttaactcacttgaaaaaaatagtaaacctatctacatatacaaaattccatttgttttcatcgttttgtataatactatatattaactcatacatatatctcataaataaatttattataggatacttataaacaaaatgctaactacattttttatctgttccatgttacacagaatgcctaataaaccactttcagcattgactctacaagatcgagacatagaaattcaaatagaggtccacaggaaatgggaatttcgaggtgctattgacaatggacccatattacacatagacatgatcctgacggattgcataggcaatgctatccattgtcaaataccatcattcccagcagctaaaagaggtgatgaatttcaagtgggaaaaatatacaagatgtcccgctttccagtagctcgtgcaaaatcttcctacaaacctgttgatggtgatctcatgtttctaacaagttacgacaagattgatccaaatgaaccaaatgcaaggaacttccatgaaacaaactcttgtcattgtcttatttgttggttgtttaccaaaagaattccaaggattgaatctgagaagataaacatagaattacccagccttgacggacaagaaattacacctccacaacttccacaacgagaacatcatgaccttaaatacatattacctctaaacccacatgatgtaccggatgaaggatatgaatgcacagtaaccattacaagtattcctgaaggcaagacttggtattatattgcttgcaatacttgcccaaacaaaccaagcattgatcctatcatccgtcaatgctccacatgtggatcaacaaaatactgcttcaggtacaagctcactttcaaggcatcagatggaactgcagaagctgaaatgtttgctttcgacactgttgcaaggacaattattgggaaaccatgtccaatggttgttgcatcattttccagatgcatcagctatcccacctgaaattacagcaatcgtttcacggaaatacacattcattgtagtgttcaacaaccaatcatacagatttctagaaaaagcattgctcataaaaggaattgtagcatcatatggaagaatgacatcactaccaagagttcaagaaaaacttgatgtgcaccttcctcccaatccagccaaaaacaaactgataacaacagctgctcaatctccctctacagtcatgtctagactttccacggcggactcaccaagtgtgagtcgaaagctaacctattctccagcaaaggataaacctgagacaaaccctcttgatgctgataaaaatagagctcctgcaacaacacttgaatcacctacaaaaaggatcaaacaagaccctaagaatcaacaagagtagacgttgtgtgcaacacagtaaggaatacttctgaacatcacgcccaaacttcaacaaacgaagcatattcctcactattttgtctataaatattatgtgtgccttcttctatgaagcaaaccttaccctcgatatgctatatataatatctatgtattgtcatgtaatataaccatctataaactcatcagttgctacaatatattctaagcaaaccttaccctcgatatgctatatataatatctatgtattgccatgtaatataaccatctataaactcatcagttgctacaacatattct

SEQ ID NO: 36654 - DNA, 2952 bp, Zea Mays
gaaaaaacaccttttggtgcaaaggttgttgttttaggaggtgatgctagacaaatactcccagttattgaaggtggtacacggtcgcagattatagatgctgcaataactagctctcctctatggaattctattattgtcttatacttgactgaaaatatgagattaaactcatcccatttggatcctacaagtaagaatgagattgcttcctttagcaaatggttgttggacataggtgacggcaaagtacccgcaagagcaagagacagtgaaaccgaaagatattggataaaaattccgcatgacattttactaacatctcaaaataatagtcttcaatgcattgttgactccgcgtatccagatataagagataggtatgcagagatacaatacttaaaagaacatgcaatactttctccaacaaatgaaattattgacacggtcaacgactttgttgtcactctaatacatggtgatccaaaggaatatcttagctgtgatagcatagtaaaaggaccagacaacaatgattcatatgacttattatatcctgttgaattcctcaattaagttactggcaacaatttcccgcaacatcaattaatactgaaaaaaggagtaccaattatgcttttgcgtaacattaaccaatctgaaggtctttgcaatcgaacgaggttaattattgttactctaggagatctgattattgaagccaagatcatgaccggaaaatataaagacaaaattgtgctgattccacgtgtatgtttaactttaaaaacaccaaggctaccattcactctagaaagaagacaatatcccattaaagtttgttacgccatgacaaataacaggagccaaggacaaactctgtccaatgttactgtgttcttgaaaaaacctattttcacacatggacaactatatgttgctttctctagagttacttcaaaaaaggactcagagtgctgattgaagatgatgatggaaaatcaatagatgaaacgaagaatattgtttaccaggaaatctttactcgatttccttcacattaaggaagttctataattgccgcccatgtatagaataatgtctatataagtgagttttatattccattttatatccaagacaagcctattatgtataatatatgcatctactgaagatggtttctatggcttacaacattcctacttcctttattacaggtacatttcattactctctcccccccttttccctccaattacatacaattttacactcttttaactcacttgaaaaaaatagtaaacctatctacatatacaaaattccatttgttttcatcgttttgtataatactatatattaactcatacatatatctcataaataaatttattataggatacttataaacaaaatgctaactacattttttatctgttccatgttacacagaatgcctaataaaccactttcagcattgactctacaagatcgagacatagaaattcaaatagaggtccacaggaaatgggaatttcgaggtgctattgacaatggacccatattacacatagacatgatcctgacggattgcataggcaatgctatccattgtcaaataccatcattcccagcagctaaaagaggtgatgaatttcaagtgggaaaaatatacaagatgtcccgctttccagtagctcgtgcaaaatcttcctacaaacctgttgatggtgatctcatgttgggaagtacttttaagtggtggtgcagcctaccattggtacttcaacccatcaattgaagaagctactgctttttacaacaagattgaatctgagaagataaacatagaattacccagccttgacggacaagaaattacacctccacaacttccacaacgagaacatcatgaccttaaatacatattacctctaaacccacatgatgtaccggatgaaggatatgaatgcacagtaaccattacaagtattcctgaaggcaagacttggtattatattgcttgcaatacttgcccaaacaaaccaagcattgatcctatcatccgtcaatgctccacatgtggatcaacaaaatactgcttcaggtacaagctcactttcaaggcatcagatggaactgcagaagctgaaatgtttgctttcgacactgttgcaaggacaattattgggaaaccatgtccaatggttgttgcatcattttccagatgcatcagctatcccacctgaaattacagcaatcgtttcacggaaatacacattcattgtagtgttcaacaaccaatcatacagatttctagaaaaagcattgctcataaaaggaattgtagcatcatatggaagaatgacatcactaccaagagttcaagaaaaacttgatgtgcaccttcctcccaatccagccaaaaacaaactgataacaacagctgctcaatctccctctacagtcatgtctagactttccacggcggactcaccaagtgtgagtcgaaagctaacctattctccagcaaaggataaacctgagacaaaccctcttgatgctgataaaaatagagctcctgcaacaacacttgaatcacctacaaaaaggatcaaacaagaccctaagaatcaacaagagtagacgttgtgtgcaacacagtaaggaatacttctgaacatcacgcccaaacttcaacaaacgaagcatattcctcactattttgtctataaatattatgtgtgccttcttctatgaagcaaaccttaccctcgatatgctatatataatatctatgtattgtcatgtaatataaccatctataaactcatcagttgctacaatatattctaagcaaaccttaccctcgatatgctatatataatatctatgtattgccatgtaatataaccatctataaactcatcagttgctacaacatattct

SEQ ID NO: 36655 - DNA, 2995 bp, Zea Mays
gaaaaaacaccttttggtgcaaaggttgttgttttaggaggtgatgctagacaaatactcccagttattgaaggtggtacacggtcgcagattatagatgctgcaataactagctctcctctatggaattctattattgtcttatacttgactgaaaatatgagattaaactcatcccatttggatcctacaagtaagaatgagattgcttcctttagcaaatggttgttggacataggtgacggcaaagtacccgcaagagcaagagacagtgaaaccgaaagatattggataaaaattccgcatgacattttactaacatctcaaaataatagtcttcaatgcattgttgactccgcgtatccagatataagagataggtatgcagagatacaatacttaaaagaacatgcaatactttctccaacaaatgaaattattgacacggtcaacgactttgttgtcactctaatacatggtgatccaaaggaatatcttagctgtgatagcatagtaaaaggaccagacaacaatgattcatatgacttattatatcctgttgaattcctcaattaagttactggcaacaatttcccgcaacatcaattaatactgaaaaaaggagtaccaattatgcttttgcgtaacattaaccaatctgaaggtctttgcaatcgaacgaggttaattattgttactctaggagatctgattattgaagccaagatcatgaccggaaaatataaagacaaaattgtgctgattccacgtgtatgtttaactttaaaaacaccaaggctaccattcactctagaaagaagacaatatcccattaaagtttgttacgccatgacaaataacaggagccaaggacaaactctgtccaatgttactgtgttcttgaaaaaacctattttcacacatggacaactatatgttgctttctctagagttacttcaaaaaaggactcagagtgctgattgaagatgatgatggaaaatcaatagatgaaacgaagaatattgtttaccaggaaatctttactcgatttccttcacattaaggaagttctataattgccgcccatgtatagaataatgtctatataagtgagttttatattccattttatatccaagacaagcctattatgtataatatatgcatctactgaagatggtttctatggcttacaacattcctacttcctttattacaggtacatttcattactctctcccccccttttccctccaattacatacaattttacactcttttaactcacttgaaaaaaatagtaaacctatctacatatacaaaattccatttgttttcatcgttttgtataatactatatattaactcatacatatatctcataaataaatttattataggatacttataaacaaaatgctaactacattttttatctgttccatgttacacagaatgcctaataaaccactttcagcattgactctacaagatcgagacatagaaattcaaatagaggtccacaggaaatgggaatttcgaggtgctattgacaatggacccatattacacatagacatgatcctgacggattgcataggcaatgctatccattgtcaaataccatcattcccagcagctaaaagaggtgatgaatttcaagtgggaaaaatatacaagatgtcccgctttccagtagctcgtgcaaaatcttcctacaaacctgttgatgtctaacaagttacgacaagattgatccaaatgaaccaaatgcaaggaacttccatggggaagtacttttaagtggtggtgcagcctaccattggtacttcaacccatcaattgaagaagctactgctttttacaacaagattgaatctgagaagataaacatagaattacccagccttgacggacaagaaattacacctccacaacttccacaacgagaacatcatgaccttaaatacatattacctctaaacccacatgatgtaccggatgaaggatatgaatgcacagtaaccattacaagtattcctgaaggcaagacttggtattatattgcttgcaatacttgcccaaacaaaccaagcattgatcctatcatccgtcaatgctccacatgtggatcaacaaaatactgcttcaggtacaagctcactttcaaggcatcagatggaactgcagaagctgaaatgtttgctttcgacactgttgcaaggacaattattgggaaaccatgtccaatggttgttgcatcattttccagatgcatcagctatcccacctgaaattacagcaatcgtttcacggaaatacacattcattgtagtgttcaacaaccaatcatacagatttctagaaaaagcattgctcataaaaggaattgtagcatcatatggaagaatgacatcactaccaagagttcaagaaaaacttgatgtgcaccttcctcccaatccagccaaaaacaaactgataacaacagctgctcaatctccctctacagtcatgtctagactttccacggcggactcaccaagtgtgagtcgaaagctaacctattctccagcaaaggataaacctgagacaaaccctcttgatgctgataaaaatagagctcctgcaacaacacttgaatcacctacaaaaaggatcaaacaagaccctaagaatcaacaagagtagacgttgtgtgcaacacagtaaggaatacttctgaacatcacgcccaaacttcaacaaacgaagcatattcctcactattttgtctataaatattatgtgtgccttcttctatgaagcaaaccttaccctcgatatgctatatataatatctatgtattgtcatgtaatataaccatctataaactcatcagttgctacaatatattctaagcaaaccttaccctcgatatgctatatataatatctatgtattgccatgtaatataaccatctataaactcatcagttgctacaacatattct

SEQ ID NO: 36656 - DNA, 3038 bp, Zea Mays
gccatctctactcctcgatgtcctacagctgaaaaaacaccttttggtgcaaaggttgttgttttaggaggtgatgctagacaaatactcccagttattgaaggtggtacacggtcgcagattatagatgctgcaataactagctctcctctatggaattctattattgtcttatacttgactgaaaatatgagattaaactcatcccatttggatcctacaagtaagaatgagattgcttcctttagcaaatggttgttggacataggtgacggcaaagtacccgcaagagcaagagacagtgaaaccgaaagatattggataaaaattccgcatgacattttactaacatctcaaaataatagtcttcaatgcattgttgactccgcgtatccagatataagagataggtatgcagagatacaatacttaaaagaacatgcaatactttctccaacaaatgaaattattgacacggtcaacgactttgttgtcactctaatacatggtgatccaaaggaatatcttagctgtgatagcatagtaaaaggaccagacaacaatgattcatatgacttattatatcctgttgaattcctcaattaagttactggcaacaatttcccgcaacatcaattaatactgaaaaaaggagtaccaattatgcttttgcgtaacattaaccaatctgaaggtctttgcaatcgaacgaggttaattattgttactctaggagatctgattattgaagccaagatcatgaccggaaaatataaagacaaaattgtgctgattccacgtgtatgtttaactttaaaaacaccaaggctaccattcactctagaaagaagacaatatcccattaaagtttgttacgccatgacaaataacaggagccaaggacaaactctgtccaatgttactgtgttcttgaaaaaacctattttcacacatggacaactatatgttgctttctctagagttacttcaaaaaaggactcagagtgctgattgaagatgatgatggaaaatcaatagatgaaacgaagaatattgtttaccaggaaatctttactcgatttccttcacattaaggaagttctataattgccgcccatgtatagaataatgtctatataagtgagttttatattccattttatatccaagacaagcctattatgtataatatatgcatctactgaagatggtttctatggcttacaacattcctacttcctttattacaggtacatttcattactctctcccccccttttccctccaattacatacaattttacactcttttaactcacttgaaaaaaatagtaaacctatctacatatacaaaattccatttgttttcatcgttttgtataatactatatattaactcatacatatatctcataaataaatttattataggatacttataaacaaaatgctaactacattttttatctgttccatgttacacagaatgcctaataaaccactttcagcattgactctacaagatcgagacatagaaattcaaatagaggtccacaggaaatgggaatttcgaggtgctattgacaatggacccatattacacatagacatgatcctgacggattgcataggcaatgctatccattgtcaaataccatcattcccagcagctaaaagaggtgatgaatttcaagtgggaaaaatatacaagatgtcccgctttccagtagctcgtgcaaaatcttcctacaaacctgttgatggtgatctcatgtttctaacaagttacgacaagattgatccaaatgaaccaaatgcaaggaacttccatggggaagtacttttaagtggtggtgcagcctaccattggtacttcaacccatcaattgaagaagctactgctttttacaacaagattgaatctgagaagataaacatagaattacccagccttgacggacaagaaattacacctccacaacttccacaacgagaacatcatgaccttaaatacatattacctctaaacccacatgatgtaccggatgaaggatatgaatgcacagtaaccattacaagtattcctgaaggcaagacttggtattatattgcttgcaatacttgcccaaacaaaccaagcattgatcctatcatccgtcaatgctccacatgtggatcaacaaaatactgcttcaggtacaagctcactttcaaggcatcagatggaactgcagaagctgaaatgtttgctttcgacactgttgcaaggacaattattgggaaaccatgtccaatggttgttgcatcattttccagatgcatcagctatcccacctgaaattacagcaatcgtttcacggaaatacacattcattgtagtgttcaacaaccaatcatacagatttctagaaaaagcattgctcataaaaggaattgtagcatcatatggaagaatgacatcactaccaagagttcaagaaaaacttgatgtgcaccttcctcccaatccagccaaaaacaaactgataacaacagctgctcaatctccctctacagtcatgtctagactttccacggcggactcaccaagtgtgagtcgaaagctaacctattctccagcaaaggataaacctgagacaaaccctcttgatgctgataaaaatagagctcctgcaacaacacttgaatcacctacaaaaaggatcaaacaagaccctaagaatcaacaagagtagacgttgtgtgcaacacagtaaggaatacttctgaacatcacgcccaaacttcaacaaacgaagcatattcctcactattttgtctataaatattatgtgtgccttcttctatgaagcaaaccttaccctcgatatgctatatataatatctatgtattgtcatgtaatataaccatctataaactcatcagttgctacaatatattctaagcaaaccttaccctcgatatgctatatataatatctatgtattgccatgtaatataaccatctataaactcatcagttgctacaacatattct

SEQ ID NO: 36657 - DNA, 959 bp, Zea Mays
ccaagtcccccaccgtccgctgttcttcagggataacactttcattgaaagccagtatttgcgagttcatccataaaaagaagagctcagacggttgaatatcgaccatcaacaaaggtacaagctcactttcaaggcatcagatggaactgcagaagctgaaatgtttgctttcgacactgttgcaaggacaattattgggaaaccatgtccaatggttgttgcatcattttccagatgcatcagctatcccacctgaaattacagcaatcgtttcacggaaatacacattcattgtagtgttcaacaaccaatcatacagatttctagaaaaagcattgctcataaaaggaattgtagcatcatatggaagaatgacatcactaccaagagttcaagaaaaacttgatgtgcaccttcctcccaatccagccaaaaacaaactgataacaacagctgctcaatctccctctacagtcatgtctagactttccacggcggactcaccaagtgtgagtcgaaagctaacctattctccagcaaaggataaacctgagacaaaccctcttgatgctgataaaaatagagctcctgcaacaacacttgaatcacctacaaaaaggatcaaacaagaccctaagaatcaacaagagtagacgttgtgtgcaacacagtaaggaatacttctgaacatcacgcccaaacttcaacaaacgaagcatattcctcactattttgtctataaatattatgtgtgccttcttctatgaagcaaaccttaccctcgatatgctatatataatatctatgtattgtcatgtaatataaccatctataaactcatcagttgctacaatatattctaagcaaaccttaccctcgatatgctatatataatatctatgtattgccatgtaatataaccatctataaactcatcagttgctacaacatattct

SEQ ID NO: 36658 - DNA, 1970 bp, Zea Mays
ggacgccatcggctccccaagtcccccaccgtccgctgttcttcagggataacactttcattgaaagccaggttcagggagctaatatttgcgagttcatccataaaaagaagagctcagacggttgaatatcgaccatcaacaaagagttacttcaaaaaaggactcagagtgctgattgaagatgatgatggaaaatcaatagatgaaacgaagaatattgtttaccaggaaatctttactcgatttccttcacattaaggaagttctataattgccgcccatgtatagaataatgtctatataagtgagttttatattccattttatatccaagacaagcctattatgtataatatatgcatctactgaagatggtttctatggcttacaacattcctacttcctttattacagaatgcctaataaaccactttcagcattgactctacaagatcgagacatagaaattcaaatagaggtccacaggaaatgggaatttcgaggtgctattgacaatggacccatattacacatagacatgatcctgacggattgcataggcaatgctatccattgtcaaataccatcattcccagcagctaaaagaggtgatgaatttcaagtgggaaaaatatacaagatgtcccgctttccagtagctcgtgcaaaatcttcctacaaacctgttgatggtgatctcatgtttctaacaagttacgacaagattgatccaaatgaaccaaatgcaaggaacttccatggggaagtacttttaagtggtggtgcagcctaccattggtacttcaacccatcaattgaagaagctactgctttttacaacaagattgaatctgagaagataaacatagaattacccagccttgacggacaagaaattacacctccacaacttccacaacgagaacatcatgaccttaaatacatattacctctaaacccacatgatgtaccggatgaaggatatgaatgcacagtaaccattacaagtattcctgaaggcaagacttggtattatattgcttgcaatacttgcccaaacaaaccaagcattgatcctatcatccgtcaatgctccacatgtggatcaacaaaatactgcttcaggtacaagctcactttcaaggcatcagatggaactgcagaagctgaaatgtttgctttcgacactgttgcaaggacaattattgggaaaccatgtccaatggttgttgcatcattttccagatgcatcagctatcccacctgaaattacagcaatcgtttcacggaaatacacattcattgtagtgttcaacaaccaatcatacagatttctagaaaaagcattgctcataaaaggaattgtagcatcatatggaagaatgacatcactaccaagagttcaagaaaaacttgatgtgcaccttcctcccaatccagccaaaaacaaactgataacaacagctgctcaatctccctctacagtcatgtctagactttccacggcggactcaccaagtgtgagtcgaaagctaacctattctccagcaaaggataaacctgagacaaaccctcttgatgctgataaaaatagagctcctgcaacaacacttgaatcacctacaaaaaggatcaaacaagaccctaagaatcaacaagagtagacgttgtgtgcaacacagtaaggaatacttctgaacatcacgcccaaacttcaacaaacgaagcatattcctcactattttgtctataaatattatgtgtgccttcttctatgaagcaaaccttaccctcgatatgctatatataatatctatgtattgtcatgtaatataaccatctataaactcatcagttgctacaatatattctaagcaaaccttaccctcgatatgctatatataatatctatgtattgccatgtaatataaccatctataaactcatcagttgctacaacatattct

SEQ ID NO: 36659 - DNA, 1793 bp, Zea Mays
aacgagtactccgcagtcatcggacgccatcggctccccaagtcccccaccgtccgctgttcttcagggataacactttcattgaaagccaggttcagggagctaatatttgcgagttcatccataaaaagaagagctcagacggttgaatatcgaccatcaacaaagaatgcctaataaaccactttcagcattgactctacaagatcgagacatagaaattcaaatagaggtccacaggaaatgggaatttcgaggtgctattgacaatggacccatattacacatagacatgatcctgacggattgcataggcaatgctatccattgtcaaataccatcattcccagcagctaaaagaggtgatgaatttcaagtgggaaaaatatacaagatgtcccgctttccagtagctcgtgcaaaatcttcctacaaacctgttgatggtgatctcatgttgtatgtgacaccatacacaacccttgaactttgtcataattcaccctcaagttttcctctctatgtttatagtctaacaagttacgacaagattgatccaaatgaaccaaatgcaaggaacttccatggggaagtacttttaagtggtggtgcagcctaccattggtacttcaacccatcaattgaagaagctactgctttttacaacaagattgaatctgagaagataaacatagaattacccagccttgacggacaagaaattacacctccacaacttccacaacgagaacatcatgaccttaaatacatattacctctaaacccacatgatgtaccggatgaaggatatgaatgcacagtaaccattacaagtattcctgaaggcaagacttggtattatattgcttgcaatacttgcccaaacaaaccaagcattgatcctatcatccgtcaatgctccacatgtggatcaacaaaatactgcttcaggtacaagctcactttcaaggcatcagatggaactgcagaagctgaaatgtttgctttcgacactgttgcaaggacaattattgggaaaccatgtccaatggttgttgcatcattttccagatgcatcagctatcccacctgaaattacagcaatcgtttcacggaaatacacattcattgtagtgttcaacaaccaatcatacagatttctagaaaaagcattgctcataaaaggaattgtagcatcatatggaagaatgacatcactaccaagagttcaagaaaaacttgatgtgcaccttcctcccaatccagccaaaaacaaactgataacaacagctgctcaatctccctctacagtcatgtctagactttccacggcggactcaccaagtgtgagtcgaaagctaacctattctccagcaaaggataaacctgagacaaaccctcttgatgctgataaaaatagagctcctgcaacaacacttgaatcacctacaaaaaggatcaaacaagaccctaagaatcaacaagagtagacgttgtgtgcaacacagtaaggaatacttctgaacatcacgcccaaacttcaacaaacgaagcatattcctcactattttgtctataaatattatgtgtgccttcttctatgaagcaaaccttaccctcgatatgctatatataatatctatgtattgtcatgtaatataaccatctataaactcatcagttgctacaatatattctaagcaaaccttaccctcgatatgctatatataatatctatgtattgccatgtaatataaccatctataaactcatcagttgctacaacatattct

SEQ ID NO: 36660 - DNA, 1383 bp, Zea Mays
gtcacattcaacgagtactccgcagtcatcggacgccatcggctccccaagtcccccaccgtccgctgttcttcagggataacactttcattgaaagccaggttcagggagctaatatttgcgagttcatccataaaaagaagagctcagacggttgaatatcgaccatcaacaaaggggaagtacttttaagtggtggtgcagcctaccattggtacttcaacccatcaattgaagaagctactgctttttacaacaagattgaatctgagaagataaacatagaattacccagccttgacggacaagaaattacacctccacaacttccacaacgagaacatcatgaccttaaatacatattacctctaaacccacatgatgtaccggatgaaggatatgaatgcacagtaaccattacaagtattcctgaaggcaagacttggtattatattgcttgcaatacttgcccaaacaaaccaagcattgatcctatcatccgtcaatgctccacatgtggatcaacaaaatactgcttcaggtacaagctcactttcaaggcatcagatggaactgcagaagctgaaatgtttgctttcgacactgttgcaaggacaattattgggaaaccatgtccaatggttgttgcatcattttccagatgcatcagctatcccacctgaaattacagcaatcgtttcacggaaatacacattcattgtagtgttcaacaaccaatcatacagatttctagaaaaagcattgctcataaaaggaattgtagcatcatatggaagaatgacatcactaccaagagttcaagaaaaacttgatgtgcaccttcctcccaatccagccaaaaacaaactgataacaacagctgctcaatctccctctacagtcatgtctagactttccacggcggactcaccaagtgtgagtcgaaagctaacctattctccagcaaaggataaacctgagacaaaccctcttgatgctgataaaaatagagctcctgcaacaacacttgaatcacctacaaaaaggatcaaacaagaccctaagaatcaacaagagtagacgttgtgtgcaacacagtaaggaatacttctgaacatcacgcccaaacttcaacaaacgaagcatattcctcactattttgtctataaatattatgtgtgccttcttctatgaagcaaaccttaccctcgatatgctatatataatatctatgtattgtcatgtaatataaccatctataaactcatcagttgctacaatatattctaagcaaaccttaccctcgatatgctatatataatatctatgtattgccatgtaatataaccatctataaactcatcagttgctacaacatattct

SEQ ID NO: 36661 - DNA, 1425 bp, Zea Mays
gtcacattcaacgagtactccgcagtcatcggacgccatcggctccccaagtcccccaccgtccgctgttcttcagggataacactttcattgaaagccaggttcagggagctaatatttgcgagttcatccataaaaagaagagctcagacggttgaatatcgaccatcaacaaagtgatagcattctgaaaattactctatgggggaaacgtgcacaagaattttatttgaccaacacttatgacccacagaaacaaactcttgtcattgtcttatttgttggttgtttaccaaaagaattccaaggattgaatctgagaagataaacatagaattacccagccttgacggacaagaaattacacctccacaacttccacaacgagaacatcatgaccttaaatacatattacctctaaacccacatgatgtaccggatatgaatgcacagtaaccattacaagtattcctgaaggcaagacttggtattatattgcttgcaatacttgcccaaacaaaccaagcattgatcctatcatccgtcaatgctccacatgtggatcaacaaaatactgcttcaggtacaagctcactttcaaggcatcagatggaactgcagaagctgaaatgtttgctttcgacactgttgcaaggacaattattgggaaaccatgtccaatggttgttgcatcattttccagatgcatcagctatcccacctgaaattacagcaatcgtttcacggaaatacacattcattgtagtgttcaacaaccaatcatacagatttctagaaaaagcattgctcataaaaggaattgtagcatcatatggaagaatgacatcactaccaagagttcaagaaaaacttgatgtgcaccttcctcccaatccagccaaaaacaaactgataacaacagctgctcaatctccctctacagtcatgtctagactttccacggcggactcaccaagtgtgagtcgaaagctaacctattctccagcaaaggataaacctgagacaaaccctcttgatgctgataaaaatagagctcctgcaacaacacttgaatcacctacaaaaaggatcaaacaagaccctaagaatcaacaagagtagacgttgtgtgcaacacagtaaggaatacttctgaacatcacgcccaaacttcaacaaacgaagcatattcctcactattttgtctataaatattatgtgtgccttcttctatgaagcaaaccttaccctcgatatgctatatataatatctatgtattgtcatgtaatataaccatctataaactcatcagttgctacaatatattctaagcaaaccttaccctcgatatgctatatataatatctatgtattgccatgtaatataaccatctataaactcatcagttgctacaacatattct

SEQ ID NO: 36662 - DNA, 3094 bp, Zea Mays
gtcacattcaacgagtactccgcagtcatcggacgccatcggctccccaagtcccccaccgtccgctgttcttcagggataacactttcattgaaagccaggttcagggagctaatatttgcgagttcatccataaaaagaagagctcagacggttgaatatcgaccatcaacaaaggtaatgtattatctgcttattccccactgtactaacgtcttcctggtctaatcaatgcaataaatgttttgctcactattatcatgaatttagattcattcacataatttataatgatatttagatctccccatctttttttgttgattatgctttccccatatgtctacatttttcaatcgcatagtgtttcatccatgcgcaaactaacatataatacctcgactaaatgttataggacgagtaattgtccagtcatataaaacttaatttaccaaatgagtgattcttcagcaacaaaggaaatggatgtcaatgatgaagcagatcctcctacttctattgtggcttctcatgtaactgatacttgggctttaactcctcggagaaagatttcttatgtgaccacgtaaatgctgcacttgcacgacaacaacgtaaaagagcgttggaacaacatcaattagtcactcaaggtaccaaagaatacatgataattacaatgcctaacaacgttaatacttggtctgctgtctctgacaatacaataacctaggtcctaccaaaagtatcagaacatcaatgacatgtggttattttcctgaagaatacatagctgcgcttaaagagttacttcaaaaaaggactcagagtgctgattgaagatgatgatggaaaatcaatagatgaaacgaagaatattgtttaccaggaaatctttactcgatttccttcacattaaggaagttctataattgccgcccatgtatagaataatgtctatataagtgagttttatattccattttatatccaagacaagcctattatgtataatatatgcatctactgaagatggtttctatggcttacaacattcctacttcctttattacaggtacatttcattactctctcccccccttttccctccaattacatacaattttacactcttttaactcacttgaaaaaaatagtaaacctatctacatatacaaaattccatttgttttcatcgttttgtataatactatatattaactcatacatatatctcataaataaatttattataggatacttataaacaaaatgctaactacattttttatctgttccatgttacacagaatgcctaataaaccactttcagcattgactctacaagatcgagacatagaaattcaaatagaggtccacaggaaatgggaatttcgaggtgctattgacaatggacccatattacacatagacatgatcctgacggattgcataggcaatgctatccattgtcaaataccatcattcccagcagctaaaagaggtgatgaatttcaagtgggaaaaatatacaagatgtcccgctttccagtagctcgtgcaaaatcttcctacaaacctgttgatggtgatctcatgtttctaacaagttacgacaagattgatccaaatgaaccaaatgcaaggaacttccatgatgtcattagcattattacagaaatctctgcgattaaacctgtgggaaatgcacgcataccctcatcttacaatcgacatgttctaataaaaaacctcagtgatagcattctgaaaattactctatgggggaaacgtgcacaagaattttatttgaccaacacttatgacccacagaaacaaactcttgtcattgtcttatttgttggttgtttaccaaaagaattccaaggggaagtacttttaagtggtggtgcagcctaccattggtacttcaacccatcaattgaagaagctactgctttttacaacaagattgaatctgagaagataaacatagaattacccagccttgacggacaagaaattacacctccacaacttccacaacgagaacatcatgaccttaaatacatattacctctaaacccacatgatgtaccggatgaaggatatgaatgcacagtaaccattacaagtattcctgaaggcaagacttggtattatattgcttgcaatacttgcccaaacaaaccaagcattgatcctatcatccgtcaatgctccacatgtggatcaacaaaatactgcttcaggtacaagctcactttcaaggcatcagatggaactgcagaagctgaaatgtttgctttcgacactgttgcaaggacaattattgggaaaccatgtccaatggttgttgcatcattttccagatgcatcagctatcccacctgaaattacagcaatcgtttcacggaaatacacattcattgtagtgttcaacaaccaatcatacagatttctagaaaaagcattgctcataaaaggaattgtagcatcatatggaagaatgacatcactaccaagagttcaagaaaaacttgatgtgcaccttcctcccaatccagccaaaaacaaactgataacaacagctgctcaatctccctctacagtcatgtctagactttccacggcggactcaccaagtgtgagtcgaaagctaacctattctccagcaaaggataaacctgagacaaaccctcttgatgctgataaaaatagagctcctgcaacaacacttgaatcacctacaaaaaggatcaaacaagaccctaagaatcaacaagagtagacgttgtgtgcaacacagtaaggaatacttctgaacatcacgcccaaacttcaacaaacgaagcatattcctcactattttgtctataaatattatgtgtgccttcttctatgaagcaaaccttaccctcgatatgctatatataatatctatgtattgtcatgtaatataaccatctataaactcatcagttgctacaatatattctaagcaaaccttaccctcgatatgctatatataatatctatgtattgccatgtaatataaccatctataaactcatcagttgctacaacatattct

SEQ ID NO: 36663 - DNA, 2328 bp, Zea Mays
agagaagtagacgtcacattcaacgagtactccgcagtcatcggacgccatcggctccccaagtcccccaccgtccgctgttcttcagggataacactttcattgaaagccagtatttgcgagttcatccataaaaagaagagctcagacggttgaatatcgaccatcaacaaagaatgcctaataaaccactttcagcattgactctacaagatcgagacatagaaattcaaatagaggtccacaggaaatgggaatttcgaggtgctattgacaatggacccatattacacatagacatgatcctgacggattgcataggcaatgctatccattgtcaaataccatcattcccagcagctaaaagaggtgatgaatttcaagtgggaaaaatatacaagatgtcccgctttccagtagctcgtgcaaaatcttcctacaaacctgttgatggtgatctcatgttgtatgtgacaccatacacaacccttgaactttgtcataattcaccctcaagttttcctctctatgtttatagtctaacaagttacgacaagattgatccaaatgaaccaaatgcaaggaacttccatggtatgtttcctaaatatgacataaaatcctattctcataattatccaagcgctcacgtgatctaatcctggttttgctattgtatgaaacattagatgtcattagcattattacagaaatctctgcgattaaacctgtgggaaatgcacgcataccctcatcttacaatcgacatgttctaataaaaaacctcaggtcactgctatgcaacatactacatatttattatcttattttaccgtttttatattaatacttgatccaccattgttgaaaaatgcattaacacatatttagtacttattttgaaactgtctaacagtgatagcattctgaaaattactctatgggggaaacgtgcacaagaattttatttgaccaacacttatgacccacagaaacaaactcttgtcattgtcttatttgttggttgtttaccaaaagaattccaaggtgcgtaattataacttttctcatatcttttttggtcttatacttcttatcttcctttgttataaacatatataggggaagtacttttaagtggtggtgcagcctaccattggtacttcaacccatcaattgaagaagctactgctttttacaacaagattgaatctgagaagataaacatagaattacccagccttgacggacaagaaattacacctccacaacttccacaacgagaacatcatgaccttaaatacatattacctctaaacccacatgatgtaccggatgaaggatatgaatgcacagtaaccattacaagtattcctgaaggcaagacttggtattatattgcttgcaatacttgcccaaacaaaccaagcattgatcctatcatccgtcaatgctccacatgtggatcaacaaaatactgcttcaggtacaagctcactttcaaggcatcagatggaactgcagaagctgaaatgtttgctttcgacactgttgcaaggacaattattgggaaaccatgtccaatggttgttgcatcattttccagatgcatcagctatcccacctgaaattacagcaatcgtttcacggaaatacacattcattgtagtgttcaacaaccaatcatacagatttctagaaaaagcattgctcataaaaggaattgtagcatcatatggaagaatgacatcactaccaagagttcaagaaaaacttgatgtgcaccttcctcccaatccagccaaaaacaaactgataacaacagctgctcaatctccctctacagtcatgtctagactttccacggcggactcaccaagtgtgagtcgaaagctaacctattctccagcaaaggataaacctgagacaaaccctcttgatgctgataaaaatagagctcctgcaacaacacttgaatcacctacaaaaaggatcaaacaagaccctaagaatcaacaagagtagacgttgtgtgcaacacagtaaggaatacttctgaacatcacgcccaaacttcaacaaacgaagcatattcctcactattttgtctataaatattatgtgtgccttcttctatgaagcaaaccttaccctcgatatgctatatataatatctatgtattgtcatgtaatataaccatctataaactcatcagttgctacaatatattctaagcaaaccttaccctcgatatgctatatataatatctatgtattgccatgtaatataaccatctataaactcatcagttgctacaacatattct

SEQ ID NO: 36664 - DNA, 2906 bp, Zea Mays
ccagagtcttctacggagtgaataaaataaagagaagtagacgtcacattcaacgagtactccgcagtcatcggacgccatcggctccccaagtcccccaccgtccgctgttcttcagggataacactttcattgaaagccagtatttgcgagttcatccataaaaagaagagctcagacggttgaatatcgaccatcaacaaaggtaatgtattatctgcttattccccactgtactaacgtcttcctggtctaatcaatgcaataaatgttttgctcactattatcatgaatttagattcattcacataatttataatgatatttagatctccccatctttttttgttgattatgctttccccatatgtctacatttttcaatcgcatagtgtttcatccatgcgcaaactaacatataatacctcgactaaatgttataggacgagtaattgtccagtcatataaaacttaatttaccaaatgagtgattcttcagcaacaaaggaaatggatgtcaatgatgaagcagatcctcctacttctattgtggcttctcatgtaactgatacttgggctttaactcctcggagaaagatttcttatgtgaccacgtaaatgctgcacttgcacgacaacaacgtaaaagagcgttggaacaacatcaattagtcactcaaggtcctaccaaaagtatcagaacatcaatgacatgtggttattttcctgaagaatacatagctgcgcttaaagaatgcctaataaaccactttcagcattgactctacaagatcgagacatagaaattcaaatagaggtccacaggaaatgggaatttcgaggtgctattgacaatggacccatattacacatagacatgatcctgacggattgcataggcaatgctatccattgtcaaataccatcattcccagcagctaaaagaggtgatgaatttcaagtgggaaaaatatacaagatgtcccgctttccagtagctcgtgcaaaatcttcctacaaacctgttgatggtgatctcatgttgtatgtgacaccatacacaacccttgaactttgtcataattcaccctcaagttttcctctctatgtttatagtctaacaagttacgacaagattgatccaaatgaaccaaatgcaaggaacttccatggtatgtttcctaaatatgacataaaatcctattctcataattatccaagcgctcacgtgatctaatcctggttttgctattgtatgaaacattagatgtcattagcattattacagaaatctctgcgattaaacctgtgggaaatgcacgcataccctcatcttacaatcgacatgttctaataaaaaacctcaggtcactgctatgcaacatactacatatttattatcttattttaccgtttttatattaatacttgatccaccattgttgaaaaatgcattaacacatatttagtacttattttgaaactgtctaacagtgatagcattctgaaaattactctatgggggaaacgtgcacaagaattttatttgaccaacacttatgacccacagaaacaaactcttgtcattgtcttatttgttggttgtttaccaaaagaattccaaggtgcgtaattataacttttctcatatcttttttggtcttatacttcttatcttcctttgttataaacatatataggggaagtacttttaagtggtggtgcagcctaccattggtacttcaacccatcaattgaagaagctactgctttttacaacaagattgaatctgagaagataaacatagaattacccagccttgacggacaagaaattacacctccacaacttccacaacgagaacatcatgaccttaaatacatattacctctaaacccacatgatgtaccggatgaaggatatgaatgcacagtaaccattacaagtattcctgaaggcaagacttggtattatattgcttgcaatacttgcccaaacaaaccaagcattgatcctatcatccgtcaatgctccacatgtggatcaacaaaatactgcttcaggtacaagctcactttcaaggcatcagatggaactgcagaagctgaaatgtttgctttcgacactgttgcaaggacaattattgggaaaccatgtccaatggttgttgcatcattttccagatgcatcagctatcccacctgaaattacagcaatcgtttcacggaaatacacattcattgtagtgttcaacaaccaatcatacagatttctagaaaaagcattgctcataaaaggaattgtagcatcatatggaagaatgacatcactaccaagagttcaagaaaaacttgatgtgcaccttcctcccaatccagccaaaaacaaactgataacaacagctgctcaatctccctctacagtcatgtctagactttccacggcggactcaccaagtgtgagtcgaaagctaacctattctccagcaaaggataaacctgagacaaaccctcttgatgctgataaaaatagagctcctgcaacaacacttgaatcacctacaaaaaggatcaaacaagaccctaagaatcaacaagagtagacgttgtgtgcaacacagtaaggaatacttctgaacatcacgcccaaacttcaacaaacgaagcatattcctcactattttgtctataaatattatgtgtgccttcttctatgaagcaaaccttaccctcgatatgctatatataatatctatgtattgtcatgtaatataaccatctataaactcatcagttgctacaatatattctaagcaaaccttaccctcgatatgctatatataatatctatgtattgccatgtaatataaccatctataaactcatcagttgctacaacatattct

SEQ ID NO: 36665 - DNA, 2932 bp, Zea Mays
ggtacatccagagtcttctacggagtgaataaaataaagagaagtagacgtcacattcaacgagtactccgcagtcatcggacgccatcggctccccaagtcccccaccgtccgctgttcttcagggataacactttcattgaaagccaggttcagggagctaatatttgcgagttcatccataaaaagaagagctcagacggttgaatatcgaccatcaacaaaggtaatgtattatctgcttattccccactgtactaacgtcttcctggtctaatcaatgcaataaatgttttgctcactattatcatgaatttagattcattcacataatttataatgatatttagatctccccatctttttttgttgattatgctttccccatatgtctacatttttcaatcgcatagtgtttcatccatgcgcaaactaacatataatacctcgactaaatgttataggacgagtaattgtccagtcatataaaacttaatttaccaaatgagtgattcttcagcaacaaaggaaatggatgtcaatgatgaagcagatcctcctacttctattgtggcttctcatgtaactgatacttgggctttaactcctcggagaaagatttcttatgtgaccacgtaaatgctgcacttgcacgacaacaacgtaaaagagcgttggaacaacatcaattagtcactcaaggtaccaaagaatacatgataattacaatgcctaacaacgttaatacttggtctgctgtctctgacaatacaataacctaggtcctaccaaaagtatcagaacatcaatgacatgtggttattttcctgaagaatacatagctgcgcttaaagaatgcctaataaaccactttcagcattgactctacaagatcgagacatagaaattcaaatagaggtccacaggaaatgggaatttcgaggtgctattgacaatggacccatattacacatagacatgatcctgacggattgcataggcaatgctatccattgtcaaataccatcattcccagcagctaaaagaggtgatgaatttcaagtgggaaaaatatacaagatgtcccgctttccagtagctcgtgcaaaatcttcctacaaacctgttgatggtgatctcatgttgtatgtgacaccatacacaacccttgaactttgtcataattcaccctcaagttttcctctctatgtttatagtctaacaagttacgacaagattgatccaaatgaaccaaatgcaaggaacttccatggtatgtttcctaaatatgacataaaatcctattctcataattatccaagcgctcacgtgatctaatcctggttttgctattgtatgaaacattagatgtcattagcattattacagaaatctctgcgattaaacctgtgggaaatgcacgcataccctcatcttacaatcgacatgttctaataaaaaacctcaggtcactgctatgcaacatactacatatttattatcttattttaccgtttttatattaatacttgatccaccattgttgaaaaatgcattaacacatatttagtacttattttgaaactgtctaacagtgatagcattctgaaaattactctatgggggaaacgtgcacaagaattttatttgaccaacacttatgacccacagaaacaaactcttgtcattgtcttatttgttggttgtttaccaaaagaattccaaggggaagtacttttaagtggtggtgcagcctaccattggtacttcaacccatcaattgaagaagctactgctttttacaacaagattgaatctgagaagataaacatagaattacccagccttgacggacaagaaattacacctccacaacttccacaacgagaacatcatgaccttaaatacatattacctctaaacccacatgatgtaccggatgaaggatatgaatgcacagtaaccattacaagtattcctgaaggcaagacttggtattatattgcttgcaatacttgcccaaacaaaccaagcattgatcctatcatccgtcaatgctccacatgtggatcaacaaaatactgcttcaggtacaagctcactttcaaggcatcagatggaactgcagaagctgaaatgtttgctttcgacactgttgcaaggacaattattgggaaaccatgtccaatggttgttgcatcattttccagatgcatcagctatcccacctgaaattacagcaatcgtttcacggaaatacacattcattgtagtgttcaacaaccaatcatacagatttctagaaaaagcattgctcataaaaggaattgtagcatcatatggaagaatgacatcactaccaagagttcaagaaaaacttgatgtgcaccttcctcccaatccagccaaaaacaaactgataacaacagctgctcaatctccctctacagtcatgtctagactttccacggcggactcaccaagtgtgagtcgaaagctaacctattctccagcaaaggataaacctgagacaaaccctcttgatgctgataaaaatagagctcctgcaacaacacttgaatcacctacaaaaaggatcaaacaagaccctaagaatcaacaagagtagacgttgtgtgcaacacagtaaggaatacttctgaacatcacgcccaaacttcaacaaacgaagcatattcctcactattttgtctataaatattatgtgtgccttcttctatgaagcaaaccttaccctcgatatgctatatataatatctatgtattgtcatgtaatataaccatctataaactcatcagttgctacaatatattctaagcaaaccttaccctcgatatgctatatataatatctatgtattgccatgtaatataaccatctataaactcatcagttgctacaacatattct

SEQ ID NO: 36666 - DNA, 2088 bp, Zea Mays
caattgggtacatccagagtcttctacggagtgaataaaataaagagaagtagacgtcacattcaacgagtactccgcagtcatcggacgccatcggctccccaagtcccccaccgtccgctgttcttcagggataacactttcattgaaagccaggttcagggagctaatatttgcgagttcatccataaaaagaagagctcagacggttgaatatcgaccatcaacaaagaatgcctaataaaccactttcagcattgactctacaagatcgagacatagaaattcaaatagaggtccacaggaaatgggaatttcgaggtgctattgacaatggacccatattacacatagacatgatcctgacggattgcataggcaatgctatccattgtcaaataccatcattcccagcagctaaaagaggtgatgaatttcaagtgggaaaaatatacaagatgtcccgctttccagtagctcgtgcaaaatcttcctacaaacctgttgatggtgatctcatgttgtatgtgacaccatacacaacccttgaactttgtcataattcaccctcaagttttcctctctatgtttatagtctaacaagttacgacaagattgatccaaatgaaccaaatgcaaggaacttccatgatgtcattagcattattacagaaatctctgcgattaaacctgtgggaaatgcacgcataccctcatcttacaatcgacatgttctaataaaaaacctcagtgatagcattctgaaaattactctatgggggaaacgtgcacaagaattttatttgaccaacacttatgacccacagaaacaaactcttgtcattgtcttatttgttggttgtttaccaaaagaattccaaggggaagtacttttaagtggtggtgcagcctaccattggtacttcaacccatcaattgaagaagctactgctttttacaacaagattgaatctgagaagataaacatagaattacccagccttgacggacaagaaattacacctccacaacttccacaacgagaacatcatgaccttaaatacatattacctctaaacccacatgatgtaccggatgaaggatatgaatgcacagtaaccattacaagtattcctgaaggcaagacttggtattatattgcttgcaatacttgcccaaacaaaccaagcattgatcctatcatccgtcaatgctccacatgtggatcaacaaaatactgcttcaggtacaagctcactttcaaggcatcagatggaactgcagaagctgaaatgtttgctttcgacactgttgcaaggacaattattgggaaaccatgtccaatggttgttgcatcattttccagatgcatcagctatcccacctgaaattacagcaatcgtttcacggaaatacacattcattgtagtgttcaacaaccaatcatacagatttctagaaaaagcattgctcataaaaggaattgtagcatcatatggaagaatgacatcactaccaagagttcaagaaaaacttgatgtgcaccttcctcccaatccagccaaaaacaaactgataacaacagctgctcaatctccctctacagtcatgtctagactttccacggcggactcaccaagtgtgagtcgaaagctaacctattctccagcaaaggataaacctgagacaaaccctcttgatgctgataaaaatagagctcctgcaacaacacttgaatcacctacaaaaaggatcaaacaagaccctaagaatcaacaagagtagacgttgtgtgcaacacagtaaggaatacttctgaacatcacgcccaaacttcaacaaacgaagcatattcctcactattttgtctataaatattatgtgtgccttcttctatgaagcaaaccttaccctcgatatgctatatataatatctatgtattgtcatgtaatataaccatctataaactcatcagttgctacaatatattctaagcaaaccttaccctcgatatgctatatataatatctatgtattgccatgtaatataaccatctataaactcatcagttgctacaacatattct

SEQ ID NO: 36667 - DNA, 1569 bp, Zea Mays
caattgggtacatccagagtcttctacggagtgaataaaataaagagaagtagacgtcacattcaacgagtactccgcagtcatcggacgccatcggctccccaagtcccccaccgtccgctgttcttcagggataacactttcattgaaagccaggttcagggagctaatatttgcgagttcatccataaaaagaagagctcagacggttgaatatcgaccatcaacaaagtgatagcattctgaaaattactctatgggggaaacgtgcacaagaattttatttgaccaacacttatgacccacagaaacaaactcttgtcattgtcttatttgttggttgtttaccaaaagaattccaaggggaagtacttttaagtggtggtgcagcctaccattggtacttcaacccatcaattgaagaagctactgctttttacaacaagattgaatctgagaagataaacatagaattacccagccttgacggacaagaaattacacctccacaacttccacaacgagaacatcatgaccttaaatacatattacctctaaacccacatgatgtaccggatgaaggatatgaatgcacagtaaccattacaagtattcctgaaggcaagacttggtattatattgcttgcaatacttgcccaaacaaaccaagcattgatcctatcatccgtcaatgctccacatgtggatcaacaaaatactgcttcaggtacaagctcactttcaaggcatcagatggaactgcagaagctgaaatgtttgctttcgacactgttgcaaggacaattattgggaaaccatgtccaatggttgttgcatcattttccagatgcatcagctatcccacctgaaattacagcaatcgtttcacggaaatacacattcattgtagtgttcaacaaccaatcatacagatttctagaaaaagcattgctcataaaaggaattgtagcatcatatggaagaatgacatcactaccaagagttcaagaaaaacttgatgtgcaccttcctcccaatccagccaaaaacaaactgataacaacagctgctcaatctccctctacagtcatgtctagactttccacggcggactcaccaagtgtgagtcgaaagctaacctattctccagcaaaggataaacctgagacaaaccctcttgatgctgataaaaatagagctcctgcaacaacacttgaatcacctacaaaaaggatcaaacaagaccctaagaatcaacaagagtagacgttgtgtgcaacacagtaaggaatacttctgaacatcacgcccaaacttcaacaaacgaagcatattcctcactattttgtctataaatattatgtgtgccttcttctatgaagcaaaccttaccctcgatatgctatatataatatctatgtattgtcatgtaatataaccatctataaactcatcagttgctacaatatattctaagcaaaccttaccctcgatatgctatatataatatctatgtattgccatgtaatataaccatctataaactcatcagttgctacaacatattct

SEQ ID NO: 36668 - DNA, 2819 bp, Zea Mays
gcatgtttttcctttttggggctacaattgggtacatccagagtcttctacggagtgaataaaataaagagaagtagacgtcacattcaacgagtactccgcagtcatcggacgccatcggctccccaagtcccccaccgtccgctgttcttcagggataacactttcattgaaagccaggttcagggagctaatatttgcgagttcatccataaaaagaagagctcagacggttgaatatcgaccatcaacaaaggacgagtaattgtccagtcatataaaacttaatttaccaaatgagtgattcttcagcaacaaaggaaatggatgtcaatgatgaagcagatcctcctacttctattgtggcttctcatgtaactgatacttgggctttaactcctcggagaaagatttcttatgtgaccacgtaaatgctgcacttgcacgacaacaacgtaaaagagcgttggaacaacatcaattagtcactcaaggtaccaaagaatacatgataattacaatgcctaacaacgttaatacttggtctgctgtctctgacaatacaataacctaggtcctaccaaaagtatcagaacatcaatgacatgtggttattttcctgaagaatacatagctgcgcttaaagcatcatatcaaggtcgatcattccatggaacactagattatgaatgtcaatactgtcatgctttattctggtatggtgaaaaatcttctataaattgccaaaccgaaaggcctcggtaccatacttgatgtaagagtgggaagattgatataccttcgtttaaagatcgacctgaaccactggcttccttggcaatcttcaatggtgactctagatctaggaaattcatgcgtagtatcaggcaatataactgtcgctttgctttcacatcaatgggtgcacaaattgacaactctattaataatgatggtcgtagaccgccgctattcaaaatatgtggccaagtacatcatcgtgttggttctcttttaccccttgatgattctgccccacaatttcttcaactttatgtgtatgacactgctaatgaagttagcaatagaatgaaatgtacgttttgatgaaaatggctttgttctctacagaagaagaaataatggacgttttgttttgaaaaataagattgcactagataataggtacattgtgccaacaaatttgttgttgctgaaaaaatttggtgcacatacaaatgttgaatggtgcaataaaaccatctttataaagtatctttttaaatatgtgaccaaaggaccagaccgtagcaaaatgttccttcaaaggattcagagaggtgaagatgttccttatgatgaagaaacagacgcaagaaacgaaatcaaagaataccttgacagtcggtatctttgtgacattgattcttgctggcgggtatttggatttgagatacatagacatacccagctgtggaaaggatgcatgttcatttaccaaatgaaaattacataacatataattcttatgctaacatggcagacatattgtcgcgaccatttcacagaaaaaccatgcttactgaatggtttactactaatcaaagatattttaatgctagagatcttacatattctcaattcccatcaaaatggaggtgggatgacaagaccaagacttggcatcctagacaagcaagagaagggaaaataggacgtctatactatgtgcatcccctagcaggcgacaaatattatcttagaatgcttttgttagttgtcaaaggtgcacgtagttacgaggaagttcgaacctacaacaatattgtgtatgatacattcaaggaagcagcaaagcacgtgggctccttggcgatgatcaagaatggttggctgctatgaatgaagctgcaacttgggcaacgtcttctctagggatggcagcgggtcagattttgtgcgggtataataatacccgacccaaaattgtactcgagacttctacaaatatccatacccaccaagccaatcggatgagaaactgtacccgtacccatgtccaccgggtatcaggtacccagtggatatattattgtagactaaataacattcagttagtgttataataaatgcataaaatattttaatttccatttaagcaccagtacaacacgagaatgactatatttggctacatgtctatacactatctcaactcataattatcgcatccaatagatttaaattcgagtacagagaataaaagcttaatgagttcatgacagttgacagtcataatattgtcaatgtctcattggtctctagtacattacagctgactgttaacacaacacaaattaatatttattaatcaacaacacatgcgccatgataaatttataaataaaaacagcatgcagcaaccagctctagtagcccatgacatggtgtatagttgcatcagcctgccgccagcaacaacagctcgtggtcatgcttgtgtccatggtgaagtagcagcaaccatcatgcaacaaaaccaggattgctgtgtatttttggctccattctattatggtccttaatttttagtggctgtagcacatttaaaaaggtatattgatatctcgtatatccactggataccccgagtaaaatattttactcatactcgacccgatatatttcgggtatccgacccgataggacccgcgggtgagttttttacccgtatccatatccatcgggtacgaaacccgcgggtatccatacccacgggtccaactgccctccctagtcttctcagctaagacaacttt

SEQ ID NO: 36669 - DNA, 1821 bp, Zea Mays
cgctaccactgtacgtgcctgctgaccgccgagcgccgagcaatcctttggagccggccgatcccggcgtggttcggtggtggcactctattaccgcaactgctgtctgtacctcagagctgagcagcagcgtggcaagtgccacctgctgcacggccatcgtctgcaactgcatcgctcgctctctcctttcactgggaacatctatcagctcgcgctcattggccatctttggcttccatggagaggctcattgccggcctacttggcttcctattggttgcatcggtaggaagccatgcagctcgtgctccggatcagtactggaagtctgctcttcccaacactcccatgccgacctccctctcccaactcctcgacgccgctccagccggcggcggcacgaccgtcaacgtcggctggggcggtgttcacgtcgatgctgggcacggtaagcccgggggtacgacggttgacgtaggcaagggcggcgtcggcgtcaacgttaaccctggcaggagcggcaagcccggcggcacgacggttggcgtcgggaagggcggagtcggcgttaacgtcaacccgggatacggaaagcccggcggcaccaccgttggcgtcggaaagggtggcgttggcgttaacgtcaaccccggcaagcccggtggcacaacggtcggcgtcggcaagggcggcgtgggcgtgggcgtcaatcccgggcacggcaagccgggcggcaccacggtcggcgttggcaagggcggggttggcgttcacgtgaacccgggaaagaagcccgtccacgtcaacgtctcccctttcatctacacgtacgccgcgtcggagacgcagctgcacgacgaccccagcgtggcgctcttcttccaggagacggacctccggcccggtaagaagatgaccgtccagttcgccagcaccgggacgaccggcaccaagttcctcccgcggagcgaggccgaggccatcccgttctcctcacagaaggtgcccgagatcctcgcccgcctctcggtggacccggactccgtcgaggcggcggagatggcgcagacgctgcgcgactgcgaggcgcccgcggccaagggcgagaagaaggcgtgcgccacgtcgctggagtccatggtggacttcgccaccgccagcctcgggaccaggcacgtgagggccgtgtcgaccgtcgtggcgaaggagggatcgccgaagcaggagtacacggtgaccggcgtggagcgcgctgccggcggcaccgacgacgacggccgggtcgtggcctgccacgcggagccgtacgcgtacgccgtgttcgcgtgccacctgacgccgcagacgcgggcgtactctgtgtcgatgctcggcagggacggcacggccgtggacgctgtcgcggtgtgccacgccgacacgtccggctggaaccccaagcacgtcgccttccaggtgctcaacgtgaagcccggcaccgtgccggtctgccacttcctgccgcaggaccacgtcgtctggacccgcagcggctgagtctgctggatggccgccgtttgctcgcgtcgcgccgcctggagtgatttgttatgttccagtggcctctaggcatactgtcatattattattataccgaggtatcacgagtttgcttatgtttccagtacttgatgcttgtatggatatggtgtagccagctcagcaagtatcaacccacctgcttaattctgttgtatagttttaaataaacagacaacctctttatggttactgctctcagcctaggaatatctggtgtgtacatgttctttatctcag

SEQ ID NO: 36670 - DNA, 1198 bp, Zea Mays
ctgagtctcatttggacagagatctctgtgcacaggctgtaggttgtccaccaacaagacatgacatcattagcgatccaaagaaaacaaacctgaaatcagacatccaggagggatcattgttgccataaggttgattttggtcgaggtcgaatatgagtttgtgggcgtgaagcagctccaacagacattgaacctccacaatcttggcgaatcacatctatagtgacgtttcatgaagtcttacacctctttacctgtgcctacatcgatccatccccaggaatgccgctggaacatatggcgcgcgggtcaggatgcggagcgcgacaagccatcgattagggagtgcgaaaagccgtcgggtcaagacgtcggtgggtcggggagagggaggtggtcgggctagtgctgggtgggtgcagagggaggtgtttcggcgagaagctattttttacagtcaatcctatacctagaaaaaaactgcgagaggcttcgtccaaaaaaaaacctatgaggaggcagatgcaatgtttcagcggcgccggcgcatggggcggagggtctgtctgaacggcgaccggtgtcctccttcctgtccagacgcgaatcggatcatggcgcccccctgccagtctgccacctcaggcacactcagctgtcggtgtggtggcatgcctcggtatgctgacttcggctcttctcaacccttctgcctcgaggcctgcatctcctcgactcgtcgccgatctcctgtgatcctgtctcgacctcggccctccactgaatattcaagacatggaggattacccagccataggtttcacttatctgggggagtttgatgatggcaagataagctgcagaaagcttctagatgggcataatcgatatcgctagtgcaggaagccacaaccagataccatggcttttgcaagatttatcatctgccgacatggtcttcttctttttaccattttccatgttttcccagtctatagttttttaatagatcttcagagttatgaaagtgtaaacagatatatgcatagaaccggccataccaccatgctccggacccgcatagaaccggccataccaggctcggatcgggtccaaacagcggcttcgtgtcagactcgtggggctcgtgcttattggccatctatactccaatagaacttgtgctgctaataag

SEQ ID NO: 36671 - DNA, 1481 bp, Zea Mays
caaggacaatcgcggacgtctcacgcccagcaatctcccttctggtcccacccaatccacttcgcaagccccgccgcacacttcttccccctgcctccaaaaactcagaaaaccctgaccgccggcggcggccatgcttctccaccaccgcctcctccctcgcctacttcttgttccttccacacatacctccacactcctctgcccctcccgtttgccgcgccgcctctccctctcgccacgcttctacgcgctgccccacctcgcggcaccccagaccgtcgaccactccgacgatgagggggcaccccagggggaggggcagatcaagctcccgctcgaccatctcttcgtgccgcccggggcaacaatggatgcgggggaccaggaggccgtgagcgcacgggtgcttaagggctccaacatcgtgctgggcccatacgcgcgcggcgacgcacaggtggtcaacgcagattttgtaaagagcagcgtgcgtcccgatgactgccctcgggacggccttccggagtttgcactcgttggccggtccaacgtcggcaaatcgtcgctgctcaactcgcttgtccgccgcaagcgccttgcccttacctccaagaagcctgggaagacccaatgtatcaatcatttcaaagtaaatgacagctggtatcttgttgacttgcctggttatggatgcaagtatacctgccaagaagattgatcttgactatgctagttggcttggccaaaacaaggttcccatgacccttgtgttcacaaaatgtgacaagcgcaagaagaagaagaacggcggcaggaaacctgaagaaaacgtggaaactttccagggcctaatccgcgaatacttcgaggccgcgcctccttggatcatgacgagcagcgtgaccaaccagggccgcgacgagatactcctgcacatgtctcagcttaggaattattggctcaagcattgagatgcaatgataaccaaaccagggcgaagcaactagaacagcatgcaaagcactgtcgtccattgatgcatggacattcagcagtcggcgcctccgcaatcaggcgttcgcaccaactaatccagccttttgagctgttgactgtccaatatggccccctgtacatgattacccaatcaacactctggggatgcggacaaggtgctaaaatcagctgatcatggtttttttctttatttctattgtgtacacgtacaatcccaaccaacgttttccccttgttcccatctgattataggcttgtgtatactgtggggttaaatgattaataaattctggtgttagctaatcaccagcgggaatctcacttttttgtctgccacctatatcatatgctcccttggaccctgcagcatacaaatggcaggaggtgcatgaacctgacctgttaagaactggctttgtggtgtacagaatgtattgagagcgccacattattgggatccc

SEQ ID NO: 36672 - DNA, 1541 bp, Zea Mays
caaggacaatcgcggacgtctcacgcccagcaatctcccttctggtcccacccaatccacttcgcaagccccgccgcacacttcttccccctgcctccaaaaactcagaaaaccctgaccgccggcggcggccatgcttctccaccaccgcctcctccctcgcctacttcttgttccttccacacatacctccacactcctctgcccctcccgtttgccgcgccgcctctccctctcgccacgcttctacgcgctgccccacctcgcggcaccccagaccgtcgaccactccgacgatgagggggcaccccagggggaggggcagatcaagctcccgctcgaccatctcttcgtgccgcccggggcaacaatggatgcgggggaccaggaggccgtgagcgcacgggtgcttaagggctccaacatcgtgctgggcccatacgcgcgcggcgacgcacaggtggtcaacgcagattttgtaaagagcagcgtgcgtcccgatgactgccctcgggacggccttccggagtttgcactcgttggccggtccaacgtcggcaaatcgtcgctgctcaactcgcttgtccgccgcaagcgccttgcccttacctccaagaagcctgggaagacccaatgtatcaatcatttcaaaatatgcttctgcaccacaggaagctcgtaccaattgggatgaatttactagaaattactttctcagtcgggagaatttggtatctgtttttcttcttatagatgcaagtatacctgccaagaagattgatcttgactatgctagttggcttggccaaaacaaggttcccatgacccttgtgttcacaaaatgtgacaagcgcaagaagaagaagaacggcggcaggaaacctgaagaaaacgtggaaactttccagggcctaatccgcgaatacttcgaggccgcgcctccttggatcatgacgagcagcgtgaccaaccagggccgcgacgagatactcctgcacatgtctcagcttaggaattattggctcaagcattgagatgcaatgataaccaaaccagggcgaagcaactagaacagcatgcaaagcactgtcgtccattgatgcatggacattcagcagtcggcgcctccgcaatcaggcgttcgcaccaactaatccagccttttgagctgttgactgtccaatatggccccctgtacatgattacccaatcaacactctggggatgcggacaaggtgctaaaatcagctgatcatggtttttttctttatttctattgtgtacacgtacaatcccaaccaacgttttccccttgttcccatctgattataggcttgtgtatactgtggggttaaatgattaataaattctggtgttagctaatcaccagcgggaatctcacttttttgtctgccacctatatcatatgctcccttggaccctgcagcatacaaatggcaggaggtgcatgaacctgacctgttaagaactggctttgtggtgtacagaatgtattgagagcgccacattattgggatccc

SEQ ID NO: 36673 - DNA, 1676 bp, Zea Mays
caaggacaatcgcggacgtctcacgcccagcaatctcccttctggtcccacccaatccacttcgcaagccccgccgcacacttcttccccctgcctccaaaaactcagaaaaccctgaccgccggcggcggccatgcttctccaccaccgcctcctccctcgcctacttcttgttccttccacacatacctccacactcctctgcccctcccgtttgccgcgccgcctctccctctcgccacgcttctacgcgctgccccacctcgcggcaccccagaccgtcgaccactccgacgatgagggggcaccccagggggaggggcagatcaagctcccgctcgaccatctcttcgtgccgcccggggcaacaatggatgcgggggaccaggaggccgtgagcgcacgggtgcttaagggctccaacatcgtgctgggcccatacgcgcgcggcgacgcacaggtggtcaacgcagattttgtaaagagcagcgtgcgtcccgatgactgccctcgggacggccttccggagtttgcactcgttggccggtccaacgtcggcaaatcgtcgctgctcaactcgcttgtccgccgcaagcgccttgcccttacctccaagaagcctgggaagacccaatgtatcaatcatttcaaagtaaatgacagctggtatcttgttgacttgcctggttatggagggggagagcagagcgttgctactgcaaatattactggaatggatctggcaacaaagtccaacacatggtctgtccaagaaactagtaagaatatatgcttctgcaccacaggaagctcgtaccaattgggatgaatttactagaaattactttctcagtcgggagaatttggtatctgtttttcttcttatagatgcaagtatacctgccaagaagattgatcttgactatgctagttggcttggccaaaacaaggttcccatgacccttgtgttcacaaaatgtgacaagcgcaagaagaagaagaacggcggcaggaaacctgaagaaaacgtggaaactttccagggcctaatccgcgaatacttcgaggccgcgcctccttggatcatgacgagcagcgtgaccaaccagggccgcgacgagatactcctgcacatgtctcagcttaggaattattggctcaagcattgagatgcaatgataaccaaaccagggcgaagcaactagaacagcatgcaaagcactgtcgtccattgatgcatggacattcagcagtcggcgcctccgcaatcaggcgttcgcaccaactaatccagccttttgagctgttgactgtccaatatggccccctgtacatgattacccaatcaacactctggggatgcggacaaggtgctaaaatcagctgatcatggtttttttctttatttctattgtgtacacgtacaatcccaaccaacgttttccccttgttcccatctgattataggcttgtgtatactgtggggttaaatgattaataaattctggtgttagctaatcaccagcgggaatctcacttttttgtctgccacctatatcatatgctcccttggaccctgcagcatacaaatggcaggaggtgcatgaacctgacctgttaagaactggctttgtggtgtacagaatgtattgagagcgccacattattgggatccc

SEQ ID NO: 36674 - DNA, 2099 bp, Zea Mays
caaggacaatcgcggacgtctcacgcccagcaatctcccttctggtcccacccaatccacttcgcaagccccgccgcacacttcttccccctgcctccaaaaactcagaaaaccctgaccgccggcggcggccatgcttctccaccaccgcctcctccctcgcctacttcttgttccttccacacatacctccacactcctctgcccctcccgtttgccgcgccgcctctccctctcgccacgcttctacgcgctgccccacctcgcggcaccccagaccgtcgaccactccgacgatgagggggcaccccagggggaggggcagatcaagctcccgctcgaccatctcttcgtgccgcccggggcaacaatggatgcgggggaccaggaggccgtgagcgcacgggtgcttaagggctccaacatcgtgctgggcccatacgcgcgcggcgacgcacaggtggtcaacgcagattttgtaaagagcagcgtgcgtcccgatgactgccctcgggacggccttccggagtttgcactcgttggccggtccaacgtcggcaaatcgtcgctgctcaactcgcttgtccgccgcaagcgccttgcccttacctccaagaagcctgggaagacccaatgtatcaatcatttcaaagtaaatgacagctggtatcttgttgacttgcctggttatggagggggagagcagagcgttgctactgcaaatattactggaatggatctggcaacaaagtccaacacatggtctgtccaagaaactagtaagaatgtaagaaagagtattttattggataaacttatgaagcatatggcatcgctactatatgcatgaaggagatacggtttgatacttcaatatacatgtgaaaaaccaccatgtcatctaattggtgtttgtgagttcaaaagtttgttttacagactcacaatattgactaagaatgtgtatgcctaatatttttacgtattctacttcgatctatatctgaaaaactctacgtcactgcatgatcttggacttttctctgggaaaattaatcagactacttgttatttgtcatgattcatgtatataacaatgagacatgaattcacagaaatagaaaataaattcgcatcctattatttggaggacatattagttgaaatatttattcgttttcttgcaataacaagagcttttattggacagatatgcttctgcaccacaggaagctcgtaccaattgggatgaatttactagaaattactttctcagtcgggagaatttggtatctgtttttcttcttatagatgcaagtatacctgccaagaagattgatcttgactatgctagttggcttggccaaaacaaggttcccatgacccttgtgttcacaaaatgtgacaagcgcaagaagaagaagaacggcggcaggaaacctgaagaaaacgtggaaactttccagggcctaatccgcgaatacttcgaggccgcgcctccttggatcatgacgagcagcgtgaccaaccagggccgcgacgagatactcctgcacatgtctcagcttaggaattattggctcaagcattgagatgcaatgataaccaaaccagggcgaagcaactagaacagcatgcaaagcactgtcgtccattgatgcatggacattcagcagtcggcgcctccgcaatcaggcgttcgcaccaactaatccagccttttgagctgttgactgtccaatatggccccctgtacatgattacccaatcaacactctggggatgcggacaaggtgctaaaatcagctgatcatggtttttttctttatttctattgtgtacacgtacaatcccaaccaacgttttccccttgttcccatctgattataggcttgtgtatactgtggggttaaatgattaataaattctggtgttagctaatcaccagcgggaatctcacttttttgtctgccacctatatcatatgctcccttggaccctgcagcatacaaatggcaggaggtgcatgaacctgacctgttaagaactggctttgtggtgtacagaatgtattgagagcgccacattattgggatccc

SEQ ID NO: 36675 - DNA, 3411 bp, Zea Mays
gttatatatgtgagtttttactggcgttatatacgagtttgggatagcaaaggatggcaaaatagccccagtctgtcattccctctccacgccacacgcacggctccatccttctatctgcgctcgcgccgcccgggagctcgccgtcgtcacctcgtcggggcgccctcgtccagtccggctctcccttcgtcgctccgcggctctgccggcgtctggggccccggtctccgggctttggtggcgccccccaccggcccaccccagcgggcagcggcaactgccactctgcggctctgctaggggcagggaggagcagtggcgactctgctagggacagggaggagcagtggcgggcagcgtccttccttttgtttggcccggggcttcggaattacctggatccgccactgcatctaagtcctcctccgcacactctccaccgatcctcgacgcgcgcgtgagcaacaccaccgtggtatcggcgaccacgagcggcgccttttggattcgcccgtgacttgctcccaccgtgtttgccactcgccaggatgacgctgttgttggcccaacagctactttccttctccttcgcctttccacctctccgcgccctccaccttggcagcccccttaaagcctatccgtcctccaaatgcttcgtctactctcattgcccttcccaattccaaacctggtggcctcgaagtcgcccagccgcccatcctgcgcatagtttctttgaagaacaagaaagcgaaggcagcgactatggggatgaggcggtgggctgcttgggcgaacctgccacacacggcacctgggaggatacggatgacgagggcagctggttgggcccgactcgatgcggcgcctcggaggatgaagacgaggactgtggtgaggaggtgggccactgggacccgcctgtcagccgctttcgaccgcagcgcgaggaaccataccaagcagaagaggacgacgatgaagaatgcgagtggttggacccgacctcctttttgcgatgccaagaagtggtaagcggtgtttgcagcaccacggcagccatggacgaaatcctagcctttgcgaggtgctcagctgcggcgggggaacaaggattcgccgagttcatggccggatacagccacgggaacctcagcgaggaggagtgcattgaattaatgtggaggatgtccaacgaggggcttgcgttgggctgtgcacacctgttccagtggctgcgggagaagcagccggtgccagtatcatcaatgatatgatggtgcttgggaaatttttgagctaatggagaagaacaatgttcaacctgatcacggaacatccgctatcatgcttaatattatgaagaagagtaaggtatctgccaaggatgcatgggagtttttcaaacgtatgaacagaaaaggagtcaactggagctttgatgttggtgcagctttaatcaatatcttttgttctgatgggctaaaaaaagaagctctaatcatccagtcagaaatggagaagagaggtattgcatcaaacacaagcatatatgaaacactgatgaaggcatactgtaaatccaaccaaattgaagaagctgaggggctctttgttgagatgaaagaaaaaagtttgcaagcaacaactacaacttacaatatccttatggatgcttacagtagacgattgcagacagaagtagttgaatccttacttctcgagatgcaagatttaggtataagaccgagtgctagatcatacaattgtctcataagcgcctatgggcgccagaagaaaatgagtggaaaggctgaaaatgctttcttgaggatgaagagggatggtattaagccattatcttcttcatataatgcactactttttgcatatgcagctaatggattgcatgaaaaagctcatgccatatacatggatatgaaaagagaaggacttaaacctaccttagaaacatatacagctttacttgacactcttaggagagcaggtgacacagagaagctaatggagacatggaaaactatggttgatgaaaagtttggtggaacacgagtcatattccatatggtaattgattgtttagcaaaacatgggctgtatcttcaggttagggatgttatatatgagtttggaaagatgggcttaaagcctactgtcatgacatataatattttgatgaatgcttatggaagaggtggacaacattacaaattgccccaactcctgaaagagatgacagccctggaactcaaaccagactccattacatattgtacaatgatatatgcatatgcccgtgtccgtgacttctcgagggccttctattaccacaagcagatggttcgaaatgggcaaatacctgatcctaggtcatataaaaagttgttgaatactttggatgtgaaggctgcaagaaagaatataaaggataagagtgccatacaaggaataattaagggcaagtctggcttaaaacctaggaaggaaaagaaagatgagttttggaagaacagaaaaaaacagtctatgctgaaccatggacaccagagaaaagaatttttgtgaagtttatcttatgtgtacattaaattgtgttcaagatttacatcctgtttcatggtcccctggattttcactgttgaaacgttcaagattgagactaaagggttatatacatatgttttagttttctgttctcagtagcctcaatctactttaatgttttgcctttcaacatgatcaactctaaaaactcaaataaatgaacttcatctgtttgttattctttattattttttctcctgtgttctctcccggcaagtatggttcgacatcctcaggatttttggcctgcagcacctctccccccagtgcaacagttcctttgatgaatggtgggaaggaacaaacaaggagattgctggatcaatgcacaaaagactcaattccataatcattttgggagcttgggccatttggaaacaccgcaatcgctgtgttttcagtggtattaatcctaacataactgaggtcttctgtccggtcaaggatgagattaacctttggacttttgctggagcccgttgtgtgtctaacatcctggcgctccaacagtccaatgagcgatttcctttgggtccagttggtcaagggtctagttttttttctatggaatctgatcaagtcttgttgggtcgtgtggtgttgtctgaggttttattagaccccttcatacgtattcaggtatggtgtggtcgtgtattcaggtatggtgtggtcgtgtgtagttgtatgaggttttctttagacctttttttattcttcttcttaatataatgatgtgtagctcttctgtatattcgagaaaaaatattctttatcttt

SEQ ID NO: 36676 - DNA, 2192 bp, Zea Mays
cggaacatcgcggcgccgccggcgaacaccgcctgcctggattagcttcaccgtcgcgatatgatggtgcttgggaaatttttgagctaatggagaagaacaatgttcaacctgatcacggaacatccgctatcatgcttaatattatgaagaagagtaaggtatctgccaaggatgcatgggagtttttcaaacgtatgaacagaaaaggagtcaactggagctttgatgttggtgcagctttaatcaatatcttttgttctgatgggctaaaaaaagaagctctaatcatccagtcagaaatggagaagagaggtattgcatcaaacacaagcatatatgaaacactgatgaaggcatactgtaaatccaaccaaattgaagaagctgaggggctctttgttgagatgaaagaaaaaagtttgcaagcaacaactacaacttacaatatccttatggatgcttacagtagacgattgcagacagaagtagttgaatccttacttctcgagatgcaagatttaggtataagaccgagtgctagatcatacaattgtctcataagcgcctatgggcgccagaagaaaatgagtggaaaggctgaaaatgctttcttgaggatgaagagggatggtattaagccattatcttcttcatataatgcactactttttgcatatgcagctaatggattgcatgaaaaagctcatgccatatacatggatatgaaaagagaaggacttaaacctaccttagaaacatatacagctttacttgacactcttaggagagcaggtgacacagagaagctaatggagacatggaaaactatggttgatgaaaagtttggtggaacacgagtcatattccatatggtaattgattgtttagcaaaacatgggctgtatcttcaggttagggatgttatatatgagtttggaaagatgggcttaaagcctactgtcatgacatataatattttgatgaatgcttatggaagaggtggacaacattacaaattgccccaactcctgaaagagatgacagccctggaactcaaaccagactccattacatattgtacaatgatatatgcatatgcccgtgtccgtgacttctcgagggccttctattaccacaagcagatggttcgaaatgggcaaatacctgatcctaggtcatataaaaagttgttgaatactttggatgtgaaggctgcaagaaagaatataaaggataagagtgccatacaaggaataattaagggcaagtctggcttaaaacctaggaaggaaaagaaagatgagttttggaagaacagaaaaaaacagtctatgctgaaccatggacaccagagaaaagaatttttgtgaagtttatcttatgtgtacattaaattgtgttcaagatttacatcctgtttcatggtcccctggattttcactgttgaaacgttcaagattgagactaaagggttatatacatatgttttagttttctgttctcagtagcctcaatctactttaatgttttgcctttcaacatgatcaactctaaaaactcaaataaatgaacttcatctgtttgttattctttattattttttctcctgtgttctctcccggcaagtatggttcgacatcctcaggatttttggcctgcagcacctctccccccagtgcaacagttcctttgatgaatggtgggaaggaacaaacaaggagattgctggatcaatgcacaaaagactcaattccataatcattttgggagcttgggccatttggaaacaccgcaatcgctgtgttttcagtggtattaatcctaacataactgaggtcttctgtccggtcaaggatgagattaacctttggacttttgctggagcccgttgtgtgtctaacatcctggcgctccaacagtccaatgagcgatttcctttgggtccagttggtcaagggtctagttttttttctatggaatctgatcaagtcttgttgggtcgtgtggtgttgtctgaggttttattagaccccttcatacgtattcaggtatggtgtggtcgtgtattcaggtatggtgtggtcgtgtgtagttgtatgaggttttctttagacctttttttattcttcttcttaatataatgatgtgtagctcttctgtatattcgagaaaaaatattctttatcttt

SEQ ID NO: 36677 - DNA, 2175 bp, Zea Mays
gcaccgctgattctccgtctcactgtggccaggcaagcaagatatgatggtgcttgggaaatttttgagctaatggagaagaacaatgttcaacctgatcacggaacatccgctatcatgcttaatattatgaagaagagtaaggtatctgccaaggatgcatgggagtttttcaaacgtatgaacagaaaaggagtcaactggagctttgatgttggtgcagctttaatcaatatcttttgttctgatgggctaaaaaaagaagctctaatcatccagtcagaaatggagaagagaggtattgcatcaaacacaagcatatatgaaacactgatgaaggcatactgtaaatccaaccaaattgaagaagctgaggggctctttgttgagatgaaagaaaaaagtttgcaagcaacaactacaacttacaatatccttatggatgcttacagtagacgattgcagacagaagtagttgaatccttacttctcgagatgcaagatttaggtataagaccgagtgctagatcatacaattgtctcataagcgcctatgggcgccagaagaaaatgagtggaaaggctgaaaatgctttcttgaggatgaagagggatggtattaagccattatcttcttcatataatgcactactttttgcatatgcagctaatggattgcatgaaaaagctcatgccatatacatggatatgaaaagagaaggacttaaacctaccttagaaacatatacagctttacttgacactcttaggagagcaggtgacacagagaagctaatggagacatggaaaactatggttgatgaaaagtttggtggaacacgagtcatattccatatggtaattgattgtttagcaaaacatgggctgtatcttcaggttagggatgttatatatgagtttggaaagatgggcttaaagcctactgtcatgacatataatattttgatgaatgcttatggaagaggtggacaacattacaaattgccccaactcctgaaagagatgacagccctggaactcaaaccagactccattacatattgtacaatgatatatgcatatgcccgtgtccgtgacttctcgagggccttctattaccacaagcagatggttcgaaatgggcaaatacctgatcctaggtcatataaaaagttgttgaatactttggatgtgaaggctgcaagaaagaatataaaggataagagtgccatacaaggaataattaagggcaagtctggcttaaaacctaggaaggaaaagaaagatgagttttggaagaacagaaaaaaacagtctatgctgaaccatggacaccagagaaaagaatttttgtgaagtttatcttatgtgtacattaaattgtgttcaagatttacatcctgtttcatggtcccctggattttcactgttgaaacgttcaagattgagactaaagggttatatacatatgttttagttttctgttctcagtagcctcaatctactttaatgttttgcctttcaacatgatcaactctaaaaactcaaataaatgaacttcatctgtttgttattctttattattttttctcctgtgttctctcccggcaagtatggttcgacatcctcaggatttttggcctgcagcacctctccccccagtgcaacagttcctttgatgaatggtgggaaggaacaaacaaggagattgctggatcaatgcacaaaagactcaattccataatcattttgggagcttgggccatttggaaacaccgcaatcgctgtgttttcagtggtattaatcctaacataactgaggtcttctgtccggtcaaggatgagattaacctttggacttttgctggagcccgttgtgtgtctaacatcctggcgctccaacagtccaatgagcgatttcctttgggtccagttggtcaagggtctagttttttttctatggaatctgatcaagtcttgttgggtcgtgtggtgttgtctgaggttttattagaccccttcatacgtattcaggtatggtgtggtcgtgtattcaggtatggtgtggtcgtgtgtagttgtatgaggttttctttagacctttttttattcttcttcttaatataatgatgtgtagctcttctgtatattcgagaaaaaatattctttatcttt

SEQ ID NO: 36678 - DNA, 949 bp, Zea Mays
gcggtctggaggcttgctggcagcggcggcgcggcggcctgcccgacgtttgaaccggcggggcgggcggcggccgggcttcggatgggggttctcggctagctggtccaggagcgtcttgagcgccccggcgctgcggcgggacttggcggggagatcggcgtcgtcgtcgtcgtcgtcgtcggtgccatcgtcggggtcggccgccaccctggacgactcgacggagcggcgcgtggacgggtcccggagcgatcgcgagcgctgcagcgcgagaaggtcgcgcatcagcgacgcggacgccgggctccgcctccggcccgacgacgacgcgcctcccgctcccgcgtgcgcgtgcgcgtggtggtggcgcaggtggatgcagttggtgaggtgcgcgtggccgcggaagtggcccccggcaccgccccccgccgtggcacggtcgggagcgggcattgcgaggcggcacggcgcgcgtctttcccagtgccactctaccttgccctcactgaggcgcgacgcgaggggaaagaaaagagacacccgcctccgctaggccatttgaggagggaaccaggggggaaagccggccctgggccgccggttggcgtgtgtgattatggcggtgtggttcggagatttcgcctttttcgttggatcctggagggtttcacgggaagagcgacggaggtagggggagggcgagtcaagttgggtgaccggagtgggtgtgggtgcctccgcctcgtgccgggtgtgggagcgggcggtgctttcggggggctcgcgagttgcgtccaacggcccaaggcgtcggagtttttttttttttttggacagctaaaatcagaatctagcacatcataatattattgaagttccaaaatcatgccaacgtgatgtccgtataataatgtgatccacataattacattggaccccacgt

SEQ ID NO: 36679 - DNA, 1434 bp, Zea Mays
cactagaatgatctgacagtttaattcacagggtactgtaaatatgtcggcaacatacaattccaggagtcaagacatcgagagttctgttgttgcacatggagacctctggaggctagaggcatcgcgtggtggatcaacttctggaaatggcacttcgcctctgtaccttgttcagttggggcctctactttttgttcgagactctacacttctgttgcctgttcatctatcaaagcaacacctgctttggtacggttatgatcgcaagaatggtgtccattcactctgtccagctatatggtcaaaacataggagatggttgatgatgtcaatgatgtgtctcaatccaatagcttgttcgtttatggatttgcaattccctaatgggcaactaacatatgttgctggtgaggggatatcagccagtggttttcttccgttatttggtgggttgcttcaagctcaaggaaaatatcctggagaaacaagagtgagcttttcttgcaaggagttactcaagccttggcatggaaaagatctggtcttatggtgagacccagtatacaagtcagtgtgtgccctacgtttggaggaagtgatcctggggtacgggcagaagttgtccattcattgaaagaggaattgaatctgatgtgtggcctctcttgctcgcggcatccatcagcttatactgctctatctattggacgatcaaagtggaacggtcaagtgggcagttctggagtggtaatcaccttggaaacacctcttaataacattggaaggccgtcgttatctgttcaactgaatggtggttttgagttgtgattcttcagactccagcgctgaagctgtacataccagtgtgtatatattgccatcaccaatgttcgtgctccatagtttgtggaagtgggctgcagcctgccggcttgcaggtcgtttttgttactgtagtctataggtagtctcaactcagcaaatcagctgccatggtacccaacccatgcgggcacagaagtcaactactttgttgttcaatcattatgacaatccttaggtcttatttggatactctcgtattcacattaatctcacatttattgaagtgaaatttaaattaatttacactccaatcaacttcaatacatatggattgaagtcaatacgagagtatcgaaatacggccttaagggattgtgacgcttgcagcaggtgagctcatattagaagttcgtgaaagtggaggaccacgtaatcatgcaagttgttcatccagaatcacattcttttggtgcaggactggcaggttgggatgtaaacggacggatgatcttgttttaacattataactcggacacgcaaaatgataaaaacgaactaatatgaaaaaatacgtgggtaacggtaaaaaggataacaaagctacaa

SEQ ID NO: 36680 - DNA, 2359 bp, Zea Mays
cgcgggcagccaaagcggcgcgggcccagccgggtcaggccacgtggcggaagcggtgcgggcgatcttcttgtccgcgtccatccacgtcgaccccgtcaaggccggattcttttatcctcctcctccccgcccctgatcgatccctccccgacatcaaccggcgcagcgcgaccatccccagccactattattattaccatcatcatcacctacccgctgcctccatcctcctcctcgcccctgttcctcgcgtcttcccgtcgtctccgactcgcttccagttcccgatttgccgaacgccagcgacgccgtcgcatggagatctccttcgaggcgtgggagggcgtgcagcggcacggccaggacctcgcggaccgcctcgcgcagggcttcacgggcctgctccaggcgccgccgcagttcccgtggccgccggcgccgcacaagcggatgcccttcgacatcgacctccccgtcgtccccttcggcgccggcgtgccgaaaaaggacctccccttcccggccgccgccgccgccgtctcctcggtcatcgacatcggaggcaggctaggccaggccggcgccgagcttggggcgtccgtaggcggggccgtgcagcacgccgtgcgccatctgcccgtgccgttccgcaacgcccagatccggcgccgcacgctaccgccggcgccgcctcaggcgcccctgccgcccgcgacttcggtgggcgagggcgcggcagggcgctccgtcgaaagggctgctgtagataggtgccccctcgaggcggcggccgccgccgccgctgcggccactgggagcgcggctgcgtcgagcgtcagcggccatgttagcggggacgatttggacgaggacgacgaaggcttcggctgcgggtactgtaaatatgtcggcaacatacaattccaggagtcaagacatcgagagttctgttgttgcacatggagacctctggaggctagaggcatcgcgtggtggatcaacttctggaaatggcacttcgcctctgtaccttgttcagttggggcctctactttttgttcgagactctacacttctgttgcctgttcatctatcaaagcaacacctgctttggtacggttatgatcgcaagaatggtgtccattcactctgtccagctatatggtcaaaacataggagatggttgatgatgtcaatgatgtgtctcaatccaatagcttgttcgtttatggatttgcaattccctaatgggcaactaacatatgttgctggtgaggggatatcagccagtggttttcttccgttatttggtgggttgcttcaagctcaaggaaaatatcctggagaaacaagagtgagcttttcttgcaagaataagcgtggcacaaggtttactcctatgtttcaatggcctgacaagtctgtttcgttaggagttactcaagccttggcatggaaaagatctggtcttatggtgagacccagtatacaagtcagtgtgtgccctacgtttggaggaagtgatcctggggtacgggcagaagttgtccattcattgaaagaggaattgaatctgatgtgtggcctctcttgctcgcggcatccatcagcttatactgctctatctattggacgatcaaagtggaacggtcaagtgggcagttctggagtggtaatcaccttggaaacacctcttaataacattggaaggccgtcgttatctgttcaactgaatggtggttttgagttgtgattcttcagactccagcgctgaagctgtacataccagtgtgtatatattgccatcaccaatgttcgtgctccatagtttgtggaagtgggctgcagcctgccggcttgcaggtcgtttttgttactgtagtctataggtagtctcaactcagcaaatcagctgccatggtacccaacccatgcgggcacagaagtcaactactttgttgttcaatcattatgacaatccttaggtcttatttggatactctcgtattcacattaatctcacatttattgaagtgaaatttaaattaatttacactccaatcaacttcaatacatatggattgaagtcaatacgagagtatcgaaatacggccttaagggattgtgacgcttgcagcaggtgagctcatattagaagttcgtgaaagtggaggaccacgtaatcatgcaagttgttcatccagaatcacattcttttggtgcaggactggcaggttgggatgtaaacggacggatgatcttgttttaacattataactcggacacgcaaaatgataaaaacgaactaatatgaaaaaatacgtgggtaacggtaaaaaggataacaaagctacaa

SEQ ID NO: 36681 - DNA, 2359 bp, Zea Mays
cgcgggcagccaaagcggcgcgggcccagccgggtcaggccacgtggcggaagcggtgcgggcgatcttcttgtccgcgtccatccacgtcgaccccgtcaaggccggattcttttatcctcctcctccccgcccctgatcgatccctccccgacatcaaccggcgcagcgcgaccatccccagccactattattattaccatcatcatcacctacccgctgcctccatcctcctcctcgcccctgttcctcgcgtcttcccgtcgtctccgactcgcttccagttcccgatttgccgaacgccagcgacgccgtcgcatggagatctccttcgaggcgtgggagggcgtgcagcggcacggccaggacctcgcggaccgcctcgcgcagggcttcacgggcctgctccaggcgccgccgcagttcccgtggccgccggcgccgcacaagcggatgcccttcgacatcgacctccccgtcgtccccttcggcgccggcgtgccgaaaaaggacctccccttcccggccgccgccgccgccgtctcctcggtcatcgacatcggaggcaggctaggccaggccggcgccgagcttggggcgtccgtaggcggggccgtgcagcacgccgtgcgccatctgcccgtgccgttccgcaacgcccagatccggcgccgcacgctaccgccggcgccgcctcaggcgcccctgccgcccgcgacttcggtgggcgagggcgcggcagggcgctccgtcgaaagggctgctgtagataggtgccccctcgaggcggcggccgccgccgccgctgcggccactgggagcgcggctgcgtcgagcgtcagcggccatgttagcggggacgatttggacgaggacgacgaaggcttcggctgcggtattgggactcttggaaactttaagaaggccaacgagtcaagacatcgagagttctgttgttgcacatggagacctctggaggctagaggcatcgcgtggtggatcaacttctggaaatggcacttcgcctctgtaccttgttcagttggggcctctactttttgttcgagactctacacttctgttgcctgttcatctatcaaagcaacacctgctttggtacggttatgatcgcaagaatggtgtccattcactctgtccagctatatggtcaaaacataggagatggttgatgatgtcaatgatgtgtctcaatccaatagcttgttcgtttatggatttgcaattccctaatgggcaactaacatatgttgctggtgaggggatatcagccagtggttttcttccgttatttggtgggttgcttcaagctcaaggaaaatatcctggagaaacaagagtgagcttttcttgcaagaataagcgtggcacaaggtttactcctatgtttcaatggcctgacaagtctgtttcgttaggagttactcaagccttggcatggaaaagatctggtcttatggtgagacccagtatacaagtcagtgtgtgccctacgtttggaggaagtgatcctggggtacgggcagaagttgtccattcattgaaagaggaattgaatctgatgtgtggcctctcttgctcgcggcatccatcagcttatactgctctatctattggacgatcaaagtggaacggtcaagtgggcagttctggagtggtaatcaccttggaaacacctcttaataacattggaaggccgtcgttatctgttcaactgaatggtggttttgagttgtgattcttcagactccagcgctgaagctgtacataccagtgtgtatatattgccatcaccaatgttcgtgctccatagtttgtggaagtgggctgcagcctgccggcttgcaggtcgtttttgttactgtagtctataggtagtctcaactcagcaaatcagctgccatggtacccaacccatgcgggcacagaagtcaactactttgttgttcaatcattatgacaatccttaggtcttatttggatactctcgtattcacattaatctcacatttattgaagtgaaatttaaattaatttacactccaatcaacttcaatacatatggattgaagtcaatacgagagtatcgaaatacggccttaagggattgtgacgcttgcagcaggtgagctcatattagaagttcgtgaaagtggaggaccacgtaatcatgcaagttgttcatccagaatcacattcttttggtgcaggactggcaggttgggatgtaaacggacggatgatcttgttttaacattataactcggacacgcaaaatgataaaaacgaactaatatgaaaaaatacgtgggtaacggtaaaaaggataacaaagctacaa

SEQ ID NO: 36682 - DNA, 2330 bp, Zea Mays
cgcgggcagccaaagcggcgcgggcccagccgggtcaggccacgtggcggaagcggtgcgggcgatcttcttgtccgcgtccatccacgtcgaccccgtcaaggccggattcttttatcctcctcctccccgcccctgatcgatccctccccgacatcaaccggcgcagcgcgaccatccccagccactattattattaccatcatcatcacctacccgctgcctccatcctcctcctcgcccctgttcctcgcgtcttcccgtcgtctccgactcgcttccagttcccgatttgccgaacgccagcgacgccgtcgcatggagatctccttcgaggcgtgggagggcgtgcagcggcacggccaggacctcgcggaccgcctcgcgcagggcttcacgggcctgctccaggcgccgccgcagttcccgtggccgccggcgccgcacaagcggatgcccttcgacatcgacctccccgtcgtccccttcggcgccggcgtgccgaaaaaggacctccccttcccggccgccgccgccgccgtctcctcggtcatcgacatcggaggcaggctaggccaggccggcgccgagcttggggcgtccgtaggcggggccgtgcagcacgccgtgcgccatctgcccgtgccgttccgcaacgcccagatccggcgccgcacgctaccgccggcgccgcctcaggcgcccctgccgcccgcgacttcggtgggcgagggcgcggcagggcgctccgtcgaaagggctgctgtagataggtgccccctcgaggcggcggccgccgccgccgctgcggccactgggagcgcggctgcgtcgagcgtcagcggccatgttagcggggacgatttggacgaggacgacgaaggcttcggctgcggtattgggactcttggaaactttaagaaggccaacggtactgtaaatatgtcggcaacatacaattccaggagtcaagacatcgagagttctgttgttgcacatggagacctctggaggctagaggcatcgcgtggtggatcaacttctggaaatggcacttcgcctctgtaccttgttcagttggggcctctactttttgttcgagactctacacttctgttgcctgttcatctatcaaagcaacacctgctttggtacggttatgatcgcaagaatggtgtccattcactctgtccagctatatggtcaaaacataggagatggttgatgatgtcaatgatgtgtctcaatccaatagcttgtccagtggttttcttccgttatttggtgggttgcttcaagctcaaggaaaatatcctggagaaacaagagtgagcttttcttgcaagaataagcgtggcacaaggtttactcctatgtttcaatggcctgacaagtctgtttcgttaggagttactcaagccttggcatggaaaagatctggtcttatggtgagacccagtatacaagtcagtgtgtgccctacgtttggaggaagtgatcctggggtacgggcagaagttgtccattcattgaaagaggaattgaatctgatgtgtggcctctcttgctcgcggcatccatcagcttatactgctctatctattggacgatcaaagtggaacggtcaagtgggcagttctggagtggtaatcaccttggaaacacctcttaataacattggaaggccgtcgttatctgttcaactgaatggtggttttgagttgtgattcttcagactccagcgctgaagctgtacataccagtgtgtatatattgccatcaccaatgttcgtgctccatagtttgtggaagtgggctgcagcctgccggcttgcaggtcgtttttgttactgtagtctataggtagtctcaactcagcaaatcagctgccatggtacccaacccatgcgggcacagaagtcaactactttgttgttcaatcattatgacaatccttaggtcttatttggatactctcgtattcacattaatctcacatttattgaagtgaaatttaaattaatttacactccaatcaacttcaatacatatggattgaagtcaatacgagagtatcgaaatacggccttaagggattgtgacgcttgcagcaggtgagctcatattagaagttcgtgaaagtggaggaccacgtaatcatgcaagttgttcatccagaatcacattcttttggtgcaggactggcaggttgggatgtaaacggacggatgatcttgttttaacattataactcggacacgcaaaatgataaaaacgaactaatatgaaaaaatacgtgggtaacggtaaaaaggataacaaagctacaa

SEQ ID NO: 36683 - DNA, 2386 bp, Zea Mays
gtaaagttgagttccgccaccgtcgtcggtaatcgggtccctcggctcggaccagggcatgcagcagggatgactgatgagggagcgcacatccactggcagcggaacgacatggccacgtttccgcaattgaatgcgcggcggctcccagagcttccgcttccaacttgagctcgatcggtgtggagcgcgcgcccggcccacgccggctggacactgcgctgcatgccacttatgtgcagtgcaggcggcgactgtgcgtgcactcgctacgctagctcctccatccctggattccctgcacactgcaccaccgcgctgccgccgtcctcgccctgctcctgctgcctatatatactgccgcgtgactcgcagggacggagcagacctagcaagtcggccagcacgctcgctcgctcgcagcagtcgctagccagacagcattggcgccggcccgcgcgtgcgcgccatggaggaggcgaggcaaaggcggcggctgtgcctgtgcctgctggtggcggccgtgagctgggcgctgctggcggcggtggcgcggtgcgacccgcaggtgccgtgctacttcatcttcggcgactcgctggtggacaacggcaacaacaactacatcgtgtcgctggcgcgcgccaactacccgccctacggcatcgacttcgccgccggcccgtcggggcgcttcaccaacggactcaccaccgtcgatgtcatcgctcaacttctgggtttcgacaacttcatcccgccgttcgccgcaacgagcgcggaccagctcctgggcggcgccaacttcgcctccgccgccgccggcatccgcgccgagaccggccagcagctgggcgggcggatcccgttcgcggggcaggtgcagaactaccagacggcggtgcagacgctggtgagcatcctgggcgaccaggacacggcgtcggaccacctgagccggtgcatcttcagcgtgggcatgggcagcaacgactacctcaacaactacttcatgccggccttctacaacacgggcagccggtacaccccggagcagttcgccgactcgctcatcgccgactaccgccgccacctgcgggtgctgtacaactacggcgcgcgcaaggtggtgatgatcggggtcggccaggtcgggtgcagccccaacgagctggcccgctacagcgccgacggcgtcacctgcgtcgaccgcatcgacgacgccatccagatgttcaaccgccgcctcgtcggcctcgtcgacgagttcaacgcgctcccaggcgcgcacttcaccttcatcaacgcatacaacatcttcgacgacatcctcgccaacgccgcctcctacgggttcacggtgaccaacgccgggtgctgcggggtgggcaggaacaacgggcaggtgacgtgcctgccgtaccaggcgccgtgcgccaacagggaccagcacatcttctgggacgccttccacccgtcggaggcggccaacatcatcgtcggccgccggtcctaccgcgccgagtcgcccaacgacgtctacccgatggacatcagcacgctcgcctccatctgattctgattctcatccctccataaatataaacataaaaatatatgatataatccacccaccactgcgcaaaggctgcaatattaaacagggctccaagaggaggtagccgtgcaattctttcctgtgtacaagctcgcgccttatctgtaatttttcatgctttcatacatttgcatcgggtacttagaaaatatccgatcgaatcactttttttttcgttttcaattctcatgcacacctgaattccgcgaaagattccacaagtacaccaccagatttgcagcttcattcaaaccatgctctctctctcatggccccatgccatcttttgattcttttcttgaagtgttggcaaggccagacgtaatgatcaaacaaacacgcacgcgtaccatgtctgcactgcacaaagtaatcacacgagccaggcatcaggctgcttcggttatccattcgcattgcttcgccttcaccccatctgaattctgaagccctatggactgaatcccttaagtcacagcgcacgctaagctgctatgccctcttggcttcctgttcagcctgcaccagtttcaaatgcttctccgtcagggaaacccaaaaaaaaaaaaaacaaggcgcgtagctaagacgacgaagaagaaagaactcacagctcggatgatcctgtcgagcgcgtcgggcccgtgcgtgtcgatgaagcgctcgacggacctgcgcgcgtcaaggctcgtcatctgcagcacccggcggtggcgctcgctgtagctggggctcacgtagctgccgatcttgaagtagcgccggacg

SEQ ID NO: 36684 - DNA, 1228 bp, Zea Mays
ggccctcagcgatctgcactttgcctagggaaagcccattggttcttggatagtgggccccgatcacgcctttacaaggcctgccaaagtgagcccaaaattgtcggggccgatcaaatcaaacccatcgcattaccacacaaggcctttctaagttcgacttaataataataatcacatacagtaaatcattcgatctccaccggcctcctccaatgaccgtagccggagccatccgccgccggcgagcaccgcggccccatctccctctcttcgtcctcgtcctacttttctctactctaaccccacgcacttcggcgctccgcgtcccgctccgccaggcagcaaccctcgtctccctctcccattcgctcctctcccgcgtcgccatcacacgtgctgctcgtggggacgccgcggcggccgcacgcgtacggcgaatcgcttccctgctgtcgtcccgtggtgcgtggggactcggctgggactacctccgccactacgccttctcctcagccaccggatgcggcctctcctgcgcagccgccgcttctcgtctcatcgccgctgccgcggaggcctcgcgcctacgttccgccactgacgctgcgcagtggatgcgcctacactacggcgacatccgcgacgccgccgcgcagctcctgaacgggcttctcctcgccttctccgaagaggggccattgagagaggtgttcatggatattaagtgggaggtggaggaaggggaattgctgaaggattgcctggaagtgggagctaaggacttaaagggtttgcttgtcattgccaaagacctcttcgctggtgtttcaaggacttctacgcagcatagcgagctctgagatgagtaatcacaattcacagaatgctaaccaaagcatggagaatagaaaaagaaaattcagaactttggctgtgtgctgcagtgttcatgaatgtatcagatcctactgtctcattggacccactccctaaacatcgaaactcctatgcttggtgatactgcctgatgcacagctgtctgtaagttaatatatcttaagatattcaacaagttttctttttaaagataggagaagagctacagaacatttattgatattcagacatgaaaataaatctattgtatcttgagtccaaagcttgtgtaatctgcatgcatattatattaattgatggcagagtaaaacagcatggcaactattcc

SEQ ID NO: 36685 - DNA, 376 bp, Zea Mays
taatctttggttcggaaagatgggcttcattaacttctacatatatgcttggggggaaaatgctgctccaacaaggccaaaccggtgctaacatatcttagctcagagacctctgcttcgaaaaaggatgacttcttagaacaaaaagcgccatagaagcaaggagcttggtttaagctgtaatttggatgaccgcgatgctaccaatactccatgatcactccattcaataaatatcataccagcaactacaaagtatcttttgctactatgtagtcatgtgtcaccaagatgtaaatatgtgacaaccatattttgttactatactttgataagcaacctacttagatgtaacaatgtgagaacacaatgtttg

SEQ ID NO: 36686 - DNA, 1616 bp, Zea Mays
cttatcagttcattcatgttttggtaaccctaaaccctggcagtcgtcgtgcttgcatgttaccaccttagttcaagcaatgtgctttcattcagctttccacagcgaaaggccgcattatatacgctgtcgaagatggaccggaaggtaaagtcgtcacggacgcgggcgctgctgaaccggcacctggcctcgctgggcgtccccaagagcgcgcactgcctcgcgctgcggctggccgaggagttcgcggtgaacgcggcggcgcgctcgcccgtgccgccgccggagcacgcaccgcgcctcaccgacgcctcgcgcctccacgtggcgctcgtgaccgacaacgtgctcgcggcggccgtcgcggtggcgtccgccgcgcggagcgccgccgacccggccaggctggtgctccacgtgctcacggacaggaagagctacgtgcccatgcactcgtggttcgcgctgcaccccgtggagcccgcggtcgtcgaggtcaggggcctgcaccagctcgcctggcgcgacgccggcgccgtcgcctccgtcatgcggacggtcgaggaggtccggaggagctcgctggattggtatcgacgacagtgcggtggtgggtcgtcggcggaggagaccaggcccagcgcgttctcgctcctcaactacctcaagatccatctcccggagctcttccctgagcttggcagggtggtgcttctggacgacgacgtcgtggtgcgcgaggacttggcagggctgtgggagcaggacctcgacgggaacgtcatcggcgcggtcggcgctcacgaaggcggcggcgtttgcgtcgacaagaccctcggcgaccacctgaatttctccgaccctgacgtgtccggctccggcccactacacagctcgcgatgcgcgtggtcgtggggcgtcaacgtcgtcgacctcgacgcgtggcgacggacgaacgtcaccgagacgtaccagttctggctacagaagaaccgggagtcgggcttcaggctgtggcagatggcctcgctgccgccggccctgctcgcgttcgacgggcgcgtccaggcgatcgacccgcggtggaacctgccgggcctgggctggcgcgtgccgcaccccgacctcgtgcggctctccgccgtcctgcacttcagcgggccacggaagccgtggctggaggtcgcgttcccggagctgcggcagctgtggctcgcccacttgaacgcgtcggacagtttcttacagggatgcggtgtggtcgaatggcagtagatggggtacggacgggaacagcagagcatcagagttgggaggagacgtacagtgatttggtccaggtccaggtccaggtcttcaggatcacggattttaactggggccgccgggagagggaagtaggtgttgcctgcagtctctcctggccttcgggttctacacgcagtccacatatccacattaatctgtacaactgctcgtggtttttcttaagccaatataacattaccacgtccaacgttcacaaacgaatgggtatagagcatttccaatatttatgtaaataactccctaaatatgaatttaataatttttcaagaaaaactcttctctaa

SEQ ID NO: 36687 - DNA, 2248 bp, Zea Mays
gtcggccgttcggtccggtgtctggtccgggcgccgtacttgcggttgcagtcttgacggttgccgacgcactggccgagagagactgtgcttcagctcttttcttttctttttttgacttctgccgttccaggcgatccatttgcattgcaacccacaacgtctaactaatcggattcatgggtcggggctcccagagagtcccacccagacccagttgatagatagattcgtgtgacctacactgccgcatcgcattatttctgcgcggaccctagaggagttggtggcttggaccggaccttgtgtgtccccaacccaacagctacggaaaccgaaggcagacagccctgagctgagagcgctgtgactcggtcgctaggaaggatggattcccctttctccctatgactcgtcagggggctgtgcgatccagctcggatgatggggccttgcgtttggaggatcatgcgagcgggcgtggtccgtgaggcatccatccatgcgactgactccctcctttgtgatttttcttctttctggcactctagatcgcgccgaacaacgctttgttttcatgtgcactggaatttatggaggaatggaggcgtcgcagcagggaagccaccctgctggaccctgtggtggtggaagcggcgccggactccatggacgcgctcttggcggagatggccaccatgctggcgtcctacgaccgggttgacgtggaagccgtggcgatcaagatgatggccatgctgtcgaagatggaccggaaggtaaagtcgtcacggacgcgggcgctgctgaaccggcacctggcctcgctgggcgtccccaagagcgcgcactgcctcgcgctgcggctggccgaggagttcgcggtgaacgcggcggcgcgctcgcccgtgccgccgccggagcacgcaccgcgcctcaccgacgcctcgcgcctccacgtggcgctcgtgaccgacaacgtgctcgcggcggccgtcgcggtggcgtccgccgcgcggagcgccgccgacccggccaggctggtgctccacgtgctcacggacaggaagagctacgtgcccatgcactcgtggttcgcgctgcaccccgtggagcccgcggtcgtcgaggtcaggggcctgcaccagctcgcctggcgcgacgccggcgccgtcgcctccgtcatgcggacggtcgaggaggtccggaggagctcgctggattggtatcgacgacagtgcggtggtgggtcgtcggcggaggagaccaggcccagcgcgttctcgctcctcaactacctcaagatccatctcccggagctcttccctgagcttggcagggtggtgcttctggacgacgacgtcgtggtgcgcgaggacttggcagggctgtgggagcaggacctcgacgggaacgtcatcggcgcggtcggcgctcacgaaggcggcggcgtttgcgtcgacaagaccctcggcgaccacctgaatttctccgaccctgacgtgtccggctccggcccactacacagctcgcgatgcgcgtggtcgtggggcgtcaacgtcgtcgacctcgacgcgtggcgacggacgaacgtcaccgagacgtaccagttctggctacagaagaaccgggagtcgggcttcaggctgtggcagatggcctcgctgccgccggccctgctcgcgttcgacgggcgcgtccaggcgatcgacccgcggtggaacctgccgggcctgggctggcgcgtgccgcaccccgacctcgtgcggctctccgccgtcctgcacttcagcgggccacggaagccgtggctggaggtcgcgttcccggagctgcggcagctgtggctcgcccacttgaacgcgtcggacagtttcttacagggatgcggtgtggtcgaatggcagtagatggggtacggacgggaacagcagagcatcagagttgggaggagacgtacagtgatttggtccaggtccaggtccaggtcttcaggatcacggattttaactggggccgccgggagagggaagtaggtgttgcctgcagtctctcctggccttcgggttctacacgcagtccacatatccacattaatctgtacaactgctcgtggtttttcttaagccaatataacattaccacgtccaacgttcacaaacgaatgggtatagagcatttccaatatttatgtaaataactccctaaatatgaatttaataatttttcaagaaaaactcttctctaa

SEQ ID NO: 36688 - DNA, 3458 bp, Zea Mays
tgccactgccagtgggtgtggcctgtgggcgtcgagtcaagacagtgtcgtcgtttcatctccgcggtcaggtttggtttgttgtctagtgcagcggtactgttcctgtagatgtagagcagcagttcgagccttcgagggcgagggagatggactggcctggtcgctgtgcgccctgtgcgggcttccgccccgaactggggcgggggcgggggcgggggcgaggtgttcgtgggtaagggtcgcgggcgttgtgcggctgggaggcggctaccgaggcgacggaaataaagcagtagtagacgagagagccacgatttataaagcgggttttgtgtgggtgtggctcgctgctcgcctctcctccactcctctcactgctcctcccacctcgcgtttgttcggcgggctcaggtggctgcttgctggccttgctgctgcttcagatccttatcccctccgctacatcgaggccgttcggagctgtcctttctgcttcggatgggagtggcggagcagtgcatggaggtgcggggcgcggcgaatcggaggtgatcccggtcatggggtagagtggagggggcggagtgtgtgtggtatggagccgtcccgtggcgccactggcggcgcgcggcggtggggggaggcggagaccgaggttgatgcggcggaggaagggagacgggcggaggacggcggcgaggtgagcctgcgggagtggctggaccggccgggccgggcggtggaggcggcggagtgcgtgcacgtgttcaggcaggtggcggaggcggtggccgtcgcgcacgcacagggggtggccgtgggcagcgcgcggccgtcgtgcttcgtcgtgtcgccgcccttcgcgcgcgtcgccttcatcgagtccgcctccggctccgacgcctcgggttcgtgctctggctccgacgcctccgaggacgccgacccggacgcctcgcctccgcggcgaggggacggcgccggacgcggcgaggagcgcgcggggaagtcgttcccgctcaagagcgtgctggccatggagctcaactggtacaccagtcccgaggaggcggacgacagcgccgctaccttcgcctctgacgtctatagactgggtgtgctcttgttcgagctgttctgcacattcgaaacaatggaggacaagatgcgggcaatggcgaatctgaggcaccgggtgttgccgccacagttgctgctcaaatggcccaaggaagcatctttctgccagttgctaatgcaccctgtgccagaaaccagaccgaagatgagtgaggtgctgcagagtgaattccttaatcagtcaaggaatagcctggaagaacgtgaagcggcacttaggttacgcgaagagatagaagaacaagaattattgctggattttcttcagcagttgcagaaaagaaagcaagatatggcagacagtttgcaggacactgttgctttttctctcttctgacatcaatgaggtactccaccagcagtctgcacttggccactgtgtgaacttctcaccagatttggataaagaggtgtgctctggaactgttgaagatcagagtgattgtggatccaggaagcgttttagacctgagctgcaaggcgttgatatggaggaaaataatcgtagtgtggaagaatgttcaagaacagtgccgtcctctgagttaatccaggaaaatgttctgtcaaaaagctccaggttgatgaagaacttaaaaaaacttgaaacagcttattttctaacaaggtccaagttggcgaagcaagttggcaaccagataaatagttgtaatcgagttgttaagaggactactggttcagctgttgggacagaagcaagttcaatagatgatttttctttggaaaggcaatatggtagaaggcaaagaggttgggtgaactcttttcttgagggattgtgcaagtacttgtcattcattatatgaagagccatatagcatctagtgattttgagggtatagtgcaggtttgggatgttactaggagtcaagtttttgttgagatgagggagcatgagcgacgtgtgtggtcggtggacttctcaattgtggacccaacaaaattggtcagtgggagtgatgatggatctgtgaagctgtgggatatgaatcaggctgggagtattggcactattaaaacaagggcaaatgtgtgttctgtgcaatttcaacctgatactgctcgctccattgccatcggctctgcagaccacaaaatttactgctatgatctacgtcacatacgagctccttattgtacactagttgggcacacaaagactgtaagctatgttaagtatctggatgcatcgacaatagtatctgcatctactgacaactcattgaagctttgggacttatcgatgagtccaggaaggataattgacagtccagttcaaacatttaaggggcatacaaatacaaagaacttcgttggcctttccatatctgacggttacattgctactggctctgaaacaaatgaggtttttgtgtaccacaaagaatttcccatgccagtgttggcctataaattcagcgtgacggaccctatatcagggcaggagattgatgaccagtcacagttcatttcatgcgtctgttggagagggcagtcttcaaccctactttctgcaaactccagcggcaacattaagatcttagaaatggactgaggattggagttgggcatctgctgagtctcagctataaatggactgacttcttaccaagttgtgtgcgtgtgaatttgtggcaacggagttgccaacggtgcgtggtgcagagttgggagaggtaggagtagctgtaacaggtttagcatggtttgataggattaaactagcgtggtagcaaaagtagcataaataggaaacagaattgaggtgtggggtagtactgcaaggaaaggttttgtacatcattggttcgaggtatacttgtacagccaatcaatccagtttttacctagcagcaccaggcttttgctcgtcgtagtgttacttgaaaggcaaaaagtataaagtggtctacatctgttgaatcagataacagcatttgcctcattagctctgtttttttttattccccatattggccatatattattgaatcagataacaacatgtgttgtaggagcatggacacgcgcagcgggacggccgcgaggccctaccgtcatcaactcatgcttacgactttgcgagtcccttgcaaatgatgaggggaagacgatgtcgcacggcgcaacagtgacacaaccaccggtgatatgcagttctaatatctcctctttactacccccatgcgagggagatggagaactccatatatggggccaatctttatttactttgtttctttataaaactaattcattttaaactttataacttaataattggtaaatgtgcg

SEQ ID NO: 36689 - DNA, 2789 bp, Zea Mays
tgccactgccagtgggtgtggcctgtgggcgtcgagtcaagacagtgtcgtcgtttcatctccgcggtcaggtttggtttgttgtctagtgcagcggtactgttcctgtagatgtagagcagcagttcgagccttcgagggcgagggagatggactggcctggtcgctgtgcgccctgtgcgggcttccgccccgaactggggcgggggcgggggcgggggcgaggtgttcgtgggtaagggtcgcgggcgttgtgcggctgggaggcggctaccgaggcgacggaaataaagcagtagtagacgagagagccacgatttataaagcgggttttgtgtgggtgtggctcgctgctcgcctctcctccactcctctcactgctcctcccacctcgcgtttgttcggcgggctcaggtggctgcttgctggccttgctgctgcttcagatccttatcccctccgctacatcgaggccgttcggagctgtcctttctgcttcggatgggagtggcggagcagtgcatggaggtgcggggcgcggcgaatcggaggtgatcccggtcatggggtagagtggagggggcggagtgtgtgtggtatggagccgtcccgtggcgccactggcggcgcgcggcggtggggggaggcggagaccgaggttgatgcggcggaggaagggagacgggcggaggacggcggcgaggtgagcctgcgggagtggctggaccggccgggccgggcggtggaggcggcggagtgcgtgcacgtgttcaggcaggtggcggaggcggtggccgtcgcgcacgcacagggggtggccgtgggcagcgcgcggccgtcgtgcttcgtcgtgtcgccgcccttcgcgcgcgtcgccttcatcgagtccgcctccggctccgacgcctcgggttcgtgctctggctccgacgcctccgaggacgccgacccggacgcctcgcctccgcggcgaggggacggcgccggacgcggcgaggagcgcgcggggaagtcgttcccgctcaagagcgtgctggccatggagctcaactggtacaccagtcccgaggaggcggacgacagcgccgctaccttcgcctctgacgtctatagactgggtgtgctcttgttcgagctgttctgcacattcgaaacaatggaggacaagatgcgggcaatggcgaatctgaggcaccgggtgttgccgccacagttgctgctcaaatggcccaaggaagcatctttctgccagttgctaatgcaccctgtgccagaaaccagaccgaagatgagttatatgaagagccatatagcatctagtgattttgagggtatagtgcaggtttgggatgttactaggagtcaagtttttgttgagatgagggagcatgagcgacgtgtgtggtcggtggacttctcaattgtggacccaacaaaattggtcagtgggagtgatgatggatctgtgaagctgtgggatatgaatcaggctgggagtattggcactattaaaacaagggcaaatgtgtgttctgtgcaatttcaacctgatactgctcgctccattgccatcggctctgcagaccacaaaatttactgctatgatctacgtcacatacgagctccttattgtacactagttgggcacacaaagactgtaagctatgttaagtatctggatgcatcgacaatagtatctgcatctactgacaactcattgaagctttgggacttatcgatgagtccaggaaggataattgacagtccagttcaaacatttaaggggcatacaaatacaaagaacttcgttggcctttccatatctgacggttacattgctactggctctgaaacaaatgaggtttttgtgtaccacaaagaatttcccatgccagtgttggcctataaattcagcgtgacggaccctatatcagggcaggagattgatgaccagtcacagttcatttcatgcgtctgttggagagggcagtcttcaaccctactttctgcaaactccagcggcaacattaagatcttagaaatggactgaggattggagttgggcatctgctgagtctcagctataaatggactgacttcttaccaagttgtgtgcgtgtgaatttgtggcaacggagttgccaacggtgcgtggtgcagagttgggagaggtaggagtagctgtaacaggtttagcatggtttgataggattaaactagcgtggtagcaaaagtagcataaataggaaacagaattgaggtgtggggtagtactgcaaggaaaggttttgtacatcattggttcgaggtatacttgtacagccaatcaatccagtttttacctagcagcaccaggcttttgctcgtcgtagtgttacttgaaaggcaaaaagtataaagtggtctacatctgttgaatcagataacagcatttgcctcattagctctgtttttttttattccccatattggccatatattattgaatcagataacaacatgtgttgtaggagcatggacacgcgcagcgggacggccgcgaggccctaccgtcatcaactcatgcttacgactttgcgagtcccttgcaaatgatgaggggaagacgatgtcgcacggcgcaacagtgacacaaccaccggtgatatgcagttctaatatctcctctttactacccccatgcgagggagatggagaactccatatatggggccaatctttatttactttgtttctttataaaactaattcattttaaactttataacttaataattggtaaatgtgcg

SEQ ID NO: 36690 - DNA, 3674 bp, Zea Mays
tgccactgccagtgggtgtggcctgtgggcgtcgagtcaagacagtgtcgtcgtttcatctccgcggtcaggtttggtttgttgtctagtgcagcggtactgttcctgtagatgtagagcagcagttcgagccttcgagggcgagggagatggactggcctggtcgctgtgcgccctgtgcgggcttccgccccgaactggggcgggggcgggggcgggggcgaggtgttcgtgggtaagggtcgcgggcgttgtgcggctgggaggcggctaccgaggcgacggaaataaagcagtagtagacgagagagccacgatttataaagcgggttttgtgtgggtgtggctcgctgctcgcctctcctccactcctctcactgctcctcccacctcgcgtttgttcggcgggctcaggtggctgcttgctggccttgctgctgcttcagatccttatcccctccgctacatcgaggccgttcggagctgtcctttctgcttcggatgggagtggcggagcagtgcatggaggtgcggggcgcggcgaatcggaggtgatcccggtcatggggtagagtggagggggcggagtgtgtgtggtatggagccgtcccgtggcgccactggcggcgcgcggcggtggggggaggcggagaccgaggttgatgcggcggaggaagggagacgggcggaggacggcggcgaggtgagcctgcgggagtggctggaccggccgggccgggcggtggaggcggcggagtgcgtgcacgtgttcaggcaggtggcggaggcggtggccgtcgcgcacgcacagggggtggccgtgggcagcgcgcggccgtcgtgcttcgtcgtgtcgccgcccttcgcgcgcgtcgccttcatcgagtccgcctccggctccgacgcctcgggttcgtgctctggctccgacgcctccgaggacgccgacccggacgcctcgcctccgcggcgaggggacggcgccggacgcggcgaggagcgcgcggggaagtcgttcccgctcaagagcgtgctggccatggagctcaactggtacaccagtcccgaggaggcggacgacagcgccgctaccttcgcctctgacgtctatagactgggtgtgctcttgttcgagctgttctgcacattcgaaacaatggaggacaagatgcgggcaatggcgaatctgaggcaccgggtgttgccgccacagttgctgctcaaatggcccaaggaagcatctttctgccagttgctaatgcaccctgtgccagaaaccagaccgaagatgagagtgaattccttaatcagtcaaggaatagcctggaagaacgtgaagcggcacttaggttacgcgaagagatagaagaacaagaattattgctggattttcttcagcagttgcagaaaagaaagcaagatatggcagacagtttgcaggacactgttgctttttctctcttctgacatcaatgaggtactccaccagcagtctgcacttggccactgtgtgaacttctcaccagatttggataaagaggtgtgctctggaactgttgaagatcagagtgattgtggatccaggaagcgttttagacctgagctgcaaggcgttgatatggaggaaaataatcgtagtgtggaagaatgttcaagaacagtgccgtcctctgagttaatccaggaaaatgttctgtcaaaaagctccaggttgatgaagaacttaaaaaaacttgaaacagcttattttctaacaaggtccaagttggcgaagcaagttggcaaccagataaatagttgtaatcgagttgttaagaggactactggttcagctgttgggacagaagcaagttcaatagatgatttttctttggaaaggcaatatggtagaaggcaaagaggttgggtgaactcttttcttgagggattgtgcaagtacttgtcattcagtaagttgaaagttcgggcagaattgaagcattgtgattcactgaactcatcaaacttagtatgctccgtagggtttgaccgagatagagagttttttgcaactgctggtgtaaataagaagataaaagtgtttgagtataatatgattgtaaatgaacaccgtgatattcactatcctgtggtagagatgtctaatagatcaaaactgagttgtatttcctggaacagttatatgaagagccatatagcatctagtgattttgagggtatagtgcaggtttgggatgttactaggagtcaagtttttgttgagatgagggagcatgagcgacgtgtgtggtcggtggacttctcaattgtggacccaacaaaattggtcagtgggagtgatgatggatctgtgaagctgtgggatatgaatcaggctgggagtattggcactattaaaacaagggcaaatgtgtgttctgtgcaatttcaacctgatactgctcgctccattgccatcggctctgcagaccacaaaatttactgctatgatctacgtcacatacgagctccttattgtacactagttgggcacacaaagactgtaagctatgttaagtatctggatgcatcgacaatagtatctgcatctactgacaactcattgaagctttgggacttatcgatgagtccaggaaggataattgacagtccagttcaaacatttaaggggcatacaaatacaaagaacttcgttggcctttccatatctgacggttacattgctactggctctgaaacaaatgaggtttttgtgtaccacaaagaatttcccatgccagtgttggcctataaattcagcgtgacggaccctatatcagggcaggagattgatgaccagtcacagttcatttcatgcgtctgttggagagggcagtcttcaaccctactttctgcaaactccagcggcaacattaagatcttagaaatggactgaggattggagttgggcatctgctgagtctcagctataaatggactgacttcttaccaagttgtgtgcgtgtgaatttgtggcaacggagttgccaacggtgcgtggtgcagagttgggagaggtaggagtagctgtaacaggtttagcatggtttgataggattaaactagcgtggtagcaaaagtagcataaataggaaacagaattgaggtgtggggtagtactgcaaggaaaggttttgtacatcattggttcgaggtatacttgtacagccaatcaatccagtttttacctagcagcaccaggcttttgctcgtcgtagtgttacttgaaaggcaaaaagtataaagtggtctacatctgttgaatcagataacagcatttgcctcattagctctgtttttttttattccccatattggccatatattattgaatcagataacaacatgtgttgtaggagcatggacacgcgcagcgggacggccgcgaggccctaccgtcatcaactcatgcttacgactttgcgagtcccttgcaaatgatgaggggaagacgatgtcgcacggcgcaacagtgacacaaccaccggtgatatgcagttctaatatctcctctttactacccccatgcgagggagatggagaactccatatatggggccaatctttatttactttgtttctttataaaactaattcattttaaactttataacttaataattggtaaatgtgcg

SEQ ID NO: 36691 - DNA, 2276 bp, Zea Mays
cctaattctaaaggaaacaaacattcctaacacagcctttaacccagctcgccgcccgcccctcgcggtaatgcggcgcctccactttgcgatgcccgcgtcctcgctcccctccccatcctcctcatctaccgtgctctccattccccacccgctcccaccgccgctcgcagatgccgcccaaggtggtcgccgtcgccgcgggcgaggcccacacactcgccctcacgggtgacgggcaggtgtactcctggggcagggggccgttcggtcgcctcgggaacggccgcgaggacgacaagctggtccccaccgcggtggcgcccgcggtctctgccagcgggacaccgcggcccaggttcgtcgccgtcgcggctggtgcctaccacagccttgcgctggacgatgaaggttcactctggtcatggggttacaatctctatggtcaacttggctatggggaccagaattccctttttccatgtttcgttgagcaatttcaggatttaggttctcctgaaacactgaatgatgaagaccagaacacacgtggtcgcacttgtttgaagctggtggcatgatgtcgcttgccatagacagtttggggagcctttggatgtgggggagttgcccacagcagactgatgccggagagttttgtatttcaagtagctctatcccactacctgtgtgggatttccatggacacaccgttgttaaggttgcctgtggtaacgagcatgtagtagctgcagttagtgctggggagacctatactggaggtgaccttgtttgttacgcttggggaaataacaaccatggtcagttgggtctaggtgacaaggaaagtagatctcgtcctgtgcttatttcagcatttagtgaaggatcttcctgggaggtgtatgaaattgcatgcggagcttcccatactgcagtcctcgccaataagaagtccactgaccagatagaatctcggtgctggacatttggccttggtgacaaggggcagcttggccatggaaccacagccaccatttgctcaccacaacctgtcgatggattaccaaccggatccttccttatttctcttgactgtggattgttccacacaaccgtagtctcctctgatggagaggtgtggtgctggggaatggagagaggtcttggattgtgcccagatgctagcttttcgggagttgatgaaggggatgctttatatccaataagagttcagtctcctgagaccaatgggttcaagtttcttggtccagtgcagatcgcctgtggagctgcccacactgttcttgttgctggtgatgggtataggatgtgggcatggggcagaggccgcagtggtgtgcttgggagaggccagactgctgacagttacataccatgcgttgtgatgtggcctcctcttgatgagaactttcatgaggaccaaatgggaggatcaacatcaagagtgaatgatcacactagcactgagttggaacagaagctatctgctgcctcggaggagttacaattccttaggtcaaaactgacactcatggagagatatgccaatatacttcacatctcaatcttccgtaagccacttgatgaacgggcgctaccacgttcacttcaggaatcttccgtctttgatatcagaaaggaatttgagaacattttggatgcagcagatactgatgaacttaatcgtttagagatcttctaccgcagcatgctttctggcgttaaagacaagcttctgaagagaagagtacgagaaatggtccaacaatgcattatttcactcagcagggaggccaaaccctaaagataagtgaattggattattacacttgttaccggactgcaagtgggtacagtatcacctttggtctcactaaaattgcaaaaaaaaaaggtcaacccagtgtcttatctgtttcttcaaacatagtgagtagatctgtcctggcatcaagatcatcacctggccgaccattgcacgaagacagcattactcatactgacatgtaagcatatatgttgtttatgaaattctttatatgataaatgcatcctagataaattgaatcctgtgtaaaggatgtttctgtggattgtcatagacggacaagaatttatggacatatggttaaagtgttatcggaaaagccttaggcaagtagcagtttaaattataaatactagcaactgcataaatagcgtgggtagatagttttttttatcatggtgacatttgagattttttttatttg

SEQ ID NO: 36692 - DNA, 2266 bp, Zea Mays
cctaattctaaaggaaacaaacattcctaacacagcctttaacccagctcgccgcccgcccctcgcggtaatgcggcgcctccactttgcgatgcccgcgtcctcgctcccctccccatcctcctcatctaccgtgctctccattccccacccgctcccaccgccgctcgcagatgccgcccaaggtggtcgccgtcgccgcgggcgaggcccacacactcgccctcacgggtgacgggcaggtgtactcctggggcagggggccgttcggtcgcctcgggaacggccgcgaggacgacaagctggtccccaccgcggtggcgcccgcggtctctgccagcgggacaccgcggcccaggttcgtcgccgtcgcggctggtgcctaccacagccttgcgctggacgatgaaggttcactctggtcatggggttacaatctctaattccctttttccatgtttcgttgagcaatttcaggatttaggttctcctgaaacactgaatgatgaagaccagaacacacgtggtcgcacttgtttgaagctgtcttctgtcacagctggtggcatgatgtcgcttgccatagacagtttggggagcctttggatgtgggggagttgcccacagcagactgatgccggagagttttgtatttcaagtagctctatcccactacctgtgtgggatttccatggacacaccgttgttaaggttgcctgtggtaacgagcatgtagtagctgcagttagtgctggggagacctatactggaggtgaccttgtttgttacgcttggggaaataacaaccatggtcagttgggtctaggtgacaaggaaagtagatctcgtcctgtgcttatttcagcatttagtgaaggatcttcctgggaggtgtatgaaattgcatgcggagcttcccatactgcagtcctcgccaataagaagtccactgaccagatagaatctcggtgctggacatttggccttggtgacaaggggcagcttggccatggaaccacagccaccatttgctcaccacaacctgtcgatggattaccaaccggatccttccttatttctcttgactgtggattgttccacacaaccgtagtctcctctgatggagaggtgtggtgctggggaatggagagaggtcttggattgtgcccagatgctagcttttcgggagttgatgaaggggatgctttatatccaataagagttcagtctcctgagaccaatgggttcaagtttcttggtccagtgcagatcgcctgtggagctgcccacactgttcttgttgctggtgatgggtataggatgtgggcatggggcagaggccgcagtggtgtgcttgggagaggccagactgctgacagttacataccatgcgttgtgatgtggcctcctcttgatgagaactttcatgaggaccaaatgggaggatcaacatcaagagtgaatgatcacactagcactgagttggaacagaagctatctgctgcctcggaggagttacaattccttaggtcaaaactgacactcatggagagatatgccaatatacttcacatctcaatcttccgtaagccacttgatgaacgggcgctaccacgttcacttcaggaatcttccgtctttgatatcagaaaggaatttgagaacattttggatgcagcagatactgatgaacttaatcgtttagagatcttctaccgcagcatgctttctggcgttaaagacaagcttctgaagagaagagtacgagaaatggtccaacaatgcattatttcactcagcagggaggccaaaccctaaagataagtgaattggattattacacttgttaccggactgcaagtgggtacagtatcacctttggtctcactaaaattgcaaaaaaaaaaggtcaacccagtgtcttatctgtttcttcaaacatagtgagtagatctgtcctggcatcaagatcatcacctggccgaccattgcacgaagacagcattactcatactgacatgtaagcatatatgttgtttatgaaattctttatatgataaatgcatcctagataaattgaatcctgtgtaaaggatgtttctgtggattgtcatagacggacaagaatttatggacatatggttaaagtgttatcggaaaagccttaggcaagtagcagtttaaattataaatactagcaactgcataaatagcgtgggtagatagttttttttatcatggtgacatttgagattttttttatttg

SEQ ID NO: 36693 - DNA, 3832 bp, Zea Mays
tcagattctcgggctggacatgtgcgcggatatcatcgtcggcaacgagctaatgcgcggcatctccggcggccagaagaagcgcctcacaacaggggagatgctggtcggcccgaccaaggtgctattcatggacgagatctccacgggcctcgacagctccaccaccttccagattgtcaagtgcatccagcagatcgtccacctgggcgaggccaccgtcctggcctcgctgctccagcctgcgccggaggtcttcgagctcttcgacgatgtcatgctgctgtccgaggggcagattgtctaccagggcccccgggagtacgtgcttgagttcttcgaggtgtgtggcttccggtgcccgcagaggaaaggtgtccctgatttccttcaggaggttacatcaaaaaaagatcaggaacagtactggatacaaaatgaaaaaccatatcactatgtatcagtacctgaatttgttgcaaagttcaagaaatttcatatggggaagagcctcaagaaacaactttcggtgcctttccacaagaggaaaatacacaaatctgctttggtcttctctgagaagtctgtctctactttggagcttctcaaggtctcatggtccaaggaatggcttctcatgaagaggaattcatttgtgtacatcttcaaaatagttcagggaattctggttgcgctagtagcgtcaacggtgttcttgcgtacacaaatgcatacaagaaatgaggaagatgggcaaatctatataggagcacttctttatgtcatgatagttaacatgttcaatggttttgccgagtcatctattcttttggcaagactccctgtactgtacaaacatagggattttttgttctatagaccatggactattgtacttccgaatgttctaatgagagttcctgcctccatattcgagtcaataatttgggtagcagtgacttactacagcattggctttgcccctgaagctagcaggttctttaaacatttagttgccgtcttctttatccagcagatggctgcgggtctcttcagacttgtcactggcttatgcagaacagttatcataactaacacggcaggatcacttgcagtccttttcatgtttacgctaggaggattcatcctaccaaaggatgcaatttcaaaatggttgatatgggcctattattgttcacctcttacttatgcatacattgctcttgcctctaatgaaatgcactctccaaggtggatggaccaatttgcacctgatggtaggagattgggagttgcaattttagaaaactcaagtatcttcaccggcaaggaatggtactggattgctactggtgcacttttaggtttcactgttctgttcaatgtgttattcacactgtcacttatgtacctgaatcctgttggaaaaccacaggcaattctgcctgaagaaactgatacaagtctagaggacagtgaggaaggaaagaagatgacagatataacacagagaacgaaaatcccgacaccagaacctttatcctcaaattctatgatcaccttggataaggtacttgaacagttacgtggccagtccccgaatacttctgatagatcacacatgaatgcttctgtcagaattactccaggaagagggatgattcttccattcgaacccctctccatgtccttcaacgagataaattactatgttgacatgcctgcagagatgaagagtcaaggagtaaccgcggataagcttcagctgctgtcagggatatctggggcttttcgacctggtgttctcactgctcttatgggtgtgagtgggtctggaaagactactctcatggacgttttatctggaaggaagactggaggatatattgaaggagaaatttatatatctggttaccctaagaaccaagaaacatttgccagaatatcaggttactgtgaacaaaatgacatccactctccacagatcactataagggagtccctactcttttctgctttcatgcgccttcctaaggaggtcactgaccaagaaaagaagatattcgtggatgaagttatggaactggttgagcttaacggtcttaaggatgctattgtgggtctccctggtgtgaacgggctctcaacagagcaaagaaagcgattaacagtcgctgtagagcttgtggcaaacccctcgatcatctttatggatgaaccaacttcaggtcttgatgcaagggctgctgcagttgttatgagaactgttcggaacaccgtcaatactggacgaactgttgtctgcactatccatcaaccaagtattgacatttttgaagcttttgatgagctgcttttaatgaaaagaggaggccagatcatatactctgggccactgggtaggaactcacataaagttgttgaatactttgaggcagttcctggaatcccaaagatcaaagaggggtgcaaccctgctacatggatgttggatgtaacctcagcttctacagaggttcagttgaatattgattttgcagagcattacaagtcatcaactatgcatcagcggaacaaagcattagttaaagagctgagtaagccgcctcctggttccagtgacctctacttccccactcaatactcgcagagtacctttgatcagttcagattctgcctctggaagcaatggttgacttactggagaagccctgactacaaccttgtcagaatgttctttgcattgtttactgccttgctgctggggattatattttggagggttggcagtaagatgaagagttcatcagaccttttgatcatcgtcggatcaatgtattttgctgtcgcatttattggctttgaaaactgtataactgctcaacctgttattgccgtggaaaggacggtcttttacagagagcgtgcagctggaatgtactcggctataccctatgctttctcgcaggttgttgctgagataccatatgtgttcgtcgagagtgtcatatacactgttatcgtgtacccgatgatgtctttccagtggaccctagcgaaattcttctggttcttctacatttcgttcctctcgttcctctacttcacttactatggtatgatgggtgtcgccataacgccgaaccctcaggtggcttccatatttgccgcttccttctacactctctttaatctcttctcggggttcattgttccaagatcgagaatcccggtgtggtggatctggtactactggatctgtccagtggcatggacagtctatgggctgattgtgtcgcagtatggcgatgtggaggatttgatcaaggtgcctgggaaacccgatcagcaggtcaaagctttcatcaaggactactttggctacgatccggacttcatgggcgtagtggcagcggtgttggctggctttactgccctctttgcttttatatatgtttactgcataaagagatttaatttccaacagagatgatagtacaagtctcagtttgccatgtgccttgagggtgtatgttcgataaaataaaactatatatatctatctagactctaaagttgcaagagatgtacattgccgtttacttgttagttgtatgttgcaccaatcttgtggctgatgcaaagaacttagaaatcagtctttgtccgtctagctctatcggtacagcgcaaggctcttgaccttgtgatggtgagtttgagggtccacgcgtacctagctgtcaggaagaagtccatgtatgcgtttggcagttttttatgccttttgctcacatattattttgctgaatttagtgaccatctgtatatg

SEQ ID NO: 36694 - DNA, 5298 bp, Zea Mays
atggagacgctgagccgaggcctgcacggcatgtcgagccccgacgccaccccctacttctcgggcgcgtcgtcgcggcgccgcagcggcgccgacgaggtggacgacgaggaggcgctgcagtgggccgcgatggagcggctgccgtccttcgagcgcctgcgcacgggcctcgtgcggccggcggacgcttccgacggcggcagcgacagcggccgccgcggccggaggcgccggcacgcgcatgaggaggtggacgtgcgcgcgatggggctcgcgcagcgccaggccttcgtggagcgcgtgttccgggtcgccgatgaggacaacgagcgcttcctcaggaagctccgcgcgcgcatcgaccgcgccggtatccagatccccacggtggaggtgaggttccggggcgtcaacgtgcaggcggagtgccacgtcggcacccgcgcgctgcccacgctggcgaacgtctcgctggacgtggccgactcgctgctgggacgcgtcggggtcaagctcggcaagaggaagacgctccacatcctcaaggacgtctccggcgtcgtgcgcccgtccaggatgacgctgctgctcggcccaccgtcgtccggcaagacgacgctgctgctggcgctggccggcaagctggaccccactcttgaggtcagcggggaggtcacctacaacggctacgggctggacgagttcgtgccgcagaagacggcggcgtacatcagccagaacgacatccacgacggcgagatgaccgtcaaggaggtcctcgacttctccgcgaggtgccagggtgtgggccagagatacgagctgctcaaggagctggcgaagaaggagaggcagcagggcatatatcccgacccggaagtcgacctgttcatgaaggcaacttcagttcatggagccactctgcagacggactacattctcaggattctcgggctggacatgtgcgcggatatcatcgtcggcaacgagctaatgcgcggcatctccggcggccagaagaagcgcctcacaacaggggagatgctggtcggcccgaccaaggtgctattcatggacgagatctccacgggcctcgacagctccaccaccttccagattgtcaagtgcatccagcagatcgtccacctgggcgaggccaccgtcctggcctcgctgctccagcctgcgccggaggtcttcgagctcttcgacgatgtcatgctgctgtccgaggggcagattgtctaccagggcccccgggagtacgtgcttgagttcttcgaggtgtgtggcttccggtgcccgcagaggaaaggtgtccctgatttccttcaggaggttacatcaaaaaaagatcaggaacagtactggatacaaaatgaaaaaccatatcactatgtatcagtacctgaatttgttgcaaagttcaagaaatttcatatggggaagagcctcaagaaacaactttcggtgcctttccacaagaggaaaatacacaaatctgctttggtcttctctgagaagtctgtctctactttggagcttctcaaggtctcatggtccaaggaatggcttctcatgaagaggaattcatttgtgtacatcttcaaaatagttcagggaattctggttgcgctagtagcgtcaacggtgttcttgcgtacacaaatgcatacaagaaatgaggaagatgggcaaatctatataggagcacttctttatgtcatgatagttaacatgttcaatggttttgccgagtcatctattcttttggcaagactccctgtactgtacaaacatagggattttttgttctatagaccatggactattgtacttccgaatgttctaatgagagttcctgcctccatattcgagtcaataatttgggtagcagtgacttactacagcattggctttgcccctgaagctagcaggttctttaaacatttagttgccgtcttctttatccagcagatggctgcgggtctcttcagacttgtcactggcttatgcagaacagttatcataactaacacggcaggatcacttgcagtccttttcatgtttacgctaggaggattcatcctaccaaagggtaatcacccatgacccccgttctccttcactatatagttggatattgtttgggtgttttcctcagtttcatggtagtatgatttgataaatacttattcccagatatgaagggtttgagactcatagttgagtgctaaaactctcagcataaacaatggtgttgtcccagatgtgaagtgtcctccctttgctcactcgtgagtcgtgacactgtgactccgacaccggtagcgagaaccttcgttgcctactaaatgaggaaacccacatacagcgaaaccatgaaggcgacggtgcgcagaggggcccagcgaaatgtgccacgcccaacgaatgggaactgagacgtctgaaaatcagcaaatcgatcatttgttgtttcagaaagagctcacacaacaaccagcaccttatggcgcagaaacatgatttgtttattaatgacctttttacactgacacttctgcgttgattcttactgtggaagttgacatcacataactgttgctcactgttacagatgcaatttcaaaatggttgatatgggcctattattgttcacctcttacttatgcatacattgctcttgcctctaatgaaatgcactctccaaggtggatggaccaatttgcacctgatggtaggagattgggagttgcaattttagaaaactcaagtatcttcaccggcaaggaatggtactggattgctactggtgcacttttaggtttcactgttctgttcaatgtgttattcacactgtcacttatgtacctgaatcctgttggaaaaccacaggcaattctgcctgaagaaactgatacaagtctagaggacagtgaggaaggaaagaagatgacagatataacacagagaacgaaaatcccgacaccagaacctttatcctcaaattctatgatcaccttggataaggtacttgaacagttacgtggccagtccccgaatacttctgatagatcacacatgaatgcttctgtcagaattactccaggaagagggatgattcttccattcgaacccctctccatgtccttcaacgagataaattactatgttgacatgcctgcagagatgaagagtcaaggagtaaccgcggataagcttcagctgctgtcagggatatctggggcttttcgacctggtgttctcactgctcttatgggtgtgagtgggtctggaaagactactctcatggacgttttatctggaaggaagactggaggatatattgaaggagaaatttatatatctggttaccctaagaaccaagaaacatttgccagaatatcaggttactgtgaacaaaatgacatccactctccacagatcactataagggagtccctactcttttctgctttcatgcgccttcctaaggaggtcactgaccaagaaaagaagatattcgtggatgaagttatggaactggttgagcttaacggtcttaaggatgctattgtgggtctccctggtgtgaacgggctctcaacagagcaaagaaagcgattaacagtcgctgtagagcttgtggcaaacccctcgatcatctttatggatgaaccaacttcaggtcttgatgcaagggctgctgcagttgttatgagaactgttcggaacaccgtcaatactggacgaactgttgtctgcactatccatcaaccaagtattgacatttttgaagcttttgatgagctgcttttaatgaaaagaggaggccagatcatatactctgggccactgggtaggaactcacataaagttgttgaatactttgaggcagttcctggaatcccaaagatcaaagaggggtgcaaccctgctacatggatgttggatgtaacctcagcttctacagaggttcagttgaatattgattttgcagagcattacaagtcatcaactatgcatcagcggaacaaagcattagttaaagagctgagtaagccgcctcctggttccagtgacctctacttccccactcaatactcgcagagtacctttgatcagttcagattctgcctctggaagcaatggttgacttactggagaagccctgactacaaccttgtcagaatgttctttgcattgtttactgccttgctgctggggattatattttggagggttggcagtaagatgaagagttcatcagaccttttgatcatcgtcggatcaatgtattttgctgtcgcatttattggctttgaaaactgtataactgctcaacctgttattgccgtggaaaggacggtcttttacagagagcgtgcagctggaatgtactcggctataccctatgctttctcgcaggttgttgctgagataccatatgtgttcgtcgagagtgtcatatacactgttatcgtgtacccgatgatgtctttccagtggaccctagcgaaattcttctggttcttctacatttcgttcctctcgttcctctacttcacttactatggtatgatgggtgtcgccataacgccgaaccctcaggtggcttccatatttgccgcttccttctacactctctttaatctcttctcggggttcattgttccaagatcgagaatcccggtgtggtggatctggtactactggatctgtccagtggcatggacagtctatgggctgattgtgtcgcagtatggcgatgtggaggatttgatcaaggtgcctgggaaacccgatcagcaggtcaaagctttcatcaaggactactttggctacgatccggacttcatgggcgtagtggcagcggtgttggctggctttactgccctctttgcttttatatatgtttactgcataaagagatttaatttccaacagagatgatagtacaagtctcagtttgccatgtgccttgagggtgtatgttcgataaaataaaactatatatatctatctagactctaaagttgcaagagatgtacattgccgtttacttgttagttgtatgttgcaccaatcttgtggctgatgcaaagaacttagaaatcagtctttgtccgtctagctctatcggtacagcgcaaggctcttgaccttgtgatggtgagtttgagggtccacgcgtacctagctgtcaggaagaagtccatgtatgcgtttggcagttttttatgccttttgctcacatattattttgctgaatttagtgaccatctgtatatg

SEQ ID NO: 36695 - DNA, 462 bp, Zea Mays
catctgggaggagataagagatatgctagacaaacggctcatgggagaacggaggaggcctcgattctccaaggttctccttgtcgacttcgcgcgcgaatcggaattcgtcacatttttccagtatctccttgatcatgttcatgatttttccaggctatggtcacttcaggaatcaatcgacgacatcaaacaacccccatggttcgcccaacacatcatcaaaccagtccaaccgaccacctcactgatgttcttctgaacttggttatgagacatgtttatggcatacattggatgtttgtggacttatttctgtgagtacatgtgagttttgtgaactattttgtggtacatgtgacttttgtgatttttgtgaagaaacttgtgagatttgtggccttgtgagatatgtggtgtctatgatgtatgtgatgattctataatatatgtgatgtatat

SEQ ID NO: 36696 - DNA, 489 bp, Zea Mays
attctacttccttccctccatcccggtggaacgtgaaaaataagagatatgaaactgtagatgaaagtttatagggataagtttgaaatttcatctgggaggagataagagatatgctagacaaacggctcatgggagaacggaggaggcctcgattctccaaggttctccttgtcgacttcgcgcgcgaatcggaattcaatcaatcgacgacatcaaacaacccccatggttcgcccaacacatcatcaaaccagtccaaccgaccacctcactgatgttcttctgaacttggttatgagacatgtttatggcatacattggatgtttgtggacttatttctgtgagtacatgtgagttttgtgaactattttgtggtacatgtgacttttgtgatttttgtgaagaaacttgtgagatttgtggccttgtgagatatgtggtgtctatgatgtatgtgatgattctataatatatgtgatgtatat

SEQ ID NO: 36697 - DNA, 1000 bp, Zea Mays
cttacttccttccctccacccgtaagattgtttgagctgatggagatattctacttccttccctccatcccggtggaacgtgaaaaataagagatatgaaactgtagatgaaagtttatagggataagtttgaaatttcatctgggaggagataagagatatgctagacaaacggctcatgggagaacggaggaggcctcgattctccaaggttctccttgtcgacttcgcgcgcgaatcggaattcgtcagaagtcatgctaccagcatcagcaataagctttcctgtgctcaccagcacgaagaaggttttgaaaacatcacccgccgatatctccccagactgtgctagcttcccaccataccagaagtccagtgcccatgacaagaacgagaggcaaggtgacaaccctgtggtgatccctgctacccatgatttcttccttgcttttttcaagggttcctcttgcgcatgctcgaatagctgaagaacctttgatgaacatccaaaggaggttaccatcctgtggttgtaaacagcttctatggcaatctgggtgctttgatgctgagcctttgccaagtcccttgacacatttgagagaaccattttttttgcataataacacatcattgtagatggctgtacagctatcatgacaagagcaagtttccaagctaccatcaggcccattgtcactgcaattataattccagaagctgtttgaagcagtaaggatattctgtctgcaacaagggttttgacaagagaagcctcattgcttagccgagagcacaatgcaccgcttgagttagtttcttcatcaaaccatgctgcctcaaaagttaatatcttctcaagtacttggacccggatgcgcctaacaagatgctcccccatgtatgcaaaattgtagtgctgcaatagattaacaacaatggataccaaggacagtgagcagaagatcaaggcatagcgtctgataattgcattcatctc

SEQ ID NO: 36698 - DNA, 2051 bp, Zea Mays
gttccttcgggcctagtgttgttcatagcatttccttctctcagtttctttttcttcatatcctattttgagcgagtactttgcagtgattgatcggttacaatctgcttagggatccccgttacaacaagggacttgcgttcacagagagggaacgtgagacgcactacctccgtggccttctgccaccagctattgtatcccaggagctccaggagagaaagatcatgaataatattcgacaataccagttgcctttgcagcgctacatggcactcatggatctccaggaagggaacgagaggcttttctacaagttgctcattgacaacgtcgaggagttacttccaatcgtgtacactccaaccgttggcgaggcctgccaaaaatatggatccatatttagtcgccctcagggtctttatatcagtttgaaggagaagggaaagatccttgaggtgttgaagaactggccagagaggagcattcaggttatagttgttactgatggtgaacgtattttggggcttggagatctcggatgccagtgcttgccgatcacattggatgttggtacaaataacgaggagctgcttaatgacgaattttacattggcttgagacaaagaagagccactggccaggagtacactgattttctgcaagaatttatgactgctgtgaaacaaaactatggggagaaagttcttattcagtttgaggattttgccaaccataatgcttttgatcttcttgcaagatatggcaccactcaccttgtattcaatgatgatattcagggaacagcttctgtggttcttgctgggcttattgcagcacaaacattacttggtggttcattggcagatcacacttaccttttccttggtgctggagaggctgggacaggtatagctgaacttatagctcttgagatctcacgtcagacgaaagctcctatagaggagtgccgcaagaaaatctggcttgttgattcaaagggcttgattgtcagtacacgaaaggagtcccttcaacacttcaagaaaccatgggctcatgagcataaaccactcagcaacctcttagatgctgttaatgctatcaaaccaacagtgttgattggcacatccgggaaggggcaaactttcacaaaagacgttgttgaagcaatctcctcatttaacgagagaccaatcattcttgccctatcgaacccaacatcacaatctgaatgcacagctgagcaagcttacacatggagcaagggacaagcagtgtttgcgactgggagtccatttgatcctgtggagtacaatggcaagatacatgttcccggacaggcaaacaatgcctatatcttcccagggtttggcctcggcgtggtgatgtctggagctatccgcgttcatgacgacatgcttctggcagcatcggaggctctggcccagcaggtcacagaagaaaattttgagaaggggctgatttatcctcccttctcaaacatcaggaagatctctgcccacattgcagccagcgttgcagcaaaggcatatgaacttggtttggcaagtaggcgccctcggccaaaggacctggtgaaatatgcagagagttgcatgtacagccccatctaccgcaactaccgttgaattcggatcaactccagttatgtgcaaatcagcagcagctattccgcagcgtttatctcttgcgatgtcatgtaaatcagctccggttagccttttggatgctagtcagtcatggtgctggtgccgtccttccggacaaggataaatttggaataaagtttgagtcgacgattcctccctcggtactgcgtgttcacctgaacgtttttttgcttcacgcagttgctgttgttttcaacaagtgcttggttgtatgcgtgaaggctatagctgcacgcctagactgtcacactttcggacgacccatattgtactgctgccagccaaggtgagataaaggcctgtacacattggtacggtgatatatgcgacgattcctaaacagagaaccatttgtcg

SEQ ID NO: 36699 - DNA, 1985 bp, Zea Mays
cttctctcagtttctttttcttcatatcctattttgagcgagtactttgcagtgattgatcggttacaatctgcttagggatccccgttacaacaagggacttgcgttcacagagagggaacgtgagacgcactacctccgtggccttctgccaccagctattgtatcccaggagctccaggagagaaagatcatgaataatattcgacaataccagttgcctttgcagcgctacatggcactcatggatctccaggaagggaacgagaggcttttctacaagttgctcattgacaacgtcgaggagttacttccaatcgtgtacactccaaccgttggcgaggcctgccaaaaatatggatccatatttagtcgccctcagggtctttatatcagtttgaaggagaagggaaagatccttgaggtgttgaagaactggccagagaggagcattcaggttatagttgttactgatggtgaacgtattttggggcttggagatctcggatgccaggggatggggattcctgttggtaaactttccctttacactgccctgggaggagttcgtccatctgcttgcttgccgatcacattggatgttggtacaaataacgaggagctgcttaatgacgaattttacattggcttgagacaaagaagagccactggccaggagtacactgattttctgcaagaatttatgactgctgtgaaacaaaactatggggagaaagttcttattcagtttgaggattttgccaaccataatgcttttgatcttcttgcaagatatggcaccactcaccttgtattcaatgatgatattcagggaacagcttctgtggttcttgctgggcttattgcagcacaaacattacttggtggttcattggcagatcacacttaccttttccttggtgctggagaggctgggacaggtatagctgaacttatagctcttgagatctcacgtcagacgaaagctcctatagaggagtgccgcaagaaaatctggcttgttgattcaaagggcttgattgtcagtacacgaaaggagtcccttcaacacttcaagaaaccatgggctcatgagcataaaccactcagcaacctcttagatgctgttaatgctatcaaaccaacagtgttgattggcacatccgggaaggggcaaactttcacaaaagacgttgttgaagcaatctcctcatttaacgagagaccaatcattcttgccctatcgaacccaacatcacaatctgaatgcacagctgagcaagcttacacatggagcaagggacaagcagtgtttgcgactgggagtccatttgatcctgtggagtacaatggcaagatacatgttcccggacaggcaaacaatgcctatatcttcccagggtttggcctcggcgtggtgatgtctggagctatccgcgttcatgacgacatgcttctggcagcatcggaggctctggcccagcaggtcacagaagaaaattttgagaaggggctgatttatcctcccttctcaaacatcaggaagatctctgcccacattgcagccagcgttgcagcaaaggcatatgaacttggtttggcaagtaggcgccctcggccaaaggacctggtgaaatatgcagagagttgcatgtacagccccatctaccgcaactaccgttgaattcggatcaactccagttatgtgcaaatcagcagcagctattccgcagcgtttatctcttgcgatgtcatgtaaatcagctccggttagccttttggatgctagtcagtcatggtgctggtgccgtccttccggacaaggataaatttggaataaagtttgagtcgacgattcctccctcggtactgcgtgttcacctgaacgtttttttgcttcacgcagttgctgttgttttcaacaagtgcttggttgtatgcgtgaaggtaagtaggtaacaccaggaaaggttcttctttttttc

SEQ ID NO: 36700 - DNA, 1208 bp, Zea Mays
gtccagtgaaccagtcaccaactcccgtggcagtgataccgttgactgctgagctgtgggcctgaagccgaggggcaaacgcaacgtcgccgatgcggaagccggcggcactggtggtttctacggcggttttcgcagccgcagccgtagtcgccgtgatggcacgccagaggttgcgggaagcgaggcgatgggcacgcgcaggcgccgtgctgcgggacctgcaggagcggtgcgcggcgccggtggagcggctgcggcaggtggcagacgcgatggtcgcggagatgcgcgcggggctggcctccaacgactccgagggagatagcgggagcagcgtcctcctcaagatgctcgtaacctacgttgactccctaccgtccggggacgagaaagggctattttatgctcttgaccttggcggaacaaactttcgtgttttacgaattcagtttgggggcaaggaacaacgaatagtcaagcaagaatctaaaacggtatccattcctcaacatttaatgtccaggggatcaaatgagctgtttgattttattgctgctgctttagcgaagttcattgcctctgagggtgagggcttttatcttcctgagggcatgcaaagacaacttggttttacattctcctttccagtgaagcaaaattcagttgcatctggcactcttatcaaatggacaaagggttttgcaattgatgaaatggtaggaaaggacgtagtggcagaattaaacaaggctatcaaacgccaaggagttgatatggaagtcacagtactggtcaatgatacagtagggacattggctgctgggagatatgtggataatgatactgttgctgcagttatactgggtactggcactaatgcagcgtacatagaacatatggactcaattcctaaatggtgtggcccacctcctgagtctggaaacatggtgataaacatggaatgggggaactttaggtccacccaccttccactgactgaatttgatgtagccttggatgcagaaagtttgaaccctgatgaacagatttatgagaagttgatctctggcatgtatatgggggaaattgtccgaagggtcttgctaaaaatggctcaggatgcttctcttttctcagataatgtacctctggaacttgaggtcccatatatccttagtggatgttctgtggagtagctgttagag

SEQ ID NO: 36701 - DNA, 1835 bp, Zea Mays
cccgaatcctccagaaaccgtgtgctccccgaagcagtttagatatcttcctcccaaccttccctgccaaatcgcggtcactgctccgaagtccgaaccttcatacacatcgtctcgtttccgatttccccaaattcaggccacaggcgctacaggacccaggcaccactcggtcggcggccaccgcgtcgccccgcctgctcgattggggtcgcgtgtattgtgttgtgtttgcaacgtgatagcttgtactgggaacaaaggtcaagatgggcgccttggacctacaccttgactttgcttctgctcaacatggacaagccaagttaaaggaatatgccaagagctctttgttgtctgatggaaactacaatacagacaagatcaatggttcaaaccctgatgactatgagaaatttgagaaagggataatgcactatgggtgtccacattatagaaggagatgccgcataagagctccttgctgcaatgaaatttttgattgccgacactgccacaatgaaactaagaattccattaaaattgataaaatgaagaggcatgaacttccacgccatgaagtgcagcaggttgtatgctcattgtgtggcactgaacaggaggtgcgacaagtatgtatcaattgcggtgtttgcatggggaaatacttctgtggtttgtgcaaactcttcgacgatgatgtctctaaacagcagtatcactgcaacggatgtggaatatgtagaatcggagggagggagaatttcttccactgttcaaaatgtggatgttgctattcaattgcgctgaagaatagtcatgcatgtgttgaaggggcgatgcatcatgactgtccaatctgcttcgagtacttgttcgattcgacaaatgatgtttccgtcctgccttgtggtcataccattcatgtaaagtgcctgaaagaaatggaagagcactgccagtttgcatgccccctttgctccaagtcggtttgtgacatgtcgaaggcatgggaaaggctcgacatggagctggcaactctgtctgactcctgtgatcacaaaatggtccgcatattatgcaacgactgcggggcaatatcagatgtgcagttccatttgattgcgcacaagtgccagaattgcaagtcatacaacacccgccagatttgaagtaagaatcgcaagtcacacaacaccgtcagatctgaaatagcaaatcctgtgggggtttctgcatttcttcaagaagcgtgatggactgatggccccttcccgtgagctgctgagcaccgggatatctggcaagacactcatcactgtatccactccactgggtcctgcggaggcaaacagctcgagattgtatatctgctgctagctgccgcccttcgttatgcataagcctactcttgccgttttactcctgtcgctccgtgattctagtgtaataatgtcatatttactgttgcttcaagtatggcccgtacggctgcggttgaacggcggcggcggctgctgagccacagtaccttgctgttgctgagactgcacccagccacagtgcgccgccgccgccgcagcttgtagctggacttgatttatgaaggtgccggaagagttcttggttgcgggtagctattaaggccatctcgagtagatgtcctattacatcccttatttcatcctctatttcaaactttatataaatagtattaaatatctcatctacactgccctatctcctgatcttttaagacagtctttagttaggaaaatgtgaacggtgtgcacatgtggttgtacgtcaaatccggatcccattttctatgctta

SEQ ID NO: 36702 - DNA, 734 bp, Zea Mays
tgggcctaggcagtcgggagacgtagaaaatgggtttatgaccaaatgcctgagcctagatgggttatttcaatgggcagctgtgccaacggtggtggatactaccattactcctactctgttgtacgtggatgtgaccgtatagtccccgtggacatctacgtccctgggtgcccaccaactgctgaggcactgctgtacggtgttcttcagctccaaaagaagatcaacaggcgtaaggatttccttcactggtggaccaagtgaagcatgcttctgctgttgctcgcttgctacgtttctttgcactcgacctacctgtcttatctgaaataaggacggactttgctcggattcacaaatttgttgtgcctggaaggatgtatgcccaggttgtgacgaacatataacttgtgtacttggagtcagttcgcctgtaatggacaccagacctgctgtgaatctgtttttaagcttccattgtaatacagcaatacaccatatacttgtatgttaatacaccatatacttgtatgttaatgggtatcttccccggttccccctaccattgggttgaccggttgagatacaggcttacaaatcttgtcttttaggccatgtttggtttctttagtctagggactaaagtttagttaggggactaaagtttagttcctaacatgtttggttctaggggctaaaaatagtaaaatgtactaaatgactcataagaa

SEQ ID NO: 36703 - DNA, 2052 bp, Zea Mays
ctaaaaaagcccacacatctttctatcagaagttcatccgttcgatttgcagttaacggctcagatgaaaaaaattcccaaacccacgagcatctcagtcccccaaaccgtaaatcctgtaaatttcattccacatataccccttcgatccacggggctatggcaattgcctctcaagctcaagggctcaaggccattagcgtaattgcaaaattgtaattaattctcaatctcaaggttagtaacgtaattctagagcttctgagcagaaaaggtacggagtcggaaggatatgatcgcttaggagtgcggctagggttttttcctgtcacaccttccctcggtcccttccatctcctagccgccgccgccgccgcccaaaaccctacctaccctcttctccccctcactctcctttcatctccattctaatggcggcccaacccgtccggcgaagctgctagtgcttgtatctactatcttcatcaggtacttcgcgatcctactgaagtattccccgccgccgctgccatggccaccctcaaccctttcgaactcctcggcgccgacgacaacgacgacccgtcgctgttgattgcggcggcggcggctgctgctcagaaagccgaggcgaagaagtccgccgtggcgcctgctgggaaggctgcccagcctgcggcgaccaccaagttcccgaccaagcccgctcctccctcgcagacggttcgggatgcacgcggcggtggctcatcagctcgtggaggctttggccgtggtgaacgtggccgtggcagaggtggacggggatatggtcagaaccgtggcttcagtggtgacaatggcaatgagttccagggaggttatggtggcggaggctatggggatggtgctgtaactggtggatctgaaggagaaagggagagagacactcgtcccccgtaccgtggcggaggcagacgtggtggttacaggaatgttgagtttggtgatgactctgagaggccaccacggagaaactatgagcgccacagcgggactggccatggctatgagatgaagcgtgatggcgcagggcgtgggaactggggcactgccactgatgagcttattgcccaggatgcagaggactctccgaagatggaggaggctgctcctgttgctgagaaacaaggtgagcagatcgatgccccagcagcagatgagaacaaagataacaaggatgctactgcaaatgaggaggaagaaaaggaagaggacaaggagatgactctggaggaatttgagaaaataagagaggagaagaggaaagcactacttgcgttgaaggctgaggagaggaaagttgaagttgacaaggatctgcgttctctgcagccactttcaaacaagaaagaaaatgatgaagttttcattaagctgtcggtgagcatcaacgagttcctgaaacctgctgaaggagaaaggtactacggcggccgtggccgtggaaggggccgtggggatcgtggtggttttagaggcggatacggagggggatacagtcgtggcccagctgctgctgctccatccattgaagatcaagctcagttcccaagccttggtgggaagtgaagggcgcccagctgctgctgtcaccgagcgttgtgttgtctgctgttgtcatatttaaattttgtccgacgttacatttctgtgccacggtttaaacggaacaaataatggtgttgcatgtggctatctttggttatgtggtacttgacgttgaataccggagttgtttatcagaattagactccaaattttgtaggccagcttttaccattttgttgtcttagcatgctgccttgtaaccctctcgcagccctcgtccatgctgtgagtcacagtctaccagttcttgctctaagtgagacgaggttgccggtgctgggcttcacaatgccctccacggcagctacagccgagaacgcccagctcagcttgtttggctgcaattaatattagccgcagctagattaaagccgcagcaaacttgtcgcttcttgcttgcct

SEQ ID NO: 36704 - DNA, 2847 bp, Zea Mays
cggattcttcgatggagcggacgcggctgtcgacgccgatttcgccggccactgggacagcccttcctccaaccccgacgcgactacctgcgtcacaccagaggttgcggtggaatcggtgcacccggccgcacgcggacgcttcttcaacaacgattcgggtgcaccgcttgactcggacgacgacaactccgtccacggcgaccatggatccgtgatgtcccatctcctagagcacgagaccgacatcgccttccttccccactcggatcagcgggatggagtcgaggcgcgactcatcctgcgcgggtgcactcctgcctccttcaccatcgcctccatcggccccaacaacgagatctcgggcaccgtccccccggacgcgctcgccaaggccgcacccgtgctcttcgcttcgagggcgcctagaccatcgctcaagtacctggagctgctcctcccagcggaaatcggctccgaccacatcgaactaccgaccgctgccgccgcggggcacatcgtcgcccaagtcaccggcagcaacatgcactgccatgagcagggcatccttcaccaggacatcaagggctccaatctgctgatcgactaccccgacatgctcaagattggtgacttcggcctcgccaactacggcgctgggtgccgacaaccgctcaccagccgcgtcgtcacgctctggtaccgcacacctgtgctgctgctgaactccaccagctacagcgtcggcttcgacctctggagcgtgggttgcctcaacgagatcttcttcggcaagcccctcatgcccggcagtggcgagatgtaccagctgctgaagatcttcaagctgtgtgggtcacctccggatatggtcgaactccaacagcacatcaacaatggtcacgcggttctagttctaggtgcccaccgtgtgtttgaggaattgtcatcacatgttattgccacctgcaacaatggtgttggctcgacgatgcaagacctggcacatgctatcggtaatactgaagtgcggccaataccatggccatctttcagtttctctccaattggattggctccactattagcattggaatcaattgcagtggtaggtggaaggtgcatgctgcagaagagtgcgaaattcaagattatctataggctgagtagtgtgttggcttggtttgttggttctggtgaccaggaacttagatggttgtctagttatctattcatacattatggtaattcctggaagttagttgtgtatgatggccaagggcacatattggtgacaatgttgagctcaatttctattcgagaagtgggttcctttagatgtgtgctgaaattcatatgggtgcctattctggtcgtgggtgtcctagacttcatgatggtactatccatgattctacaacagtgtgatacaaaatcatctcgcagagtggagaaaagggagatttctaaaattacagatgcaacgatcatgcttttagaagaaatgaagccacatggtattaagtggaaaggagaaacctaccattgtccactgaatgcacttgcaacaacaaggcaaactgatcaagcttatgtcatatttagtggtacgagtgttgctgggcttatgcacagagattctgttcaattcaggccaataccatggtttttcttcagattgtgtagtgagcagcaagacattatggtgctcattgactctggatcttctcatacttttatcagtgacaaattgcgaccaatgttatcgggtgtggaacctctggttaacccaatcacagttcaactggctattagacaagttattccttgccattaccatttgccttcagccaagtggagtatgtcgggctgtcacttttcagcagacctgaagttcttgccaataccttcatttggtcaagttattacttgcaattatcaggtgccttcagttgagtggaccatgcatgttcgcagtttttcagtggatctcacgtttttactcttacccttgtttgatctggtcgtgggcatggacaggctacaacgatatagtcctatgctagtgaactggtctaacaaatggatgagcattccctatcaaggagcaactaggtgtttacaaggtgttcacccttctgtttccacaggagcaatagtggagctgtggttactctcggccacctcccagcagaaccgtttccctgacagcaagatgccaataatcaatactcaggtgcaggatattcattaccagtttttggatatttttgaggatctagttgggttgcctccaagcaggcctggtgatcacaatatccctctgttactcggtgcacatatgtttactgtgtgcctctatcagtacacaccgactctcaaagatcatgatacttggtatatggttcaagtgatctggtcagggatggatgcttcgcatgcaacttgggaggacgccgaagcgcagaagaatcactttccattagtggtcgcttggggacaagcggcgttcgaagaagggggaatgtcagcatcagcccttcgacagagcaggtcttgccggttgtggcacaggagcggttgaacgctgagttggatgatgggtcagaagagcaagctgatgatgggctgagaaggggcgttctgtcaaaggaaaatgaacccacgatgcacaagcagagactggagtatatatatagtaggaatgtgttgcggtagagggtatgaaatgtaataacctaaacttccacttgtttccgaccgtcacggcgctaccagctctctaccgtatctctctgttcctctgtatcttcctcttctctcatacatctccactagtaatctatt

SEQ ID NO: 36705 - DNA, 480 bp, Zea Mays
gtcagcatcagcccttcgacagagcagttggtatatggttcaagtgatctggtcagggatggatgcttcgcatgcaacttgggaggacgccgaagcgcagaagaatcactttccattagtggtcgcttggggacaagcggcgttcgaagaagggggaatgtcagcatcagcccttcgacagagcaggtcttgccggttgtggcacaggagcggttgaacgctgagttggatgatgggtcagaagagcaagctgatgatgggctgagaaggggcgttctgtcaaaggaaaatgaacccacgatgcacaagcagagactggagtatatatatagtaggaatgtgttgcggtagagggtatgaaatgtaataacctaaacttccacttgtttccgaccgtcacggcgctaccagctctctaccgtatctctctgttcctctgtatcttcctcttctctcatacatctccactagtaatctatt

SEQ ID NO: 36706 - DNA, 1692 bp, Zea Mays
gctatcttttcttggacactgtacaatacttggatccggtaaaaaaagtttgtacctcttataggtttctatttagtttttttctgccaatctcttcaagctaactcatgtacgtgtatgaatcacattgttatagtagctaacaatgtcagtagtgtaccaatcaataactgtattgcagtcaagaaaatagtaatttccttgactgattttgacatccccatggctttaacagtttaaaaactgaaaattgattctactatatttgtgttttaaggccttagtgtaggcgtacaatctacgtcgacgccaaaattaaatcaccttcctacatccatagttgatatgaactggtgagattcttactgatgcactaaatttcaatcttaggatactctttaattgatgtatgctttgcttcagtcgtataatattagagcaacttatcatcccccatgttttataatccatcctagcatggtacatttttttctgcacaattgtacatggaagcattagtcataggatatcggttgttgaagtacgtcgtcaagtgtacatggaagcattagtgcattgaacggccgaagaatcaccgcaggtacatggctgatgtgttcatcttctagaggatatcttgcaccagagtacaccattcaagggcagctgaacaaaaagagcgacgtctacagctttggtgtgctgctgttggagattgtcagtggcagatgccacactgatcctagattacccgttgacgagcagttcctcctagaaaaggtctggacactctatgagttcgatgatctcgagagcatcattgataggacactaaagcgcgattttgacaccgaggaagcactctggttgcttaaggtcttcttcccatgggcggatcattgtcgactggtggtgtcaggtcttcttcccatgggcggtgccctggagcgcctgattgtctcacgtatttgaccagcaacaagggacgaagattggagctgtgtggattgtgtggaggcgacacgggtcaggagcatttcatctgatcccttttctctgatggatatgctgatattcaaggctgtggaagagcaggtcaagaagagagtagagaataaggcaatgatcttcgagcagaatgccactgatagtgagtgcaaggtcgatcctaaagtgctctccaagctatatgatcattgggtggatgccacacaccaaggatgtctgccttgactaatcaccgattagctgtagctgtaaattttatgtatacatggtttcagttgcgctcgatccaattgtcttaaccttgaatggacattttgatgtttctttcatgaatgttcaggtcaacggcaagataaaccaattgcgttgtatgagttttagatcataactcaagttttttgtagatcttggtgctatttcatatgatgtgtcatgtttcagtgattgctttatagtgaacccgtaagatgtaaaatgacctttatgacagaaccatatgtaataacagagtattctgaggaacctttgttgaagtaaatgtaatcgagtttcctagcaatcttgttcctgcagacgagcattggaaaataacagagtattctgaggaaccttagtcgtattaagtttgtgtagaaagaaactgatcataatataatggataccttggagcaacaagattctttt

SEQ ID NO: 36707 - DNA, 2934 bp, Zea Mays
ggtacatttacttatcctggatgttcattttcttcttgcacttctgcagtgtttgttaaatagcattacagtaccatgaaagagcagtgacatattcatgcacttgccattatactttccttttcctgaactaactatataatcacttgataaagggacaaatactatgtcataattgttagttaagtatgttatcagctatcttttcttggacactgtacaatacttggatccggtaaaaaaagtttgtacctcttataggtttctatttagtttttttctgccaatctcttcaagctaactcatgtacgtgtatgaatcacattgttatagtagctaacaatgtcagtagtgtaccaatcaataactgtattgcagtcaagaaaatagtaatttccttgactgattttgacatccccatggctttaacagtttaaaaactgaaaattgattctactatatttgtgttttaaggccttagtgtaggcgtacaatctacgtcgacgccaaaattaaatcaccttcctacatccatagttgatatgaactggtgagattcttactgatgcactaaatttcaatcttaggatactctttaattgatgtatgctttgcttcagtcgtataatattagagcaacttatcatcccccatgttttataatccatcctagcatggtacatttttttctgcacaattgtacatggaagcattagtcataggatatcggttgttgaagtacgtcgtcaagtgtacatggaagcattagtgcattgaacggccgaagaatcaccgcaggtacatggctgatgtgttcatcttctagaggatatcttgcaccagagtacaccattcaagggcagctgaacaaaaagagcgacgtctacagctttggtgtgctgctgttggagattgtcagtggcagatgccacactgatcctagattacccgttgacgagcagttcctcctagaaaaggtctggacactctatgagttcgatgatctcgagagcatcattgataggacactaaagcgcgattttgacaccgaggaagcactctggttgcttaaggtaagtcttgtgtgcatcccggatagccctaagatcaagtcctccatgtcaatggttgccaagatgctgcaaggtgagtgtgttgtgggtgataggatcatgaggctggcctgatcacagacgtcatggacctgaaagtcaggatggtagagccggttcagttcagcttgacatcatgctcgagcactatcgcgttgtggcctggggcgcgatgcgcccactccttgttggggatttcccattcagctactacgagtcatgccgtgtaggtacgcggtaggtacgcgatctgtcccctctgttctggataagacgttctgatgtgatagtgatagaaatagaatagaacgatgtggtggtgccacacagcccacaatgtagacgacacttggctatcacgttcgttcgtctcactacagaagggtgtgtcgcggttttcttttttttcactaagcaaatgtgatgcttgttagatttggataagaaaccttttgttttacaatataattcactaattgtatcggccgatattcgattgtttttggttcaatattagatgttcaacaacatggttttttttgcttaaccaaataataatgttgcaaaagtactaaggttagcttgtttattgttgttgatgtgcccacacaaatacacatgtatgaggaatattgttagtattttccatgttcttttaggttgttgattcaatcgtgagggtcctcaattaaggtcgaatggatgcaatcaaaactagaagggtgtgcgccatcgaggatcactgcagctaaggcaatcgtgaaggctggaatcgttgttatggcaccgcaagctattagtgtgctaggtggatttaggcctcaagggaaaacgattgacaatgttgtaaaggttgtggagacaacacttgccatgcaggaggctggatgcttctctgttgtgtattagttgttggcagatgatttataagatattgagatcaaaatcaggatgtttccaaactgtctataatcaggatggctattgtagcttttacagtaggttggtattatatgtttccaatttgtgtttttattaaaccattgtctaattggtgtcaggtcttcttcccatgggcggatcattgtcgactggtggtgtcaggtcttcttcccatgggcggtgccctggagcgcctgattgtctcacgtatttgaccagcaacaagggacgaagattggagctgtgtggattgtgtggaggcgacacgggtcaggagcatttcatctgatttacagagaagtaaagagaagttgtttacatttagtcatcctctgtatctgaaacaagactatgtttctaccttgtctttctcatggttcttagcctatggccgaagcttccatgcttgattcttcaaacatccaatgcagatcccttttctctgatggatatgctgatattcaaggctgtggaagagcaggtcaagaagagagtagagaataaggcaatgatcttcgagcagaatgccactgatagtcaacggcaagataaaccaattgcgttgtatgagttttagatcataactcaagttttttgtagatcttggtgctatttcatatgatgtgtcatgtttcagtgattgctttatagtgaacccgtaagatgtaaaatgacctttatgacagaaccatatgtaataacagagtattctgaggaacctttgttgaagtaaatgtaatcgagtttcctagcaatcttgttcctgcagacgagcattggaaaataacagagtattctgaggaaccttagtcgtattaagtttgtgtagaaagaaactgatcataatataatggataccttggagcaacaagattctttt

SEQ ID NO: 36708 - DNA, 2194 bp, Zea Mays
gtttctacagctgtgtaggctgctgagcgatttagcatggtacatttttttctgcacaattgtacatggaagcattagtcataggatatcggttgttgaagtacgtcgtcaagtgtacatggaagcattagtgcattgaacggccgaagaatcaccgcaggtacatggctgatgtgttcatcttctagaggatatcttgcaccagagtacaccattcaagggcagctgaacaaaaagagcgacgtctacagctttggtgtgctgctgttggagattgtcagtggcagatgccacactgatcctagattacccgttgacgagcagttcctcctagaaaaggtctggacactctatgagttcgatgatctcgagagcatcattgataggacactaaagcgcgattttgacaccgaggaagcactctggttgcttaaggtaagtcttgtgtgcatcccggatagccctaagatcaagtcctccatgtcaatggttgccaagatgctgcaaggtgagtgtgttgtgggtgataggatcatgaggctggcctgatcacagacgtcatggacctgaaagtcaggatggtagagccggttcagttcagcttgacatcatgctcgagcactatcgcgttgtggcctggggcgcgatgcgcccactccttgttggggatttcccattcagctactacgagtcatgccgtgtaggtacgcggtaggtacgcgatctgtcccctctgttctggataagacgttctgatgtgatagtgatagaaatagaatagaacgatgtggtggtgccacacagcccacaatgtagacgacacttggctatcacgttcgttcgtctcactacagaagggtgtgtcgcggttttcttttttttcactaagcaaatgtgatgcttgttagatttggataagaaaccttttgttttacaatataattcactaattgtatcggccgatattcgattgtttttggttcaatattagatgttcaacaacatggttttttttgcttaaccaaataataatgttgcaaaagtactaaggttagcttgtttattgttgttgatgtgcccacacaaatacacatgtatgaggaatattgttagtattttccatgttcttttaggttgttgattcaatcgtgagggtcctcaattaaggtcgaatggatgcaatcaaaactagaagggtgtgcgccatcgaggatcactgcagctaaggcaatcgtgaaggctggaatcgttgttatggcaccgcaagctattagtgtgctaggtggatttaggcctcaagggaaaacgattgacaatgttgtaaaggttgtggagacaacacttgccatgcaggaggctggatgcttctctgttgtgtattagttgttggcagatgatttataagatattgagatcaaaatcaggatgtttccaaactgtctataatcaggatggctattgtagcttttacagtaggtcttcttcccatgggcggtgccctggagcgcctgattgtctcacgtatttgaccagcaacaagggacgaagattggagctgtgtggattgtgtggaggcgacacgggtcaggagcatttcatctgatttacagagaagtaaagagaagttgtttacatttagtcatcctctgtatctgaaacaagactatgtttctaccttgtctttctcatggttcttagcctatggccgaagcttccatgcttgattcttcaaacatccaatgcagatcccttttctctgatggatatgctgatattcaaggctgtggaagagcaggtcaagaagagagtagagaataaggcaatgatcttcgagcagaatgccactgatagtcaacggcaagataaaccaattgcgttgtatgagttttagatcataactcaagttttttgtagatcttggtgctatttcatatgatgtgtcatgtttcagtgattgctttatagtgaacccgtaagatgtaaaatgacctttatgacagaaccatatgtaataacagagtattctgaggaacctttgttgaagtaaatgtaatcgagtttcctagcaatcttgttcctgcagacgagcattggaaaataacagagtattctgaggaaccttagtcgtattaagtttgtgtagaaagaaactgatcataatataatggataccttggagcaacaagattctttt

SEQ ID NO: 36709 - DNA, 2271 bp, Zea Mays
gtttctacagctgtgtaggctgctgagcgatttaggccttagtgtaggcgtacaatctacgtcgacgccaaaattaaatcaccttcctacatccatagttgatatgaactggtgagattcttactgatgcactaaatttcaatcttaggatactctttaattgatgtatgctttgcttcagtcgtataatattagagcaacttatcatcccccatgttttataatccatcctagcatggtacatttttttctgcacaattgtacatggaagcattagtcataggatatcggttgttgaagtacgtcgtcaagtgtacatggaagcattagtgcattgaacggccgaagaatcaccgcaggtacatggctgatgtgttcatcttctagaggatatcttgcaccagagtacaccattcaagggcagctgaacaaaaagagcgacgtctacagctttggtgtgctgctgttggagattgtcagtggcagatgccacactgatcctagattacccgttgacgagcagttcctcctagaaaaggtctggacactctatgagttcgatgatctcgagagcatcattgataggacactaaagcgcgattttgacaccgaggaagcactctggttgcttaaggtaagtcttgtgtgcatcccggatagccctaagatcaagtcctccatgtcaatggttgccaagatgctgcaaggtgagtgtgttgtgggtgataggatcatgaggctggcctgatcacagacgtcatggacctgaaagtcaggatggtagagccggttcagttcagcttgacatcatgctcgagcactatcgcgttgtggcctggggcgcgatgcgcccactccttgttggggatttcccattcagctactacgagtcatgccgtgtaggtacgcggtaggtacgcgatctgtcccctctgttctggataagacgttctgatgtgatagtgatagaaatagaatagaacgatgtggtggtgccacacagcccacaatgtagacgacacttggctatcacgttcgttcgtctcactacagaagggtgtgtcgcggttttcttttttttcactaagcaaatgtgatgcttgttagatttggataagaaaccttttgttttacaatataattcactaattgtatcggccgatattcgattgtttttggttcaatattagatgttcaacaacatggttttttttgcttaaccaaataataatgttgcaaaagtactaaggttagcttgtttattgttgttgatgtgcccacacaaatacacatgtatgaggaatattgttagtattttccatgttcttttaggttgttgattcaatcgtgagggtcctcaattaaggtcgaatggatgcaatcaaaactagaagggtgtgcgccatcgaggatcactgcagctaaggcaatcgtgaaggctggaatcgttgttatggcaccgcaagctattagtgtgctaggtggatttaggcctcaagggaaaacgattgacaatgttgtaaaggttgtggagacaacacttgccatgcaggaggctggatgcttctctgttgtgtattagttgttggcagatgatttataagatattgagatcaaaatcaggatgtttccaaactgtctataatcaggatggctattgtagcttttacagtaggttggtattatatgtttccaatttgtgtttttattaaaccattgtctaattggtgtcaggtcttcttcccatgggcggatcattgtcgactggtggtgtcaggtcttcttcccatgggcggtgccctggagcgcctgattgtctcacatcccttttctctgatggatatgctgatattcaaggctgtggaagagcaggtcaagaagagagtagagaataaggcaatgatcttcgagcagaatgccactgatagtcaacggcaagataaaccaattgcgttgtatgagttttagatcataactcaagttttttgtagatcttggtgctatttcatatgatgtgtcatgtttcagtgattgctttatagtgaacccgtaagatgtaaaatgacctttatgacagaaccatatgtaataacagagtattctgaggaacctttgttgaagtaaatgtaatcgagtttcctagcaatcttgttcctgcagacgagcattggaaaataacagagtattctgaggaaccttagtcgtattaagtttgtgtagaaagaaactgatcataatataatggataccttggagcaacaagattctttt

SEQ ID NO: 36710 - DNA, 2205 bp, Zea Mays
gtttctacagctgtgtaggctgctgagcgatttagcatggtacatttttttctgcacaattgtacatggaagcattagtcataggatatcggttgttgaagtacgtcgtcaagtgtacatggaagcattagtgcattgaacggccgaagaatcaccgcaggtacatggctgatgtgttcatcttctagaggatatcttgcaccagagtacaccattcaagggcagctgaacaaaaagagcgacgtctacagctttggtgtgctgctgttggagattgtcagtggcagatgccacactgatcctagattacccgttgacgagcagttcctcctagaaaaggtctggacactctatgagttcgatgatctcgagagcatcattgataggacactaaagcgcgattttgacaccgaggaagcactctggttgcttaaggtaagtcttgtgtgcatcccggatagccctaagatcaagtcctccatgtcaatggttgccaagatgctgcaaggtgagtgtgttgtgggtgataggatcatgaggctggcctgatcacagacgtcatggacctgaaagtcaggatggtagagccggttcagttcagcttgacatcatgctcgagcactatcgcgttgtggcctggggcgcgatgcgcccactccttgttggggatttcccattcagctactacgagtcatgccgtgtaggtacgcggtaggttgttgattcaatcgtgagggtcctcaattaaggtcgaatggatgcaatcaaaactagaagggtgtgcgccatcgaggatcactgcagctaaggcaatcgtgaaggctggaatcgttgttatggcaccgcaagctattagtgtgctaggtggatttaggcctcaagggaaaacgattgacaatgttgtaaaggttgtggagacaacacttgccatgcaggaggctggatgcttctctgttgtgtattagttgttggcagatgatttataagatattgagatcaaaatcaggatgtttccaaactgtctataatcaggatggctattgtagcttttacagtaggttggtattatatgtttccaatttgtgtttttattaaaccattgtctaattggtgtcaggtcttcttcccatgggcggatcattgtcgactggtggtgtcaggtcttcttcccatgggcggtgccctggagcgcctgattgtctcacgtatttgaccagcaacaagggacgaagattggagctgtgtggattgtgtggaggcgacacgggtcaggagcatttcatctggtgagtaccgagtacatcccaatccttcttttctctgtgaaaattgtagatgtgtatgtccggctgcagagtttgtgtctttctaaaaattgatatgcctgctaaattgttgtcctgtcttttgggcagatttacagagaagtaaagagaagttgtttacatttagtcatcctctgtatctgaaacaagactatgtttctaccttgtctttctcatggttcttagcctatggccgaagcttccatgcttgattcttcaaacatccaatgcagatcccttttctctgatggatatgctgatattcaaggctgtggaagagcaggtcaagaagagagtagagaataaggcaatgatcttcgagcagaatgccactgatagtgagtgcaaggtcgatcctaaagtgctctccaagctatatgatcattgggtggatgccacacaccaaggatgtctgccttgactaatcaccgattagctgtagctgtaaattttatgtatacatggtttcagttgcgctcgatccaattgtcttaaccttgaatggacattttgatgtttctttcatgaatgttcaggtcaacggcaagataaaccaattgcgttgtatgagttttagatcataactcaagttttttgtagatcttggtgctatttcatatgatgtgtcatgtttcagtgattgctttatagtgaacccgtaagatgtaaaatgacctttatgacagaaccatatgtaataacagagtattctgaggaacctttgttgaagtaaatgtaatcgagtttcctagcaatcttgttcctgcagacgagcattggaaaataacagagtattctgaggaaccttagtcgtattaagtttgtgtagaaagaaactgatcataatataatggataccttggagcaacaagattctttt

SEQ ID NO: 36711 - DNA, 2003 bp, Zea Mays
cagaactcgaggtttctacagctgtgtaggctgctgagcgatttagcatggtacatttttttctgcacaattgtacatggaagcattagtcataggatatcggttgttgaagtacgtcgtcaagtgtacatggaagcattagtgcattgaacggccgaagaatcaccgcaggtacatggctgatgtgttcatcttctagaggatatcttgcaccagagtacaccattcaagggcagctgaacaaaaagagcgacgtctacagctttggtgtgctgctgttggagattgtcagtggcagatgccacactgatcctagattacccgttgacgagcagttcctcctagaaaaggtctggacactctatgagttcgatgatctcgagagcatcattgataggacactaaagcgcgattttgacaccgaggaagcactctggttgcttaaggatcatgaggctggcctgatcacagacgtcatggacctgaaagtcaggatggtagagccggttcagttcagcttgacatcatgctcgagcactatcgcgttgtggcctggggcgcgatgcgcccactccttgttggggatttcccattcagctactacgagtcatgccgtgtaggtacgcggtaggtacgcgatctgtcccctctgttctggataagacgttctgatgtgatagtgatagaaatagaatagaacgatgtggtggtgccacacagcccacaatgtagacgacacttggctatcacgttcgttcgtctcactacagaagggtgtgtcgcggttttcttttttttcactaagcaaatgtgatgcttgttagatttggataagaaaccttttgttttacaatataattcactaattgtatcggccgatattcgattgtttttggttcaatattagatgttcaacaacatggttttttttgcttaaccaaataataatgttgcaaaagtactaaggttagcttgtttattgttgttgatgtgcccacacaaatacacatgtatgaggaatattgttagtattttccatgttcttttaggttgttgattcaatcgtgagggtcctcaattaaggtcgaatggatgcaatcaaaactagaagggtgtgcgccatcgaggatcactgcagctaaggcaatcgtgaaggctggaatcgttgttatggcaccgcaagctattagtgtgctaggtggatttaggcctcaagggaaaacgattgacaatgttgtaaaggtcttcttcccatgggcggatcattgtcgactggtggtgtcaggtcttcttcccatgggcggtgccctggagcgcctgattgtctcacgtatttgaccagcaacaagggacgaagattggagctgtgtggattgtgtggaggcgacacgggtcaggagcatttcatctgatttacagagaagtaaagagaagttgtttacatttagtcatcctctgtatctgaaacaagactatgtttctaccttgtctttctcatggttcttagcctatggccgaagcttccatgcttgattcttcaaacatccaatgcagatcccttttctctgatggatatgctgatattcaaggctgtggaagagcaggtcaagaagagagtagagaataaggcaatgatcttcgagcagaatgccactgatagtcaacggcaagataaaccaattgcgttgtatgagttttagatcataactcaagttttttgtagatcttggtgctatttcatatgatgtgtcatgtttcagtgattgctttatagtgaacccgtaagatgtaaaatgacctttatgacagaaccatatgtaataacagagtattctgaggaacctttgttgaagtaaatgtaatcgagtttcctagcaatcttgttcctgcagacgagcattggaaaataacagagtattctgaggaaccttagtcgtattaagtttgtgtagaaagaaactgatcataatataatggataccttggagcaacaagattctttt

SEQ ID NO: 36712 - DNA, 2861 bp, Zea Mays
cccgtctcacgaacccgtcccctcacatccctcgcgttgccattgcttggtcctctccgcgcccgccgcccctgctcggctgctccccatgtcccgcgccgcggtgacaaggatccgagaacacccctgcggacgcatccgggattcaaggcctcccctcccttcccctgcccccaccccctcggtgatgcccggatccacgactgctaccgtccagcctcgttctccgtccgcgaccgcttcacggtggcgcagacgctggaggtgtccacagggggcgacaccgtgaccctgcctccgttcgacatcagcgcccctccccccaccaccgtcgatttgtagaagctcctcgcccgttcttgcttcaccagcgattcggggaggccatgcccccctcggccgcaccccttctcctcctcgccgcatcccgcctctgggcagccgcgccacccctccctccacctcgccgtctcctacctcctccccctcgaccgcatctgcctccctctgtggcctcgctaccaaggtcaagatcgtcgagatttgttagggtttggggtttttgcggttgactctgaatcccgccgccgctgctcgcgcaggaggcctcgagctcccagtgctcccctcctcaaccaccctgggtaagtggctcccagattgatagggaaagagttcggactgtaggggctattgaatacttgattgatgccacaagatctggaaatgtgtcccgctatatcaatcacagaagttgttccccaaatctcagcacccgattggttttggtagagagcaaagattgccagcttgctcacattagcttgtttgctaatcaaaacattgccgtaggagaagaactcgcctatgattaccgacaaaagcttgtagcaggcgatggctgcttctgccattgtgggggccttagtgtaggcgtacaatctacgtcgacgccaaaattaaatcaccttcctacatccatagttgatatgaactggtgagattcttactgatgcactaaatttcaatcttaggatactctttaattgatgtatgctttgcttcagtcgtataatattagagcaacttatcatcccccatgttttataatccatcctagcatggtacatttttttctgcacaattgtacatggaagcattagtcataggatatcggttgttgaagtacgtcgtcaagtgtacatggaagcattagtgcattgaacggccgaagaatcaccgcaggtacatggctgatgtgttcatcttctagaggatatcttgcaccagagtacaccattcaagggcagctgaacaaaaagagcgacgtctacagctttggtgtgctgctgttggagattgtcagtggcagatgccacactgatcctagattacccgttgacgagcagttcctcctagaaaaggtctggacactctatgagttcgatgatctcgagagcatcattgataggacactaaagcgcgattttgacaccgaggaagcactctggttgcttaaggtaagtcttgtgtgcatcccggatagccctaagatcaagtcctccatgtcaatggttgccaagatgctgcaaggtgagtgtgttgtgggtgataggatcatgaggctggcctgatcacagacgtcatggacctgaaagtcaggatggtagagccggttcagttcagcttgacatcatgctcgagcactatcgcgttgtggcctggggcgcgatgcgcccactccttgttggggatttcccattcagctactacgagtcatgccgtgtaggtacgcggtaggttgttgattcaatcgtgagggtcctcaattaaggtcgaatggatgcaatcaaaactagaagggtgtgcgccatcgaggatcactgcagctaaggcaatcgtgaaggctggaatcgttgttatggcaccgcaagctattagtgtgctaggtggatttaggcctcaagggaaaacgattgacaatgttgtaaaggttgtggagacaacacttgccatgcaggaggctggatgcttctctgttgtgtattagttgttggcagatgatttataagatattgagatcaaaatcaggatgtttccaaactgtctataatcaggatggctattgtagcttttacagtaggtcttcttcccatgggcggtgccctggagcgcctgattgtctcacgtatttgaccagcaacaagggacgaagattggagctgtgtggattgtgtggaggcgacacgggtcaggagcatttcatctgatttacagagaagtaaagagaagttgtttacatttagtcatcctctgtatctgaaacaagactatgtttctaccttgtctttctcatggttcttagcctatggccgaagcttccatgcttgattcttcaaacatccaatgcagatcccttttctctgatggatatgctgatattcaaggctgtggaagagcaggtcaagaagagagtagagaataaggcaatgatcttcgagcagaatgccactgatagtcaacggcaagataaaccaattgcgttgtatgagttttagatcataactcaagttttttgtagatcttggtgctatttcatatgatgtgtcatgtttcagtgattgctttatagtgaacccgtaagatgtaaaatgacctttatgacagaaccatatgtaataacagagtattctgaggaacctttgttgaagtaaatgtaatcgagtttcctagcaatcttgttcctgcagacgagcattggaaaataacagagtattctgaggaaccttagtcgtattaagtttgtgtagaaagaaactgatcataatataatggataccttggagcaacaagattctttt

SEQ ID NO: 36713 - DNA, 2942 bp, Zea Mays
cccgtctcacgaacccgtcccctcacatccctcgcgttgccattgcttggtcctctccgcgcccgccgcccctgctcggctgctccccatgtcccgcgccgcggtgacaaggatccgagaacacccctgcggacgcatccgggattcaaggcctcccctcccttcccctgcccccaccccctcggtgatgcccggatccacgactgctaccgtccagcctcgttctccgtccgcgaccgcttcacggtggcgcagacgctggaggtgtccacagggggcgacaccgtgaccctgcctccgttcgacatcagcgcccctccccccaccaccgtcgatttgtagaagctcctcgcccgttcttgcttcaccagcgattcggggaggccatgcccccctcggccgcaccccttctcctcctcgccgcatcccgcctctgggcagccgcgccacccctccctccacctcgccgtctcctacctcctccccctcgaccgcatctgcctccctctgtggcctcgctaccaaggtcaagatcgtcgagatttgttagggtttggggtttttgcggttgactctgaatcccgccgccgctgctcgcgcaggaggcctcgagctcccagtgctcccctcctcaaccaccctgggtaagtggctcccagattgatagggaaagagttcggactgtaggggctattgaatacttgattgatgccacaagatctggaaatgtgtcccgctatatcaatcacagaagttgttccccaaatctcagcacccgattggttttggtagagagcaaagattgccagcttgctcacattagcttgtttgctaatcaaaacattgccgtaggagaagaactcgcctatgattaccgacaaaagcttgtagcaggcgatggctgcttctgccattgtgggggtaccaattgccgaggccgtgtctattgacttcgcaggaagacactaaactgttcaacgcttggttgcagaactcgaggtttctacagctgtgtaggctgctgagcgatttaggtggtacatttacttatcctggatgttcattttcttcttgcacttctgcagtgtttgttaaatagcattacagtaccatgaaagagcagtgacatattcatgcacttgccattatactttccttttcctgaactaactatataatcacttgataaagggacaaatactatgtcataattgttagttaagtatgttatcagctatcttttcttggacactgtacaatacttggatccggtaaaaaaagtttgtacctcttataggtttctatttagtttttttctgccaatctcttcaagctaactcatgtacgtgtatgaatcacattgttatagtagctaacaatgtcagtagtgtaccaatcaataactgtattgcagtcaagaaaatagtaatttccttgactgattttgacatccccatggctttaacagtttaaaaactgaaaattgattctactatatttgtgttttaaggccttagtgtaggcgtacaatctacgtcgacgccaaaattaaatcaccttcctacatccatagttgatatgaactggtgagattcttactgatgcactaaatttcaatcttaggatactctttaattgatgtatgctttgcttcagtcgtataatattagagcaacttatcatcccccatgttttataatccatcctagcatggtacatttttttctgcacaattgtacatggaagcattagtcataggatatcggttgttgaagtacgtcgtcaagtgtacatggaagcattagtgcattgaacggccgaagaatcaccgcagtaattttctaccacccatcttttgctttgtttccttttagattcagattcagctacactttcttaactaggacatgcttaatccagggtacatggctgatgtgttcatcttctagaggatatcttgcaccagagtacaccattcaagggcagctgaacaaaaagagcgacgtctacagctttggtgtgctgctgttggagattgtcagtggcagatgccacactgatcctagattacccgttgacgagcagttcctcctagaaaaggtctggacactctatgagttcgatgatctcgagagcatcattgataggacactaaagcgcgattttgacaccgaggaagcactctggttgcttaaggttgtggagacaacacttgccatgcaggaggctggatgcttctctgttgtgtattagttgttggcagatgatttataagatattgagatcaaaatcaggatgtttccaaactgtctataatcaggatggctattgtagcttttacagtaggttggtattatatgtttccaatttgtgtttttattaaaccattgtctaattggtgtcaggtcttcttcccatgggcggatcattgtcgactggtggtgtcaggtcttcttcccatgggcggtgccctggagcgcctgattgtctcacatcccttttctctgatggatatgctgatattcaaggctgtggaagagcaggtcaagaagagagtagagaataaggcaatgatcttcgagcagaatgccactgatagtcaacggcaagataaaccaattgcgttgtatgagttttagatcataactcaagttttttgtagatcttggtgctatttcatatgatgtgtcatgtttcagtgattgctttatagtgaacccgtaagatgtaaaatgacctttatgacagaaccatatgtaataacagagtattctgaggaacctttgttgaagtaaatgtaatcgagtttcctagcaatcttgttcctgcagacgagcattggaaaataacagagtattctgaggaaccttagtcgtattaagtttgtgtagaaagaaactgatcataatataatggataccttggagcaacaagattctttt

SEQ ID NO: 36714 - DNA, 3018 bp, Zea Mays
cccgtctcacgaacccgtcccctcacatccctcgcgttgccattgcttggtcctctccgcgcccgccgcccctgctcggctgctccccatgtcccgcgccgcggtgacaaggatccgagaacacccctgcggacgcatccgggattcaaggcctcccctcccttcccctgcccccaccccctcggtgatgcccggatccacgactgctaccgtccagcctcgttctccgtccgcgaccgcttcacggtggcgcagacgctggaggtgtccacagggggcgacaccgtgaccctgcctccgttcgacatcagcgcccctccccccaccaccgtcgatttgtagaagctcctcgcccgttcttgcttcaccagcgattcggggaggccatgcccccctcggccgcaccccttctcctcctcgccgcatcccgcctctgggcagccgcgccacccctccctccacctcgccgtctcctacctcctccccctcgaccgcatctgcctccctctgtggcctcgctaccaaggtcaagatcgtcgagatttgttagggtttggggtttttgcggttgactctgaatcccgccgccgctgctcgcgcaggaggcctcgagctcccagtgctcccctcctcaaccaccctgggtaagtggctcccagattgatagggaaagagttcggactgtaggggctattgaatacttgattgatgccacaagatctggaaatgtgtcccgctatatcaatcacagaagttgttccccaaatctcagcacccgattggttttggtagagagcaaagattgccagcttgctcacattagcttgtttgctaatcaaaacattgccgtaggagaagaactcgcctatgattaccgacaaaagcttgtagcaggcgatggctgcttctgccattgtgggggccttagtgtaggcgtacaatctacgtcgacgccaaaattaaatcaccttcctacatccatagttgatatgaactggtgagattcttactgatgcactaaatttcaatcttaggatactctttaattgatgtatgctttgcttcagtcgtataatattagagcaacttatcatcccccatgttttataatccatcctagcatggtacatttttttctgcacaattgtacatggaagcattagtcataggatatcggttgttgaagtacgtcgtcaagtgtacatggaagcattagtgcattgaacggccgaagaatcaccgcaggtacatggctgatgtgttcatcttctagaggatatcttgcaccagagtacaccattcaagggcagctgaacaaaaagagcgacgtctacagctttggtgtgctgctgttggagattgtcagtggcagatgccacactgatcctagattacccgttgacgagcagttcctcctagaaaaggtctggacactctatgagttcgatgatctcgagagcatcattgataggacactaaagcgcgattttgacaccgaggaagcactctggttgcttaaggtaagtcttgtgtgcatcccggatagccctaagatcaagtcctccatgtcaatggttgccaagatgctgcaaggtgagtgtgttgtgggtgataggatcatgaggctggcctgatcacagacgtcatggacctgaaagtcaggatggtagagccggttcagttcagcttgacatcatgctcgagcactatcgcgttgtggcctggggcgcgatgcgcccactccttgttggggatttcccattcagctactacgagtcatgccgtgtaggtacgcggtaggttgttgattcaatcgtgagggtcctcaattaaggtcgaatggatgcaatcaaaactagaagggtgtgcgccatcgaggatcactgcagctaaggcaatcgtgaaggctggaatcgttgttatggcaccgcaagctattagtgtgctaggtggatttaggcctcaagggaaaacgattgacaatgttgtaaaggttgtggagacaacacttgccatgcaggaggctggatgcttctctgttgtgtattagttgttggcagatgatttataagatattgagatcaaaatcaggatgtttccaaactgtctataatcaggatggctattgtagcttttacagtaggttggtattatatgtttccaatttgtgtttttattaaaccattgtctaattggtgtcaggtcttcttcccatgggcggatcattgtcgactggtggtgtcaggtcttcttcccatgggcggtgccctggagcgcctgattgtctcacgtatttgaccagcaacaagggacgaagattggagctgtgtggattgtgtggaggcgacacgggtcaggagcatttcatctgatcccttttctctgatggatatgctgatattcaaggctgtggaagagcaggtcaagaagagagtagagaataaggcaatgatcttcgagcagaatgccactgatagtgagtgcaaggtcgatcctaaagtgctctccaagctatatgatcattgggtggatgccacacaccaaggatgtctgccttgactaatcaccgattagctgtagctgtaaattttatgtatacatggtttcagttgcgctcgatccaattgtcttaaccttgaatggacattttgatgtttctttcatgaatgttcaggtcaacggcaagataaaccaattgcgttgtatgagttttagatcataactcaagttttttgtagatcttggtgctatttcatatgatgtgtcatgtttcagtgattgctttatagtgaacccgtaagatgtaaaatgacctttatgacagaaccatatgtaataacagagtattctgaggaacctttgttgaagtaaatgtaatcgagtttcctagcaatcttgttcctgcagacgagcattggaaaataacagagtattctgaggaaccttagtcgtattaagtttgtgtagaaagaaactgatcataatataatggataccttggagcaacaagattctttt

SEQ ID NO: 36715 - DNA, 2655 bp, Zea Mays
cccgtctcacgaacccgtcccctcacatccctcgcgttgccattgcttggtcctctccgcgcccgccgcccctgctcggctgctccccatgtcccgcgccgcggtgacaaggatccgagaacacccctgcggacgcatccgggattcaaggcctcccctcccttcccctgcccccaccccctcggtgatgcccggatccacgactgctaccgtccagcctcgttctccgtccgcgaccgcttcacggtggcgcagacgctggaggtgtccacagggggcgacaccgtgaccctgcctccgttcgacatcagcgcccctccccccaccaccgtcgatttgtagaagctcctcgcccgttcttgcttcaccagcgattcggggaggccatgcccccctcggccgcaccccttctcctcctcgccgcatcccgcctctgggcagccgcgccacccctccctccacctcgccgtctcctacctcctccccctcgaccgcatctgcctccctctgtggcctcgctaccaaggaggcctcgagctcccagtgctcccctcctcaaccaccctgggtaagtggctcccagattgatagggaaagagttcggactgtaggggctattgaatacttgattgatgccacaagatctggaaatgtgtcccgctatatcaatcacagattgccgtaggagaagaactcgcctatgattaccgacaaaagcttgtagcaggcgatggctgcttctgccattgtggggaactcgaggtttctacagctgtgtaggctgctgagcgatttaggtggtacatttacttatcctggatgttcattttcttcttgcacttctgcagtgtttgttaaatagcattacagtaccatgaaagagcagtgacatattcatgcacttgccattatactttccttttcctgaactaactatataatcacttgataaagggacaaatactatgtcataattgttagttaagtatgttatcagctatcttttcttggacactgtacaatacttggatccggtaaaaaaagtttgtacctcttataggtttctatttagtttttttctgccaatctcttcaagctaactcatgtacgtgtatgaatcacattgttatagtagctaacaatgtcagtagtgtaccaatcaataactgtattgcagtcaagaaaatagtaatttccttgactgattttgacatccccatggctttaacagtttaaaaactgaaaattgattctactatatttgtgttttaaggccttagtgtaggcgtacaatctacgtcgacgccaaaattaaatcaccttcctacatccatagttgatatgaactggtgagattcttactgatgcactaaatttcaatcttaggatactctttaattgatgtatgctttgcttcagtcgtataatattagagcaacttatcatcccccatgttttataatccatcctagcatggtacatttttttctgcacaattgtacatggaagcattagtcataggatatcggttgttgaagtacgtcgtcaagtgtacatggaagcattagtgcattgaacggccgaagaatcaccgcaggtacatggctgatgtgttcatcttctagaggatatcttgcaccagagtacaccattcaagggcagctgaacaaaaagagcgacgtctacagctttggtgtgctgctgttggagattgtcagtggcagatgccacactgatcctagattacccgttgacgagcagttcctcctagaaaaggtctggacactctatgagttcgatgatctcgagagcatcattgataggacactaaagcgcgattttgacaccgaggaagcactctggttgcttaaggtaagtcttgtgtgcatcccggatagccctaagatcaagtcctccatgtcaatggttgccaagatgctgcaagggtcctcaattaaggtcgaatggatgcaatcaaaactagaagggtgtgcgccatcgaggatcactgcagctaaggcaatcgtgaaggctggaatcgttgttatggcaccgcaagctattagtgtgctaggtggatttaggcctcaagggaaaacgattgacaatgttgtaaaggtcttcttcccatgggcggatcattgtcgactggtggtgtcaggtcttcttcccatgggcggtgccctggagcgcctgattgtctcacatcccttttctctgatggatatgctgatattcaaggctgtggaagagcaggtcaagaagagagtagagaataaggcaatgatcttcgagcagaatgccactgatagtcaacggcaagataaaccaattgcgttgtatgagttttagatcataactcaagttttttgtagatcttggtgctatttcatatgatgtgtcatgtttcagtgattgctttatagtgaacccgtaagatgtaaaatgacctttatgacagaaccatatgtaataacagagtattctgaggaacctttgttgaagtaaatgtaatcgagtttcctagcaatcttgttcctgcagacgagcattggaaaataacagagtattctgaggaaccttagtcgtattaagtttgtgtagaaagaaactgatcataatataatggataccttggagcaacaagattctttt

SEQ ID NO: 36716 - DNA, 3135 bp, Zea Mays
cccgtctcacgaacccgtcccctcacatccctcgcgttgccattgcttggtcctctccgcgcccgccgcccctgctcggctgctccccatgtcccgcgccgcggtgacaaggatccgagaacacccctgcggacgcatccgggattcaaggcctcccctcccttcccctgcccccaccccctcggtgatgcccggatccacgactgctaccgtccagcctcgttctccgtccgcgaccgcttcacggtggcgcagacgctggaggtgtccacagggggcgacaccgtgaccctgcctccgttcgacatcagcgcccctccccccaccaccgtcgatttgtagaagctcctcgcccgttcttgcttcaccagcgattcggggaggccatgcccccctcggccgcaccccttctcctcctcgccgcatcccgcctctgggcagccgcgccacccctccctccacctcgccgtctcctacctcctccccctcgaccgcatctgcctccctctgtggcctcgctaccaaggaggcctcgagctcccagtgctcccctcctcaaccaccctgggtaagtggctcccagattgatagggaaagagttcggactgtaggggctattgaatacttgattgatgccacaagatctggaaatgtgtcccgctatatcaatcacagaagttgttccccaaatctcagcacccgattggttttggtagagagcaaagattgccagcttgctcacattagcttgtttgctaatcaaaacattgccgtaggagaagaactcgcctatgattaccgacaaaagcttgtagcaggcgatggctgcttctgccattgtgggggccttagtgtaggcgtacaatctacgtcgacgccaaaattaaatcaccttcctacatccatagttgatatgaactgcatggtacatttttttctgcacaattgtacatggaagcattagtcataggatatcggttgttgaagtacgtcgtcaagtgtacatggaagcattagtgcattgaacggccgaagaatcaccgcaggtacatggctgatgtgttcatcttctagaggatatcttgcaccagagtacaccattcaagggcagctgaacaaaaagagcgacgtctacagctttggtgtgctgctgttggagattgtcagtggcagatgccacactgatcctagattacccgttgacgagcagttcctcctagaaaaggtctggacactctatgagttcgatgatctcgagagcatcattgataggacactaaagcgcgattttgacaccgaggaagcactctggttgcttaaggtaagtcttgtgtgcatcccggatagccctaagatcaagtcctccatgtcaatggttgccaagatgctgcaaggtgagtgtgttgtgggtgataggatcatgaggctggcctgatcacagacgtcatggacctgaaagtcaggatggtagagccggttcagttcagcttgacatcatgctcgagcactatcgcgttgtggcctggggcgcgatgcgcccactccttgttggggatttcccattcagctactacgagtcatgccgtgtaggtacgcggtaggtacgcgatctgtcccctctgttctggataagacgttctgatgtgatagtgatagaaatagaatagaacgatgtggtggtgccacacagcccacaatgtagacgacacttggctatcacgttcgttcgtctcactacagaagggtgtgtcgcggttttcttttttttcactaagcaaatgtgatgcttgttagatttggataagaaaccttttgttttacaatataattcactaattgtatcggccgatattcgattgtttttggttcaatattagatgttcaacaacatggttttttttgcttaaccaaataataatgttgcaaaagtactaaggttagcttgtttattgttgttgatgtgcccacacaaatacacatgtatgaggaatattgttagtattttccatgttcttttaggttgttgattcaatcgtgagggtcctcaattaaggtcgaatggatgcaatcaaaactagaagggtgtgcgccatcgaggatcactgcagctaaggcaatcgtgaaggctggaatcgttgttatggcaccgcaagctattagtgtgctaggtggatttaggcctcaagggaaaacgattgacaatgttgtaaaggttgtggagacaacacttgccatgcaggaggctggatgcttctctgttgtgtattagttgttggcagatgatttataagatattgagatcaaaatcaggatgtttccaaactgtctataatcaggatggctattgtagcttttacagtaggtcttcttcccatgggcggtgccctggagcgcctgattgtctcacgtatttgaccagcaacaagggacgaagattggagctgtgtggattgtgtggaggcgacacgggtcaggagcatttcatctgatcccttttctctgatggatatgctgatattcaaggctgtggaagagcaggtcaagaagagagtagagaataaggcaatgatcttcgagcagaatgccactgatagtgagtgcaaggtcgatcctaaagtgctctccaagctatatgatcattgggtggatgccacacaccaaggatgtctgccttgactaatcaccgattagctgtagctgtaaattttatgtatacatggtttcagttgcgctcgatccaattgtcttaaccttgaatggacattttgatgtttctttcatgaatgttcaggtcaacggcaagataaaccaattgcgttgtatgagttttagatcataactcaagttttttgtagatcttggtgctatttcatatgatgtgtcatgtttcagtgattgctttatagtgaacccgtaagatgtaaaatgacctttatgacagaaccatatgtaataacagagtattctgaggaacctttgttgaagtaaatgtaatcgagtttcctagcaatcttgttcctgcagacgagcattggaaaataacagagtattctgaggaaccttagtcgtattaagtttgtgtagaaagaaactgatcataatataatggataccttggagcaacaagattctttt

SEQ ID NO: 36717 - DNA, 3251 bp, Zea Mays
cccgtctcacgaacccgtcccctcacatccctcgcgttgccattgcttggtcctctccgcgcccgccgcccctgctcggctgctccccatgtcccgcgccgcggtgacaaggatccgagaacacccctgcggacgcatccgggattcaaggcctcccctcccttcccctgcccccaccccctcggtgatgcccggatccacgactgctaccgtccagcctcgttctccgtccgcgaccgcttcacggtggcgcagacgctggaggtgtccacagggggcgacaccgtgaccctgcctccgttcgacatcagcgcccctccccccaccaccgtcgatttgtagaagctcctcgcccgttcttgcttcaccagcgattcggggaggccatgcccccctcggccgcaccccttctcctcctcgccgcatcccgcctctgggcagccgcgccacccctccctccacctcgccgtctcctacctcctccccctcgaccgcatctgcctccctctgtggcctcgctaccaaggaggcctcgagctcccagtgctcccctcctcaaccaccctgggtaagtggctcccagattgatagggaaagagttcggactgtaggggctattgaatacttgattgatgccacaagatctggaaatgtgtcccgctatatcaatcacagaagttgttccccaaatctcagcacccgattggttttggtagagagcaaagattgccagcttgctcacattagcttgtttgctaatcaaaacattgccgtaggagaagaactcgcctatgattaccgacaaaagcttgtagcaggcgatggctgcttctgccattgtgggggtaccaattgccgaggccgtgtctattgacttcgcaggaagacactaaactgttcaacgcttggttgcagaactcgaggtttctacagctgtgtaggctgctgagcgatttaggtggtacatttacttatcctggatgttcattttcttcttgcacttctgcagtgtttgttaaatagcattacagtaccatgaaagagcagtgacatattcatgcacttgccattatactttccttttcctgaactaactatataatcacttgataaagggacaaatactatgtcataattgttagttaagtatgttatcagctatcttttcttggacactgtacaatacttggatccggtaaaaaaagtttgtacctcttataggtttctatttagtttttttctgccaatctcttcaagctaactcatgtacgtgtatgaatcacattgttatagtagctaacaatgtcagtagtgtaccaatcaataactgtattgcagtcaagaaaatagtaatttccttgactgattttgacatccccatggctttaacagtttaaaaactgaaaattgattctactatatttgtgttttaaggccttagtgtaggcgtacaatctacgtcgacgccaaaattaaatcaccttcctacatccatagttgatatgaactggtgagattcttactgatgcactaaatttcaatcttaggatactctttaattgatgtatgctttgcttcagtcgtataatattagagcaacttatcatcccccatgttttataatccatcctagcatggtacatttttttctgcacaattgtacatggaagcattagtcataggatatcggttgttgaagtacgtcgtcaagtgtacatggaagcattagtgcattgaacggccgaagaatcaccgcaggtacatggctgatgtgttcatcttctagaggatatcttgcaccagagtacaccattcaagggcagctgaacaaaaagagcgacgtctacagctttggtgtgctgctgttggagattgtcagtggcagatgccacactgatcctagattacccgttgacgagcagttcctcctagaaaaggtctggacactctatgagttcgatgatctcgagagcatcattgataggacactaaagcgcgattttgacaccgaggaagcactctggttgcttaaggttgttgattcaatcgtgagggtcctcaattaaggtcgaatggatgcaatcaaaactagaagggtgtgcgccatcgaggatcactgcagctaaggcaatcgtgaaggctggaatcgttgttatggcaccgcaagctattagtgtgctaggtggatttaggcctcaagggaaaacgattgacaatgttgtaaaggttgtggagacaacacttgccatgcaggaggctggatgcttctctgttgtgtattagttgttggcagatgatttataagatattgagatcaaaatcaggatgtttccaaactgtctataatcaggatggctattgtagcttttacagtaggttggtattatatgtttccaatttgtgtttttattaaaccattgtctaattggtgtcaggtcttcttcccatgggcggatcattgtcgactggtggtgtcaggtcttcttcccatgggcggtgccctggagcgcctgattgtctcacgtatttgaccagcaacaagggacgaagattggagctgtgtggattgtgtggaggcgacacgggtcaggagcatttcatctgatcccttttctctgatggatatgctgatattcaaggctgtggaagagcaggtcaagaagagagtagagaataaggcaatgatcttcgagcagaatgccactgatagtgagtgcaaggtcgatcctaaagtgctctccaagctatatgatcattgggtggatgccacacaccaaggatgtctgccttgactaatcaccgattagctgtagctgtaaattttatgtatacatggtttcagttgcgctcgatccaattgtcttaaccttgaatggacattttgatgtttctttcatgaatgttcaggtcaacggcaagataaaccaattgcgttgtatgagttttagatcataactcaagttttttgtagatcttggtgctatttcatatgatgtgtcatgtttcagtgattgctttatagtgaacccgtaagatgtaaaatgacctttatgacagaaccatatgtaataacagagtattctgaggaacctttgttgaagtaaatgtaatcgagtttcctagcaatcttgttcctgcagacgagcattggaaaataacagagtattctgaggaaccttagtcgtattaagtttgtgtagaaagaaactgatcataatataatggataccttggagcaacaagattctttt

SEQ ID NO: 36718 - DNA, 3955 bp, Zea Mays
cccgtctcacgaacccgtcccctcacatccctcgcgttgccattgcttggtcctctccgcgcccgccgcccctgctcggctgctccccatgtcccgcgccgcggtgacaaggatccgagaacacccctgcggacgcatccgggattcaaggcctcccctcccttcccctgcccccaccccctcggtgatgcccggatccacgactgctaccgtccagcctcgttctccgtccgcgaccgcttcacggtggcgcagacgctggaggtgtccacagggggcgacaccgtgaccctgcctccgttcgacatcagcgcccctccccccaccaccgtcgatttgtagaagctcctcgcccgttcttgcttcaccagcgattcggggaggccatgcccccctcggccgcaccccttctcctcctcgccgcatcccgcctctgggcagccgcgccacccctccctccacctcgccgtctcctacctcctccccctcgaccgcatctgcctccctctgtggcctcgctaccaaggtcaagatcgtcgagatttgttagggtttggggtttttgcggttgactctgaatcccgccgccgctgctcgcgcaggaggcctcgagctcccagtgctcccctcctcaaccaccctgggtaagtggctcccagattgatagggaaagagttcggactgtaggggctattgaatacttgattgatgccacaagatctggaaatgtgtcccgctatatcaatcacagaagttgttccccaaatctcagcacccgattggttttggtagagagcaaagattgccagcttgctcacattagcttgtttgctaatcaaaacattgccgtaggagaagaactcgcctatgattaccgacaaaagcttgtagcaggcgatggctgcttctgccattgtggggaactcgaggtttctacagctgtgtaggctgctgagcgatttaggtggtacatttacttatcctggatgttcattttcttcttgcacttctgcagtgtttgttaaatagcattacagtaccatgaaagagcagtgacatattcatgcacttgccattatactttccttttcctgaactaactatataatcacttgataaagggacaaatactatgtcataattgttagttaagtatgttatcagctatcttttcttggacactgtacaatacttggatccggtaaaaaaagtttgtacctcttataggtttctatttagtttttttctgccaatctcttcaagctaactcatgtacgtgtatgaatcacattgttatagtagctaacaatgtcagtagtgtaccaatcaataactgtattgcagtcaagaaaatagtaatttccttgactgattttgacatccccatggctttaacagtttaaaaactgaaaattgattctactatatttgtgttttaaggccttagtgtaggcgtacaatctacgtcgacgccaaaattaaatcaccttcctacatccatagttgatatgaactggtgagattcttactgatgcactaaatttcaatcttaggatactctttaattgatgtatgctttgcttcagtcgtataatattagagcaacttatcatcccccatgttttataatccatcctagcatggtacatttttttctgcacaattgtacatggaagcattagtcataggatatcggttgttgaagtacgtcgtcaagtgtacatggaagcattagtgcattgaacggccgaagaatcaccgcaggtacatggctgatgtgttcatcttctagaggatatcttgcaccagagtacaccattcaagggcagctgaacaaaaagagcgacgtctacagctttggtgtgctgctgttggagattgtcagtggcagatgccacactgatcctagattacccgttgacgagcagttcctcctagaaaaggtctggacactctatgagttcgatgatctcgagagcatcattgataggacactaaagcgcgattttgacaccgaggaagcactctggttgcttaaggtaagtcttgtgtgcatcccggatagccctaagatcaagtcctccatgtcaatggttgccaagatgctgcaaggtgagtgtgttgtgggtgataggatcatgaggctggcctgatcacagacgtcatggacctgaaagtcaggatggtagagccggttcagttcagcttgacatcatgctcgagcactatcgcgttgtggcctggggcgcgatgcgcccactccttgttggggatttcccattcagctactacgagtcatgccgtgtaggtacgcggtaggtacgcgatctgtcccctctgttctggataagacgttctgatgtgatagtgatagaaatagaatagaacgatgtggtggtgccacacagcccacaatgtagacgacacttggctatcacgttcgttcgtctcactacagaagggtgtgtcgcggttttcttttttttcactaagcaaatgtgatgcttgttagatttggataagaaaccttttgttttacaatataattcactaattgtatcggccgatattcgattgtttttggttcaatattagatgttcaacaacatggttttttttgcttaaccaaataataatgttgcaaaagtactaaggttagcttgtttattgttgttgatgtgcccacacaaatacacatgtatgaggaatattgttagtattttccatgttcttttaggttgttgattcaatcgtgagggtcctcaattaaggtcgaatggatgcaatcaaaactagaagggtgtgcgccatcgaggatcactgcagctaaggcaatcgtgaaggctggaatcgttgttatggcaccgcaagctattagtgtgctaggtggatttaggcctcaagggaaaacgattgacaatgttgtaaaggttgtggagacaacacttgccatgcaggaggctggatgcttctctgttgtgtattagttgttggcagatgatttataagatattgagatcaaaatcaggatgtttccaaactgtctataatcaggatggctattgtagcttttacagtaggttggtattatatgtttccaatttgtgtttttattaaaccattgtctaattggtgtcaggtcttcttcccatgggcggatcattgtcgactggtggtgtcaggtcttcttcccatgggcggtgccctggagcgcctgattgtctcacgtatttgaccagcaacaagggacgaagattggagctgtgtggattgtgtggaggcgacacgggtcaggagcatttcatctgatcccttttctctgatggatatgctgatattcaaggctgtggaagagcaggtcaagaagagagtagagaataaggcaatgatcttcgagcagaatgccactgatagtgagtgcaaggtcgatcctaaagtgctctccaagctatatgatcattgggtggatgccacacaccaaggatgtctgccttgactaatcaccgattagctgtagctgtaaattttatgtatacatggtttcagttgcgctcgatccaattgtcttaaccttgaatggacattttgatgtttctttcatgaatgttcaggtcaacggcaagataaaccaattgcgttgtatgagttttagatcataactcaagttttttgtagatcttggtgctatttcatatgatgtgtcatgtttcagtgattgctttatagtgaacccgtaagatgtaaaatgacctttatgacagaaccatatgtaataacagagtattctgaggaacctttgttgaagtaaatgtaatcgagtttcctagcaatcttgttcctgcagacgagcattggaaaataacagagtattctgaggaaccttagtcgtattaagtttgtgtagaaagaaactgatcataatataatggataccttggagcaacaagattctttt

SEQ ID NO: 36719 - DNA, 3178 bp, Zea Mays
cccgtctcacgaacccgtcccctcacatccctcgcgttgccattgcttggtcctctccgcgcccgccgcccctgctcggctgctccccatgtcccgcgccgcggtgacaaggatccgagaacacccctgcggacgcatccgggattcaaggcctcccctcccttcccctgcccccaccccctcggtgatgcccggatccacgactgctaccgtccagcctcgttctccgtccgcgaccgcttcacggtggcgcagacgctggaggtgtccacagggggcgacaccgtgaccctgcctccgttcgacatcagcgcccctccccccaccaccgtcgatttgtagaagctcctcgcccgttcttgcttcaccagcgattcggggaggccatgcccccctcggccgcaccccttctcctcctcgccgcatcccgcctctgggcagccgcgccacccctccctccacctcgccgtctcctacctcctccccctcgaccgcatctgcctccctctgtggcctcgctaccaaggtcaagatcgtcgagatttgttagggtttggggtttttgcggttgactctgaatcccgccgccgctgctcgcgcaggaggcctcgagctcccagtgctcccctcctcaaccaccctgggtaagtggctcccagattgatagggaaagagttcggactgtaggggctattgaatacttgattgatgccacaagatctggaaatgtgtcccgctatatcaatcacagaagttgttccccaaatctcagcacccgattggttttggtagagagcaaagattgccagcttgctcacattagcttgtttgctaatcaaaacattgccgtaggagaagaactcgcctatgattaccgacaaaagcttgtagcaggcgatggctgcttctgccattgtggggaactcgaggtttctacagctgtgtaggctgctgagcgatttagcatggtacatttttttctgcacaattgtacatggaagcattagtcataggatatcggttgttgaagtacgtcgtcaagtgtacatggaagcattagtgcattgaacggccgaagaatcaccgcaggtacatggctgatgtgttcatcttctagaggatatcttgcaccagagtacaccattcaagggcagctgaacaaaaagagcgacgtctacagctttggtgtgctgctgttggagattgtcagtggcagatgccacactgatcctagattacccgttgacgagcagttcctcctagaaaaggtctggacactctatgagttcgatgatctcgagagcatcattgataggacactaaagcgcgattttgacaccgaggaagcactctggttgcttaaggtaagtcttgtgtgcatcccggatagccctaagatcaagtcctccatgtcaatggttgccaagatgctgcaaggtgagtgtgttgtgggtgataggatcatgaggctggcctgatcacagacgtcatggacctgaaagtcaggatggtagagccggttcagttcagcttgacatcatgctcgagcactatcgcgttgtggcctggggcgcgatgcgcccactccttgttggggatttcccattcagctactacgagtcatgccgtgtaggtacgcggtaggtacgcgatctgtcccctctgttctggataagacgttctgatgtgatagtgatagaaatagaatagaacgatgtggtggtgccacacagcccacaatgtagacgacacttggctatcacgttcgttcgtctcactacagaagggtgtgtcgcggttttcttttttttcactaagcaaatgtgatgcttgttagatttggataagaaaccttttgttttacaatataattcactaattgtatcggccgatattcgattgtttttggttcaatattagatgttcaacaacatggttttttttgcttaaccaaataataatgttgcaaaagtactaaggttagcttgtttattgttgttgatgtgcccacacaaatacacatgtatgaggaatattgttagtattttccatgttcttttaggttgttgattcaatcgtgagggtcctcaattaaggtcgaatggatgcaatcaaaactagaagggtgtgcgccatcgaggatcactgcagctaaggcaatcgtgaaggctggaatcgttgttatggcaccgcaagctattagtgtgctaggtggatttaggcctcaagggaaaacgattgacaatgttgtaaaggttgtggagacaacacttgccatgcaggaggctggatgcttctctgttgtgtattagttgttggcagatgatttataagatattgagatcaaaatcaggatgtttccaaactgtctataatcaggatggctattgtagcttttacagtaggtcttcttcccatgggcggtgccctggagcgcctgattgtctcacgtatttgaccagcaacaagggacgaagattggagctgtgtggattgtgtggaggcgacacgggtcaggagcatttcatctgatcccttttctctgatggatatgctgatattcaaggctgtggaagagcaggtcaagaagagagtagagaataaggcaatgatcttcgagcagaatgccactgatagtgagtgcaaggtcgatcctaaagtgctctccaagctatatgatcattgggtggatgccacacaccaaggatgtctgccttgactaatcaccgattagctgtagctgtaaattttatgtatacatggtttcagttgcgctcgatccaattgtcttaaccttgaatggacattttgatgtttctttcatgaatgttcaggtcaacggcaagataaaccaattgcgttgtatgagttttagatcataactcaagttttttgtagatcttggtgctatttcatatgatgtgtcatgtttcagtgattgctttatagtgaacccgtaagatgtaaaatgacctttatgacagaaccatatgtaataacagagtattctgaggaacctttgttgaagtaaatgtaatcgagtttcctagcaatcttgttcctgcagacgagcattggaaaataacagagtattctgaggaaccttagtcgtattaagtttgtgtagaaagaaactgatcataatataatggataccttggagcaacaagattctttt

SEQ ID NO: 36720 - DNA, 2490 bp, Zea Mays
cccgtctcacgaacccgtcccctcacatccctcgcgttgccattgcttggtcctctccgcgcccgccgcccctgctcggctgctccccatgtcccgcgccgcggtgacaaggatccgagaacacccctgcggacgcatccgggattcaaggcctcccctcccttcccctgcccccaccccctcggtgatgcccggatccacgactgctaccgtccagcctcgttctccgtccgcgaccgcttcacggtggcgcagacgctggaggtgtccacagggggcgacaccgtgaccctgcctccgttcgacatcagcgcccctccccccaccaccgtcgatttgtagaagctcctcgcccgttcttgcttcaccagcgattcggggaggccatgcccccctcggccgcaccccttctcctcctcgccgcatcccgcctctgggcagccgcgccacccctccctccacctcgccgtctcctacctcctccccctcgaccgcatctgcctccctctgtggcctcgctaccaaggtcaagatcgtcgagatttgttagggtttggggtttttgcggttgactctgaatcccgccgccgctgctcgcgcaggaggcctcgagctcccagtgctcccctcctcaaccaccctgggtaagtggctcccagattgatagggaaagagttcggactgtaggggctattgaatacttgattgatgccacaagatctggaaatgtgtcccgctatatcaatcacagaagttgttccccaaatctcagcacccgattggttttggtagagagcaaagattgccagcttgctcacattagcttgtttgctaatcaaaacattgccgtaggagaagaactcgcctatgattaccgacaaaagcttgtagcaggcgatggctgcttctgccattgtgggggccttagtgtaggcgtacaatctacgtcgacgccaaaattaaatcaccttcctacatccatagttgatatgaactggtgagattcttactgatgcactaaatttcaatcttaggatactctttaattgatgtatgctttgcttcagtcgtataatattagagcaacttatcatcccccatgttttataatccatcctagcatggtacatttttttctgcacaattgtacatggaagcattagtcataggatatcggttgttgaagtacgtcgtcaagtgtacatggaagcattagtgcattgaacggccgaagaatcaccgcaggtacatggctgatgtgttcatcttctagaggatatcttgcaccagagtacaccattcaagggcagctgaacaaaaagagcgacgtctacagctttggtgtgctgctgttggagattgtcagtggcagatgccacactgatcctagattacccgttgacgagcagttcctcctagaaaaggtctggacactctatgagttcgatgatctcgagagcatcattgataggacactaaagcgcgattttgacaccgaggaagcactctggttgcttaaggttgtggagacaacacttgccatgcaggaggctggatgcttctctgttgtgtattagttgttggcagatgatttataagatattgagatcaaaatcaggatgtttccaaactgtctataatcaggatggctattgtagcttttacagtaggttggtattatatgtttccaatttgtgtttttattaaaccattgtctaattggtgtcaggtcttcttcccatgggcggatcattgtcgactggtggtgtcaggtcttcttcccatgggcggtgccctggagcgcctgattgtctcacgtatttgaccagcaacaagggacgaagattggagctgtgtggattgtgtggaggcgacacgggtcaggagcatttcatctgatttacagagaagtaaagagaagttgtttacatttagtcatcctctgtatctgaaacaagactatgtttctaccttgtctttctcatggttcttagcctatggccgaagcttccatgcttgattcttcaaacatccaatgcagatcccttttctctgatggatatgctgatattcaaggctgtggaagagcaggtcaagaagagagtagagaataaggcaatgatcttcgagcagaatgccactgatagtcaacggcaagataaaccaattgcgttgtatgagttttagatcataactcaagttttttgtagatcttggtgctatttcatatgatgtgtcatgtttcagtgattgctttatagtgaacccgtaagatgtaaaatgacctttatgacagaaccatatgtaataacagagtattctgaggaacctttgttgaagtaaatgtaatcgagtttcctagcaatcttgttcctgcagacgagcattggaaaataacagagtattctgaggaaccttagtcgtattaagtttgtgtagaaagaaactgatcataatataatggataccttggagcaacaagattctttt

SEQ ID NO: 36721 - DNA, 3253 bp, Zea Mays
cccgtctcacgaacccgtcccctcacatccctcgcgttgccattgcttggtcctctccgcgcccgccgcccctgctcggctgctccccatgtcccgcgccgcggtgacaaggatccgagaacacccctgcggacgcatccgggattcaaggcctcccctcccttcccctgcccccaccccctcggtgatgcccggatccacgactgctaccgtccagcctcgttctccgtccgcgaccgcttcacggtggcgcagacgctggaggtgtccacagggggcgacaccgtgaccctgcctccgttcgacatcagcgcccctccccccaccaccgtcgatttgtagaagctcctcgcccgttcttgcttcaccagcgattcggggaggccatgcccccctcggccgcaccccttctcctcctcgccgcatcccgcctctgggcagccgcgccacccctccctccacctcgccgtctcctacctcctccccctcgaccgcatctgcctccctctgtggcctcgctaccaaggaggcctcgagctcccagtgctcccctcctcaaccaccctgggtaagtggctcccagattgatagggaaagagttcggactgtaggggctattgaatacttgattgatgccacaagatctggaaatgtgtcccgctatatcaatcacagaagttgttccccaaatctcagcacccgattggttttggtagagagcaaagattgccagcttgctcacattagcttgtttgctaatcaaaacattgccgtaggagaagaactcgcctatgattaccgacaaaagcttgtagcaggcgatggctgcttctgccattgtggggaactcgaggtttctacagctgtgtaggctgctgagcgatttaggccttagtgtaggcgtacaatctacgtcgacgccaaaattaaatcaccttcctacatccatagttgatatgaactggtgagattcttactgatgcactaaatttcaatcttaggatactctttaattgatgtatgctttgcttcagtcgtataatattagagcaacttatcatcccccatgttttataatccatcctagcatggtacatttttttctgcacaattgtacatggaagcattagtcataggatatcggttgttgaagtacgtcgtcaagtgtacatggaagcattagtgcattgaacggccgaagaatcaccgcaggtacatggctgatgtgttcatcttctagaggatatcttgcaccagagtacaccattcaagggcagctgaacaaaaagagcgacgtctacagctttggtgtgctgctgttggagattgtcagtggcagatgccacactgatcctagattacccgttgacgagcagttcctcctagaaaaggtctggacactctatgagttcgatgatctcgagagcatcattgataggacactaaagcgcgattttgacaccgaggaagcactctggttgcttaaggatcatgaggctggcctgatcacagacgtcatggacctgaaagtcaggatggtagagccggttcagttcagcttgacatcatgctcgagcactatcgcgttgtggcctggggcgcgatgcgcccactccttgttggggatttcccattcagctactacgagtcatgccgtgtaggtacgcggtaggtacgcgatctgtcccctctgttctggataagacgttctgatgtgatagtgatagaaatagaatagaacgatgtggtggtgccacacagcccacaatgtagacgacacttggctatcacgttcgttcgtctcactacagaagggtgtgtcgcggttttcttttttttcactaagcaaatgtgatgcttgttagatttggataagaaaccttttgttttacaatataattcactaattgtatcggccgatattcgattgtttttggttcaatattagatgttcaacaacatggttttttttgcttaaccaaataataatgttgcaaaagtactaaggttagcttgtttattgttgttgatgtgcccacacaaatacacatgtatgaggaatattgttagtattttccatgttcttttaggttgttgattcaatcgtgagggtcctcaattaaggtcgaatggatgcaatcaaaactagaagggtgtgcgccatcgaggatcactgcagctaaggcaatcgtgaaggctggaatcgttgttatggcaccgcaagctattagtgtgctaggtggatttaggcctcaagggaaaacgattgacaatgttgtaaaggttgtggagacaacacttgccatgcaggaggctggatgcttctctgttgtgtattagttgttggcagatgatttataagatattgagatcaaaatcaggatgtttccaaactgtctataatcaggatggctattgtagcttttacagtaggttggtattatatgtttccaatttgtgtttttattaaaccattgtctaattggtgtcaggtcttcttcccatgggcggatcattgtcgactggtggtgtcaggtcttcttcccatgggcggtgccctggagcgcctgattgtctcacgtatttgaccagcaacaagggacgaagattggagctgtgtggattgtgtggaggcgacacgggtcaggagcatttcatctgatttacagagaagtaaagagaagttgtttacatttagtcatcctctgtatctgaaacaagactatgtttctaccttgtctttctcatggttcttagcctatggccgaagcttccatgcttgattcttcaaacatccaatgcagatcccttttctctgatggatatgctgatattcaaggctgtggaagagcaggtcaagaagagagtagagaataaggcaatgatcttcgagcagaatgccactgatagtcaacggcaagataaaccaattgcgttgtatgagttttagatcataactcaagttttttgtagatcttggtgctatttcatatgatgtgtcatgtttcagtgattgctttatagtgaacccgtaagatgtaaaatgacctttatgacagaaccatatgtaataacagagtattctgaggaacctttgttgaagtaaatgtaatcgagtttcctagcaatcttgttcctgcagacgagcattggaaaataacagagtattctgaggaaccttagtcgtattaagtttgtgtagaaagaaactgatcataatataatggataccttggagcaacaagattctttt

SEQ ID NO: 36722 - DNA, 3479 bp, Zea Mays
cccgtctcacgaacccgtcccctcacatccctcgcgttgccattgcttggtcctctccgcgcccgccgcccctgctcggctgctccccatgtcccgcgccgcggtgacaaggatccgagaacacccctgcggacgcatccgggattcaaggcctcccctcccttcccctgcccccaccccctcggtgatgcccggatccacgactgctaccgtccagcctcgttctccgtccgcgaccgcttcacggtggcgcagacgctggaggtgtccacagggggcgacaccgtgaccctgcctccgttcgacatcagcgcccctccccccaccaccgtcgatttgtagaagctcctcgcccgttcttgcttcaccagcgattcggggaggccatgcccccctcggccgcaccccttctcctcctcgccgcatcccgcctctgggcagccgcgccacccctccctccacctcgccgtctcctacctcctccccctcgaccgcatctgcctccctctgtggcctcgctaccaaggtcaagatcgtcgagatttgttagggtttggggtttttgcggttgactctgaatcccgccgccgctgctcgcgcaggaggcctcgagctcccagtgctcccctcctcaaccaccctgggtaagtggctcccagattgatagggaaagagttcggactgtaggggctattgaatacttgattgatgccacaagatctggaaatgtgtcccgctatatcaatcacagaagttgttccccaaatctcagcacccgattggttttggtagagagcaaagattgccagcttgctcacattagcttgtttgctaatcaaaacattgccgtaggagaagaactcgcctatgattaccgacaaaagcttgtagcaggcgatggctgcttctgccattgtggggaactcgaggtttctacagctgtgtaggctgctgagcgatttaggccttagtgtaggcgtacaatctacgtcgacgccaaaattaaatcaccttcctacatccatagttgatatgaactggtgagattcttactgatgcactaaatttcaatcttaggatactctttaattgatgtatgctttgcttcagtcgtataatattagagcaacttatcatcccccatgttttataatccatcctagcatggtacatttttttctgcacaattgtacatggaagcattagtcataggatatcggttgttgaagtacgtcgtcaagtgtacatggaagcattagtgcattgaacggccgaagaatcaccgcaggtacatggctgatgtgttcatcttctagaggatatcttgcaccagagtacaccattcaagggcagctgaacaaaaagagcgacgtctacagctttggtgtgctgctgttggagattgtcagtggcagatgccacactgatcctagattacccgttgacgagcagttcctcctagaaaaggtctggacactctatgagttcgatgatctcgagagcatcattgataggacactaaagcgcgattttgacaccgaggaagcactctggttgcttaaggtaagtcttgtgtgcatcccggatagccctaagatcaagtcctccatgtcaatggttgccaagatgctgcaaggtgagtgtgttgtgggtgataggatcatgaggctggcctgatcacagacgtcatggacctgaaagtcaggatggtagagccggttcagttcagcttgacatcatgctcgagcactatcgcgttgtggcctggggcgcgatgcgcccactccttgttggggatttcccattcagctactacgagtcatgccgtgtaggtacgcggtaggtacgcgatctgtcccctctgttctggataagacgttctgatgtgatagtgatagaaatagaatagaacgatgtggtggtgccacacagcccacaatgtagacgacacttggctatcacgttcgttcgtctcactacagaagggtgtgtcgcggttttcttttttttcactaagcaaatgtgatgcttgttagatttggataagaaaccttttgttttacaatataattcactaattgtatcggccgatattcgattgtttttggttcaatattagatgttcaacaacatggttttttttgcttaaccaaataataatgttgcaaaagtactaaggttagcttgtttattgttgttgatgtgcccacacaaatacacatgtatgaggaatattgttagtattttccatgttcttttaggttgttgattcaatcgtgagggtcctcaattaaggtcgaatggatgcaatcaaaactagaagggtgtgcgccatcgaggatcactgcagctaaggcaatcgtgaaggctggaatcgttgttatggcaccgcaagctattagtgtgctaggtggatttaggcctcaagggaaaacgattgacaatgttgtaaaggttgtggagacaacacttgccatgcaggaggctggatgcttctctgttgtgtattagttgttggcagatgatttataagatattgagatcaaaatcaggatgtttccaaactgtctataatcaggatggctattgtagcttttacagtaggttggtattatatgtttccaatttgtgtttttattaaaccattgtctaattggtgtcaggtcttcttcccatgggcggatcattgtcgactggtggtgtcaggtcttcttcccatgggcggtgccctggagcgcctgattgtctcacgtatttgaccagcaacaagggacgaagattggagctgtgtggattgtgtggaggcgacacgggtcaggagcatttcatctgatcccttttctctgatggatatgctgatattcaaggctgtggaagagcaggtcaagaagagagtagagaataaggcaatgatcttcgagcagaatgccactgatagtgagtgcaaggtcgatcctaaagtgctctccaagctatatgatcattgggtggatgccacacaccaaggatgtctgccttgactaatcaccgattagctgtagctgtaaattttatgtatacatggtttcagttgcgctcgatccaattgtcttaaccttgaatggacattttgatgtttctttcatgaatgttcaggtcaacggcaagataaaccaattgcgttgtatgagttttagatcataactcaagttttttgtagatcttggtgctatttcatatgatgtgtcatgtttcagtgattgctttatagtgaacccgtaagatgtaaaatgacctttatgacagaaccatatgtaataacagagtattctgaggaacctttgttgaagtaaatgtaatcgagtttcctagcaatcttgttcctgcagacgagcattggaaaataacagagtattctgaggaaccttagtcgtattaagtttgtgtagaaagaaactgatcataatataatggataccttggagcaacaagattctttt

SEQ ID NO: 36723 - DNA, 2633 bp, Zea Mays
cccgtctcacgaacccgtcccctcacatccctcgcgttgccattgcttggtcctctccgcgcccgccgcccctgctcggctgctccccatgtcccgcgccgcggtgacaaggatccgagaacacccctgcggacgcatccgggattcaaggcctcccctcccttcccctgcccccaccccctcggtgatgcccggatccacgactgctaccgtccagcctcgttctccgtccgcgaccgcttcacggtggcgcagacgctggaggtgtccacagggggcgacaccgtgaccctgcctccgttcgacatcagcgcccctccccccaccaccgtcgatttgtagaagctcctcgcccgttcttgcttcaccagcgattcggggaggccatgcccccctcggccgcaccccttctcctcctcgccgcatcccgcctctgggcagccgcgccacccctccctccacctcgccgtctcctacctcctccccctcgaccgcatctgcctccctctgtggcctcgctaccaaggtcaagatcgtcgagatttgttagggtttggggtttttgcggttgactctgaatcccgccgccgctgctcgcgcaggaggcctcgagctcccagtgctcccctcctcaaccaccctgggtaagtggctcccagattgatagggaaagagttcggactgtaggggctattgaatacttgattgatgccacaagatctggaaatgtgtcccgctatatcaatcacagaagttgttccccaaatctcagcacccgattggttttggtagagagcaaagattgccagcttgctcacattagcttgtttgctaatcaaaacattgccgtaggagaagaactcgcctatgattaccgacaaaagcttgtagcaggcgatggctgcttctgccattgtgggggccttagtgtaggcgtacaatctacgtcgacgccaaaattaaatcaccttcctacatccatagttgatatgaactggacatgcttaatccagggtacatggctgatgtgttcatcttctagaggatatcttgcaccagagtacaccattcaagggcagctgaacaaaaagagcgacgtctacagctttggtgtgctgctgttggagattgtcagtggcagatgccacactgatcctagattacccgttgacgagcagttcctcctagaaaaggtctggacactctatgagttcgatgatctcgagagcatcattgataggacactaaagcgcgattttgacaccgaggaagcactctggttgcttaaggatcatgaggctggcctgatcacagacgtcatggacctgaaagtcaggatggtagagccggttcagttcagcttgacatcatgctcgagcactatcgcgttgtggcctggggcgcgatgcgcccactccttgttggggatttcccattcagctactacgagtcatgccgtgtaggtacgcggttgttgattcaatcgtgagggtcctcaattaaggtcgaatggatgcaatcaaaactagaagggtgtgcgccatcgaggatcactgcagctaaggcaatcgtgaaggctggaatcgttgttatggcaccgcaagctattagtgtgctaggtggatttaggcctcaagggaaaacgattgacaatgttgtaaaggttgtggagacaacacttgccatgcaggaggctggatgcttctctgttgtgtattagttgttggcagatgatttataagatattgagatcaaaatcaggatgtttccaaactgtctataatcaggatggctattgtagcttttacagtaggttggtattatatgtttccaatttgtgtttttattaaaccattgtctaattggtgtcaggtcttcttcccatgggcggatcattgtcgactggtggtgtcaggtcttcttcccatgggcggtgccctggagcgcctgattgtctcacgtatttgaccagcaacaagggacgaagattggagctgtgtggattgtgtggaggcgacacgggtcaggagcatttcatctgatttacagagaagtaaagagaagttgtttacatttagtcatcctctgtatctgaaacaagactatgtttctaccttgtctttctcatggttcttagcctatggccgaagcttccatgcttgattcttcaaacatccaatgcagatcccttttctctgatggatatgctgatattcaaggctgtggaagagcaggtcaagaagagagtagagaataaggcaatgatcttcgagcagaatgccactgatagtcaacggcaagataaaccaattgcgttgtatgagttttagatcataactcaagttttttgtagatcttggtgctatttcatatgatgtgtcatgtttcagtgattgctttatagtgaacccgtaagatgtaaaatgacctttatgacagaaccatatgtaataacagagtattctgaggaacctttgttgaagtaaatgtaatcgagtttcctagcaatcttgttcctgcagacgagcattggaaaataacagagtattctgaggaaccttagtcgtattaagtttgtgtagaaagaaactgatcataatataatggataccttggagcaacaagattctttt

SEQ ID NO: 36724 - DNA, 3016 bp, Zea Mays
cccccgtctcacgaacccgtcccctcacatccctcgcgttgccattgcttggtcctctccgcgcccgccgcccctgctcggctgctccccatgtcccgcgccgcggtgacaaggatccgagaacacccctgcggacgcatccgggattcaaggcctcccctcccttcccctgcccccaccccctcggtgatgcccggatccacgactgctaccgtccagcctcgttctccgtccgcgaccgcttcacggtggcgcagacgctggaggtgtccacagggggcgacaccgtgaccctgcctccgttcgacatcagcgcccctccccccaccaccgtcgatttgtagaagctcctcgcccgttcttgcttcaccagcgattcggggaggccatgcccccctcggccgcaccccttctcctcctcgccgcatcccgcctctgggcagccgcgccacccctccctccacctcgccgtctcctacctcctccccctcgaccgcatctgcctccctctgtggcctcgctaccaaggtcaagatcgtcgagatttgttagggtttggggtttttgcggttgactctgaatcccgccgccgctgctcgcgcaggaggcctcgagctcccagtgctcccctcctcaaccaccctgggtaagtggctcccagattgatagggaaagagttcggactgtaggggctattgaatacttgattgatgccacaagatctggaaatgtgtcccgctatatcaatcacagaagttgttccccaaatctcagcacccgattggttttggtagagagcaaagattgccagcttgctcacattagcttgtttgctaatcaaaacattgccgtaggagaagaactcgcctatgattaccgacaaaagcttgtagcaggcgatggctgcttctgccattgtgggggccttagtgtaggcgtacaatctacgtcgacgccaaaattaaatcaccttcctacatccatagttgatatgaactggtgagattcttactgatgcactaaatttcaatcttaggatactctttaattgatgtatgctttgcttcagtcgtataatattagagcaacttatcatcccccatgttttataatccatcctagcatggtacatttttttctgcacaattgtacatggaagcattagtcataggatatcggttgttgaagtacgtcgtcaagtgtacatggaagcattagtgcattgaacggccgaagaatcaccgcaggtacatggctgatgtgttcatcttctagaggatatcttgcaccagagtacaccattcaagggcagctgaacaaaaagagcgacgtctacagctttggtgtgctgctgttggagattgtcagtggcagatgccacactgatcctagattacccgttgacgagcagttcctcctagaaaaggtctggacactctatgagttcgatgatctcgagagcatcattgataggacactaaagcgcgattttgacaccgaggaagcactctggttgcttaaggtaagtcttgtgtgcatcccggatagccctaagatcaagtcctccatgtcaatggttgccaagatgctgcaaggtgagtgtgttgtgggtgataggatcatgaggctggcctgatcacagacgtcatggacctgaaagtcaggatggtagagccggttcagttcagcttgacatcatgctcgagcactatcgcgttgtggcctggggcgcgatgcgcccactccttgttggggatttcccattcagctactacgagtcatgccgtgtaggtacgcggttgttgattcaatcgtgagggtcctcaattaaggtcgaatggatgcaatcaaaactagaagggtgtgcgccatcgaggatcactgcagctaaggcaatcgtgaaggctggaatcgttgttatggcaccgcaagctattagtgtgctaggtggatttaggcctcaagggaaaacgattgacaatgttgtaaaggttgtggagacaacacttgccatgcaggaggctggatgcttctctgttgtgtattagttgttggcagatgatttataagatattgagatcaaaatcaggatgtttccaaactgtctataatcaggatggctattgtagcttttacagtaggttggtattatatgtttccaatttgtgtttttattaaaccattgtctaattggtgtcaggtcttcttcccatgggcggatcattgtcgactggtggtgtcaggtcttcttcccatgggcggtgccctggagcgcctgattgtctcacgtatttgaccagcaacaagggacgaagattggagctgtgtggattgtgtggaggcgacacgggtcaggagcatttcatctgatcccttttctctgatggatatgctgatattcaaggctgtggaagagcaggtcaagaagagagtagagaataaggcaatgatcttcgagcagaatgccactgatagtgagtgcaaggtcgatcctaaagtgctctccaagctatatgatcattgggtggatgccacacaccaaggatgtctgccttgactaatcaccgattagctgtagctgtaaattttatgtatacatggtttcagttgcgctcgatccaattgtcttaaccttgaatggacattttgatgtttctttcatgaatgttcaggtcaacggcaagataaaccaattgcgttgtatgagttttagatcataactcaagttttttgtagatcttggtgctatttcatatgatgtgtcatgtttcagtgattgctttatagtgaacccgtaagatgtaaaatgacctttatgacagaaccatatgtaataacagagtattctgaggaacctttgttgaagtaaatgtaatcgagtttcctagcaatcttgttcctgcagacgagcattggaaaataacagagtattctgaggaaccttagtcgtattaagtttgtgtagaaagaaactgatcataatataatggataccttggagcaacaagattctttt

SEQ ID NO: 36725 - DNA, 2515 bp, Zea Mays
cccccgtctcacgaacccgtcccctcacatccctcgcgttgccattgcttggtcctctccgcgcccgccgcccctgctcggctgctccccatgtcccgcgccgcggtgacaaggatccgagaacacccctgcggacgcatccgggattcaaggcctcccctcccttcccctgcccccaccccctcggtgatgcccggatccacgactgctaccgtccagcctcgttctccgtccgcgaccgcttcacggtggcgcagacgctggaggtgtccacagggggcgacaccgtgaccctgcctccgttcgacatcagcgcccctccccccaccaccgtcgatttgtagaagctcctcgcccgttcttgcttcaccagcgattcggggaggccatgcccccctcggccgcaccccttctcctcctcgccgcatcccgcctctgggcagccgcgccacccctccctccacctcgccgtctcctacctcctccccctcgaccgcatctgcctccctctgtggcctcgctaccaaggtcaagatcgtcgagatttgttagggtttggggtttttgcggttgactctgaatcccgccgccgctgctcgcgcaggaggcctcgagctcccagtgctcccctcctcaaccaccctgggtaagtggctcccagattgatagggaaagagttcggactgtaggggctattgaatacttgattgatgccacaagatctggaaatgtgtcccgctatatcaatcacagaagttgttccccaaatctcagcacccgattggttttggtagagagcaaagattgccagcttgctcacattagcttgtttgctaatcaaaacattgccgtaggagaagaactcgcctatgattaccgacaaaagcttgtagcaggcgatggctgcttctgccattgtgggggccttagtgtaggcgtacaatctacgtcgacgccaaaattaaatcaccttcctacatccatagttgatatgaactgcatggtacatttttttctgcacaattgtacatggaagcattagtcataggatatcggttgttgaagtacgtcgtcaagtgtacatggaagcattagtgcattgaacggccgaagaatcaccgcaggtacatggctgatgtgttcatcttctagaggatatcttgcaccagagtacaccattcaagggcagctgaacaaaaagagcgacgtctacagctttggtgtgctgctgttggagattgtcagtggcagatgccacactgatcctagattacccgttgacgagcagttcctcctagaaaaggtctggacactctatgagttcgatgatctcgagagcatcattgataggacactaaagcgcgattttgacaccgaggaagcactctggttgcttaaggttgttgattcaatcgtgagggtcctcaattaaggtcgaatggatgcaatcaaaactagaagggtgtgcgccatcgaggatcactgcagctaaggcaatcgtgaaggctggaatcgttgttatggcaccgcaagctattagtgtgctaggtggatttaggcctcaagggaaaacgattgacaatgttgtaaaggttgtggagacaacacttgccatgcaggaggctggatgcttctctgttgtgtattagttgttggcagatgatttataagatattgagatcaaaatcaggatgtttccaaactgtctataatcaggatggctattgtagcttttacagtaggtcttcttcccatgggcggtgccctggagcgcctgattgtctcacgtatttgaccagcaacaagggacgaagattggagctgtgtggattgtgtggaggcgacacgggtcaggagcatttcatctgatcccttttctctgatggatatgctgatattcaaggctgtggaagagcaggtcaagaagagagtagagaataaggcaatgatcttcgagcagaatgccactgatagtgagtgcaaggtcgatcctaaagtgctctccaagctatatgatcattgggtggatgccacacaccaaggatgtctgccttgactaatcaccgattagctgtagctgtaaattttatgtatacatggtttcagttgcgctcgatccaattgtcttaaccttgaatggacattttgatgtttctttcatgaatgttcaggtcaacggcaagataaaccaattgcgttgtatgagttttagatcataactcaagttttttgtagatcttggtgctatttcatatgatgtgtcatgtttcagtgattgctttatagtgaacccgtaagatgtaaaatgacctttatgacagaaccatatgtaataacagagtattctgaggaacctttgttgaagtaaatgtaatcgagtttcctagcaatcttgttcctgcagacgagcattggaaaataacagagtattctgaggaaccttagtcgtattaagtttgtgtagaaagaaactgatcataatataatggataccttggagcaacaagattctttt

SEQ ID NO: 36726 - DNA, 951 bp, Zea Mays
gtttctacagctgtgtaggctgctgagcgatttaggccttagtgtaggcgtacaatctacgtcgacgccaaaattaaatcaccttcctacatccatagttgatatgaactggacatgcttaatccagggtacatggctgatgtgttcatcttctagaggatatcttgcaccagagtacaccattcaagggcagctgaacaaaaagagcgacgtctacagctttggtgtgctgctgttggagattgtcagtggcagatgccacactgatcctagattacccgttgacgagcagttcctcctagaaaaggtctggacactctatgagttcgatgatctcgagagcatcattgataggacactaaagcgcgattttgacaccgaggaagcactctggttgcttaaggtaagtcttgtgtgcatcccggatagccctaagatcaagtcctccatgtcaatggttgccaagatgctgcaaggtgagtgtgttgtgggtgataggatcatgaggctggcctgatcacagacgtcatggacctgaaagtcaggatggtagagccggttcagttcagcttgacatcatgctcgagcactatcgcgttgtggcctggggcgcgatgcgcccactccttgttggggatttcccattcagctactacgagtcatgccgtgtaggtacgcggtaggtacgcgatctgtcccctctgttctggataagacgttctgatgtgatagtgatagaaatagaatagaacgatgtggtggtgccacacagcccacaatgtagacgacacttggctatcacgttcgttcgtctcactacagaagggtgtgtcgcggttttcttttttttcactaagcaaatgtgatgcttgttagatttggataagaaaccttttgttttacaatataattcactaattgtatcggccgatattcgattgtttttggttc

SEQ ID NO: 36727 - DNA, 1909 bp, Zea Mays
catcagcatcatgttcagccaggactcatgatgggagacaagggaggcgagcagtgcctgccccccctgcattgtagccttaaaacgagtatatagctccacccctggatatgttagatacatacaccacgtttttgagaaatcggagcagagatacacaataatggaggcggcaggtggagagcagcacgaaacacgacgacgtgcaggtgcaggcctcgccctcctgggcgtcgtctactcatcgctgctcctgaacgccatcttcgtcgcgcaccacttcctctcgccgtcccggctgctgctccgtgacgacgggtgcgggtgcgggctcacctggtctctgcaggcggccagggaggccgaggcggtggccgccgtggagtgctcgggccacgggcaggtgttcgtcgatggcgtcgccggcgaggacgggcggcccgggtgcgagtgcaacagctgcttcggcgggccggactgctcccttcgcacgcccaactgcaccgccgacgccgacagcgggaacccgttgttcctggagccgtactggcggcgtcacgcggcggccagcgccgtggtgttctccgggtggcaccgcatgagctacaccaccacgggcgggttccagtcggtggagctggagcgccagatccggcgcctgcacggggccgtcggtaacgccgtcgcggacgacaagcacctggtcttcgccagcggctccctgcagctcatcaacgcgctggtgcacgcgctgtcgccggacgccacggcgtacagacagcaaacctccatgttcgacggccgcgagtacagatgggccggaaccacggccttgtgggccaactcgtcacgggcgaactccaccgacggcaccttcatcgagttcgtcacgtcgcctaacaacccagacgccctgctccgcgagcccgtcctccgcggctcggcggcggcgatcgtcgaccacgcgtactactggccgcacttcacgcacatcccggcgccggccgacgaggacatcatgatgttcaccgtctccaagccatccggacatgctggaagcagattcggatgggcgctgatcagggacgacgaggtggccaagcgggctttagagtacctgagggacagcaacatgggcgcgtcgcgggacacccagctgcggatgctggggatcttcaagttcatgctggccaacctgcgcggcaaggacgacatcttcgccttcggccacgacgtgatgaggagcaggtggctcaggctgagcgccgccgtgtcgcggacccgccgcatcacgctgcagaagatcgcgccccagtactgcacgtacttcggccgggtcagagagccatccccagcctacgcatgggtcaagtgcgagatggaggaagacgaagactgctacgaggcgctgctgaaggcgaacatcatcacgcgcagcggcgtccagtatgaggcgagcagcaggtacacgaggatcagcctcctcaagtcggacgacgacttcgacgtgctcatggagaggcttgaagatcttgtcgatgccgacaagtacgacgattccaacggttcgagctcaatgtagcaacggtaatccacggaagttcggaagcttggggcggtttagatccacctctctaaattttaagaacactctagctcacattgtatgaggtgggctaaattaaaatgcatatgatcagctaggcgctgattgttctgcgaatgtagtggaacagtcaactagaagttgactgtgttcccacaataaaactacctatattggattggcgcaaattatgcggtcagtatatcattccatatttatagtacaacttacagtttgttggattatttggttcatgttattacaattattctatctttttaggccagttttaatgaatagttt

SEQ ID NO: 36728 - DNA, 1980 bp, Zea Mays
ctaaaaacacagtgaatatatgtttaatactggcgttatggagctttcattaaactagtgtcatcagtcagcatcagcatcatgttcagccaggactcatgatgggagacaagggaggcgagcagtgcctgccccccctgcattgtagccttaaaacgagtatatagctccacccctggatatgttagatacatacaccacgtttttgagaaatcggagcagagatacacaataatggaggcggcaggtggagagcagcacgaaacacgacgacgtgcaggtgcaggcctcgccctcctgggcgtcgtctactcatcgctgctcctgaacgccatcttcgtcgcgcaccacttcctctcgccgtcccggctgctgctccgtgacgacgggtgcgggtgcgggctcacctggtctctgcaggcggccagggaggccgaggcggtggccgccgtggagtgctcgggccacgggcaggtgttcgtcgatggcgtcgccggcgaggacgggcggcccgggtgcgagtgcaacagctgcttcggcgggccggactgctcccttcgcacgcccaactgcaccgccgacgccgacagcgggaacccgttgttcctggagccgtactggcggcgtcacgcggcggccagcgccgtggtgttctccgggtggcaccgcatgagctacaccaccacgggcgggttccagtcggtggagctggagcgccagatccggcgcctgcacggggccgtcggtaacgccgtcgcggacgacaagcacctggtcttcgccagcggctccctgcagctcatcaacgcgctggtgcacgcgctgtcgccgtactacccggcgtacagacagcaaacctccatgttcgacggccgcgagtacagatgggccggaaccacggccttgtgggccaactcgtcacgggcgaactccaccgacggcaccttcatcgagttcgtcacgtcgcctaacaacccagacgccctgctccgcgagcccgtcctccgcggctcggcggcggcgatcgtcgaccacgcgtactactggccgcacttcacgcacatcccggcgccggccgacgaggacatcatgatgttcaccgtctccaagccatccggacatgctggaagcagattcggatgggcgctgatcagggacgacgaggtggccaagcgggctttagagtacctgagggacagcaacatgggcgcgtcgcgggacacccagctgcggatgctggggatcttcaagttcatgctggccaacctgcgcggcaaggacgacatcttcgccttcggccacgacgtgatgaggagcaggtggctcaggctgagcgccgccgtgtcgcggacccgccgcatcacgctgcagaagatcgcgccccagtactgcacgtacttcggccgggtcagagagccatccccagcctacgcatgggtcaagtgcgagatggaggaagacgaagactgctacgaggcgctgctgaaggcgaacatcatcacgcgcagcggcgtccagtatgaggcgagcagcaggtacacgaggatcagcctcctcaagtcggacgacgacttcgacgtgctcatggagaggcttgaagatcttgtcgatgccgacaagtacgacgattccaacggttcgagctcaatgtagcaacggtaatccacggaagttcggaagcttggggcggtttagatccacctctctaaattttaagaacactctagctcacattgtatgaggtgggctaaattaaaatgcatatgatcagctaggcgctgattgttctgcgaatgtagtggaacagtcaactagaagttgactgtgttcccacaataaaactacctatattggattggcgcaaattatgcggtcagtatatcattccatatttatagtacaacttacagtttgttggattatttggttcatgttattacaattattctatctttttaggccagttttaatgaatagttt

SEQ ID NO: 36729 - DNA, 862 bp, Zea Mays
aacaatatcagtaagcatgtccatataccaaacacacttttgctttatatgttgtcacctgacctctggagaaaaggaaggagatgaactaaaaaggaatgctgatgttcaagaaatccaccgaaggacaatatttaatctagtttcgagagtcaacatgcctaaaacgatatatgaccatgaaaggattgtatggctaggtgatctcaactataggatcaacttaccatatgagaagacacacgaactcatatccaagcaggactggaacaaattgtttgggaaagaccagctgaaagtagagctgaagaaggggcatctgtttgaaggatggactgaaggggtcatcaactttcctccaacgtataagtacaaggttaactcagaaaagtacataagtgatgataacaaatctggaaggagaacacctgcatggtgtgaccgaattctttcccatggtaagggtatgagattactgtcatataagacagttgatctcagactatcagatcaccgccctgtgactgctgtgtacatggcagatgtggaggttttctcttcaaaaaagctgcagagagctctgaccttcaccgatgcagaggctgaggaacagctctccttcgaggaagacaatgcttctggaatatacaaccttggactatatgaaagttcaagtgaagtttacaccccattagtaagagccaaagttttcagcaaggttacctggttgaagccgcagccgttgatgcgggcgctgagccggccccggcggaacggactgcccgccgtgtcccggtcattcccaacgctgcgacttcgacgctagggctagtttgaaagccacaaaagtggagataatgtg

SEQ ID NO: 36730 - DNA, 1898 bp, Zea Mays
gcgctaagtcactgtgcatgaaattttggtcactgaagattcatactggaaaccaattgggggtggttccttgtggccttcgtagaaggcgcaagtcagagacccttcgtgctcagtatattgatgtcagggagctcaggatttgtgctggaacatggaatgttgcaggcagacttccacctaatgacttggatatccaagaatggttggatatggaagagccagctgatatatatgttcttggatttcaagaaattgttccactaaatgctgggaatatatttggcgctgaagacaaccgccctgtagcaatgtgggagcatattattcgtgaaactttgaataagatcagcccagataaacccaaatataaatctcacagtgatcctccttctccgtcaaggttcaagccatctgatgatgcttttgttatggaagatgaacttattagtgagtctgatagtgaaggtgatggggaggtgcacccattgaacgaacaagatttggtcgactctgttgatggcattcatggtaacaaatgtgaacctcaaacaattttacaagatgaagagttcagcaggttgccttcagtgaagacttttgacagatccaataacctaagttttaaagaatctaatttggaagagaagatctgccagaagatattaactaaaacattcagtcactcagagaggcttgggatgatttggcctgaaccaccattggatatgtttgcccagtgtcttccagacagcacaaagccatttgcttcaggaaaggttttaagatcatatttgtctttcaagtcggtaaatggagattctggtccatttgctgaggacaattcagttcctgatttttatatgagctgtgcagcagttaaaagaaaaaggccatactttgtaagaataataagcaagcagatggttggagtgtacctatcaatatgggtacgaagaagcctccgaaagcacattcagagtctgaaagtatcaactgtaggggttggtgctatgggctacattggtaataagggatcaatatcagtaagcatgtccatataccaaacacacttttgctttatatgttgtcacctgacctctggagaaaaggaaggagatgaactaaaaaggaatgctgatgttcaagaaatccaccgaaggacaatatttaatctagtttcgagagtcaacatgcctaaaacgatatatgaccatgaaaggattgtatggctaggtgatctcaactataggatcaacttaccatatgagaagacacacgaactcatatccaagcaggactggaacaaattgtttgggaaagaccagctgaaagtagagctgaagaaggggcatctgtttgaaggatggactgaaggggtcatcaactttcctccaacgtataagtacaaggttaactcagaaaagtacataagtgatgataacaaatctggaaggagaacacctgcatggtgtgaccgaattctttcccatggtaagggtatgagattactgtcatataagacagttgatctcagactatcagatcaccgccctgtgactgctgtgtacatggcagatgtggaggttttctcttcaaaaaagctgcagagagctctgaccttcaccgatgcagaggctgaggaacagctctccttcgaggaagacaatgcttctggaatatacaaccttggactatatgaaagttcaagtgaagtttacaccccattagtaagagccaaagttttcagcaaggttacctggttgaagccgcagccgttgatgcgggcgctgagccggccccggcggaacggactgcccgccgtgtcccggtcattcccaacgctgcgacttcgacgctagggctagtttgaaagccacaaaagtggagataatgtg

SEQ ID NO: 36731 - DNA, 2187 bp, Zea Mays
aaaaagcgggtaactttctgaaaagggaaaacagggagcataatgctgcacttcactttgttggcggtgatttcagagatgtgcgcatgggagcgcaagttgcacgatgaggagaggagcgtccgaggattcggtgctgaggctattgcacactgacaaactaagatgtactgctagcctgtcgtatgatcactaatttcagataagtatctctaaagcccctttggagcatacacgctcatgcattgaagtaaaaatatacacttgctgaatagtgcataaacctttccgtatgcactgatacaatctactaaatatgtaggaaaccaattgggggtggttccttgtggccttcgtagaaggcgcaagtcagagacccttcgtgctcagtatattgatgtcagggagctcaggatttgtgctggaacatggaatgttgcaggcagacttccacctaatgacttggatatccaagaatggttggatatggaagagccagctgatatatatgttcttggatttcaagaaattgttccactaaatgctgggaatatatttggcgctgaagacaaccgccctgtagcaatgtgggagcatattattcgtgaaactttgaataagatcagcccagataaacccaaatataaatctcacagtgatcctccttctccgtcaaggttcaagccatctgatgatgcttttgttatggaagatgaacttattagtgagtctgatagtgaaggtgatggggaggtgcacccattgaacgaacaagatttggtcgactctgttgatggcattcatggtaacaaatgtgaacctcaaacaattttacaagatgaagagttcagcaggttgccttcagtgaagacttttgacagatccaataacctaagttttaaagaatctaatttggaagagaagatctgccagaagatattaactaaaacattcagtcactcagagaggcttgggatgatttggcctgaaccaccattggatatgtttgcccagtgtcttccagacagcacaaagccatttgcttcaggaaaggttttaagatcatatttgtctttcaagtcggtaaatggagattctggtccatttgctgaggacaattcagttcctgatttttatatgagctgtgcagcagttaaaagaaaaaggccatactttgtaagaataataagcaagcagatggttggagtgtacctatcaatatggagtatttatgttttagcaccaattgtcttccagtctttccattctcatatcactggcatttactttccatcaatacaccaacactacatttggaaaaggggatcaatatcagtaagcatgtccatataccaaacacacttttgctttatatgttgtcacctgacctctggagaaaaggaaggagatgaactaaaaaggaatgctgatgttcaagaaatccaccgaaggacaatatttaatctagtttcgagagtcaacatgcctaaaacgatatatgaccatgaaaggattgtatggctaggtgatctcaactataggatcaacttaccatatgagaagacacacgaactcatatccaagcaggactggaacaaattgtttgggaaagaccagctgaaagtagagctgaagaaggggcatctgtttgaaggatggactgaaggggtcatcaactttcctccaacgtataagtacaaggttaactcagaaaagtacataagtgatgataacaaatctggaaggagaacacctgcatggtgtgaccgaattctttcccatggtaagggtatgagattactgtcatataagacagttgatctcagactatcagatcaccgccctgtgactgctgtgtacatggcagatgtggaggttttctcttcaaaaaagctgcagagagctctgaccttcaccgatgcagaggctgaggaacagctctccttcgaggaagacaatgcttctggaatatacaaccttggactatatgaaagttcaagtgaagtttacaccccattagtaagagccaaagttttcagcaaggttacctggttgaagccgcagccgttgatgcgggcgctgagccggccccggcggaacggactgcccgccgtgtcccggtcattcccaacgctgcgacttcgacgctagggctagtttgaaagccacaaaagtggagataatgtg

SEQ ID NO: 36732 - DNA, 2049 bp, Zea Mays
aagcaagcaaggctacccgcaaccgccaactgaccgctgtagcggagacgatggcagccgccgcgccctcctcgtcctcgtcctcgtccgcgcgggcgcgcgcgcgcgcgccgccccggccattgcatcccctcgcccgcggcggccccgagcgcgaagaaatggaggccgtcgcggcgacccaccccggcgcgccaccgatgcggcgcaaggggaggaagcagaagcagcggtgctcactcgtgccgtccggacctactacgcagctgtggcccaggaccgtgctgcggaagtggctcaacataaggtcgccggagtccgacttcagcgccgacgagggcgacaccaccggcgacgacaccgacagcgaggtcgattacgaaggaaaccaattgggggtggttccttgtggccttcgtagaaggcgcaagtcagagacccttcgtgctcagtatattgatgtcagggagctcaggatttgtgctggaacatggaatgttgcaggcagacttccacctaatgacttggatatccaagaatggttggatatggaagagccagctgatatatatgttcttggatttcaagaaattgttccactaaatgctgggaatatatttggcgctgaagacaaccgccctgtagcaatgtgggagcatattattcgtgaaactttgaataagatcagcccagataaacccaaatataaatctcacagtgatcctccttctccgtcaaggttcaagccatctgatgatgcttttgttatggaagatgaacttattagtgagtctgatagtgaaggtgatggggaggtgcacccattgaacgaacaagatttggtcgactctgttgatggcattcatggtaacaaatgtgaacctcaaacaattttacaagatgaagagttcagcaggttgccttcagtgaagacttttgacagatccaataacctaagttttaaagaatctaatttggaagagaagatctgccagaagatattaactaaaacattcagtcactcagagaggcttgggatgatttggcctgaaccaccattggatatgtttgcccagtgtcttccagacagcacaaagccatttgcttcaggaaaggttttaagatcatatttgtctttcaagtcggtaaatggagattctggtccatttgctgaggacaattcagttcctgatttttatatgagctgtgcagcagttaaaagaaaaaggccatactttgtaagaataataagcaagcagatggttggagtgtacctatcaatatgggtacgaagaagcctccgaaagcacattcagagtctgaaagtatcaactgtaggggttggtgctatgggctacattggtaataagaaggattgtatggctaggtgatctcaactataggatcaacttaccatatgagaagacacacgaactcatatccaagcaggactggaacaaattgtttgggaaagaccagctgaaagtagagctgaagaaggggcatctgtttgaaggatggactgaaggggtcatcaactttcctccaacgtataagtacaaggttaactcagaaaagtacataagtgatgataacaaatctggaaggagaacacctgcatggtgtgaccgaattctttcccatggtaagggtatgagattactgtcatataagacagttgatctcagactatcagatcaccgccctgtgactgctgtgtacatggcagatgtggaggttttctcttcaaaaaagctgcagagagctctgaccttcaccgatgcagaggctgaggaacagctctccttcgaggaagacaatgcttctggaatatacaaccttggactatatgaaagttcaagtgaagtttacaccccattagtaagagccaaagttttcagcaaggttacctggttgaagccgcagccgttgatgcgggcgctgagccggccccggcggaacggactgcccgccgtgtcccggtcattcccaacgctgcgacttcgacgctagggctagtttgaaagccacaaaagtggagataatgtg

SEQ ID NO: 36733 - DNA, 2226 bp, Zea Mays
aagcaagcaaggctacccgcaaccgccaactgaccgctgtagcggagacgatggcagccgccgcgccctcctcgtcctcgtcctcgtccgcgcgggcgcgcgcgcgcgcgccgccccggccattgcatcccctcgcccgcggcggccccgagcgcgaagaaatggaggccgtcgcggcgacccaccccggcgcgccaccgatgcggcgcaaggggaggaagcagaagcagcggtgctcactcgtgccgtccggacctactacgcagctgtggcccaggaccgtgctgcggaagtggctcaacataaggtcgccggagtccgacttcagcgccgacgagggcgacaccaccggcgacgacaccgacagcgaggtcgattacgaaggaaaccaattgggggtggttccttgtggccttcgtagaaggcgcaagtcagagacccttcgtgctcagtatattgatgtcagggagctcaggatttgtgctggaacatggaatgttgcaggcagacttccacctaatgacttggatatccaagaatggttggatatggaagagccagctgatatatatgttcttggatttcaagaaattgttccactaaatgctgggaatatatttggcgctgaagacaaccgccctgtagcaatgtgggagcatattattcgtgaaactttgaataagatcagcccagataaacccaaatataaatctcacagtgatcctccttctccgtcaaggttcaagccatctgatgatgcttttgttatggaagatgaacttattagtgagtctgatagtgaaggtgatggggaggtgcacccattgaacgaacaagatttggtcgactctgttgatggcattcatggtaacaaatgtgaacctcaaacaattttacaagatgaagagttcagcaggttgccttcagtgaagacttttgacagatccaataacctaagttttaaagaatctaatttggaagagaagatctgccagaagatattaactaaaacattcagtcactcagagaggcttgggatgatttggcctgaaccaccattggatatgtttgcccagtgtcttccagacagcacaaagccatttgcttcaggaaaggttttaagatcatatttgtctttcaagtcggtaaatggagattctggtccatttgctgaggacaattcagttcctgatttttatatgagctgtgcagcagttaaaagaaaaaggccatactttgtaagaataataagcaagcagatggttggagtgtacctatcaatatgggtacgaagaagcctccgaaagcacattcagagtctgaaagtatcaactgtaggggttggtgctatgggctacattgggatcaatatcagtaagcatgtccatataccaaacacacttttgctttatatgttgtcacctgacctctggagaaaaggaaggagatgaactaaaaaggaatgctgatgttcaagaaatccaccgaaggacaatatttaatctagtttcgagagtcaacatgcctaaaacgatatatgaccatgaaaggattgtatggctaggtgatctcaactataggatcaacttaccatatgagaagacacacgaactcatatccaagcaggactggaacaaattgtttgggaaagaccagctgaaagtagagctgaagaaggggcatctgtttgaaggatggactgaaggggtcatcaactttcctccaacgtataagtacaaggttaactcagaaaagtacataagtgatgataacaaatctggaaggagaacacctgcatggtgtgaccgaattctttcccatggtaagggtatgagattactgtcatataagacagttgatctcagactatcagatcaccgccctgtgactgctgtgtacatggcagatgtggaggttttctcttcaaaaaagctgcagagagctctgaccttcaccgatgcagaggctgaggaacagctctccttcgaggaagacaatgcttctggaatatacaaccttggactatatgaaagttcaagtgaagtttacaccccattagtaagagccaaagttttcagcaaggttacctggttgaagccgcagccgttgatgcgggcgctgagccggccccggcggaacggactgcccgccgtgtcccggtcattcccaacgctgcgacttcgacgctagggctagtttgaaagccacaaaagtggagataatgtg

SEQ ID NO: 36734 - DNA, 2285 bp, Zea Mays
gcccgcaggcaagcaccgcggtccgtggctaggctacacctacaccagatcttcttagctggggaccaagcaaagcaagcaaggctacccgcaaccgccaactgaccgctgtagcggagacgatggcagccgccgcgccctcctcgtcctcgtcctcgtccgcgcgggcgcgcgcgcgcgcgccgccccggccattgcatcccctcgcccgcggcggccccgagcgcgaagaaatggaggccgtcgcggcgacccaccccggcgcgccaccgatgcggcgcaaggggaggaagcagaagcagctgtggcccaggaccgtgctgcggaagtggctcaacataaggtcgccggagtccgacttcagcgccgacgagggcgacaccaccggcgacgacaccgacagcgaggtcgattacgaaggaaaccaattgggggtggttccttgtggccttcgtagaaggcgcaagtcagagacccttcgtgctcagtatattgatgtcagggagctcaggatttgtgctggaacatggaatgttgcaggcagacttccacctaatgacttggatatccaagaatggttggatatggaagagccagctgatatatatgttcttggatttcaagaaattgttccactaaatgctgggaatatatttggcgctgaagacaaccgccctgtagcaatgtgggagcatattattcgtgaaactttgaataagatcagcccagataaacccaaatataaatctcacagtgatcctccttctccgtcaaggttcaagccatctgatgatgcttttgttatggaagatgaacttattagtgagtctgatagtgaaggtgatggggaggtgcacccattgaacgaacaagatttggtcgactctgttgatggcattcatggtaacaaatgtgaacctcaaacaattttacaagatgaagagttcagcaggttgccttcagtgaagacttttgacagatccaataacctaagttttaaagaatctaatttggaagagaagatctgccagaagatattaactaaaacattcagtcactcagagaggcttgggatgatttggcctgaaccaccattggatatgtttgcccagtgtcttccagacagcacaaagccatttgcttcaggaaaggttttaagatcatatttgtctttcaagtcggtaaatggagattctggtccatttgctgaggacaattcagttcctgatttttatatgagctgtgcagcagttaaaagaaaaaggccatactttgtaagaataataagcaagcagatggttggagtgtacctatcaatatggagtatttatgttttagcaccaattgtcttccagtctttccattctcatatcactggcatttactttccatcaatacaccaacactacatttggaaaaggggatcaatatcagtaagcatgtccatataccaaacacacttttgctttatatgttgtcacctgacctctggagaaaaggaaggagatgaactaaaaaggaatgctgatgttcaagaaatccaccgaaggacaatatttaatctagtttcgagagtcaacatgcctaaaacgatatatgaccatgaaaggattgtatggctaggtgatctcaactataggatcaacttaccatatgagaagacacacgaactcatatccaagcaggactggaacaaattgtttgggaaagaccagctgaaagtagagctgaagaaggggcatctgtttgaaggatggactgaaggggtcatcaactttcctccaacgtataagtacaaggttaactcagaaaagtacataagtgatgataacaaatctggaaggagaacacctgcatggtgtgaccgaattctttcccatggtaagggtatgagattactgtcatataagacagttgatctcagactatcagatcaccgccctgtgactgctgtgtacatggcagatgtggaggttttctcttcaaaaaagctgcagagagctctgaccttcaccgatgcagaggctgaggaacagctctccttcgaggaagacaatgcttctggaatatacaaccttggactatatgaaagttcaagtgaagtttacaccccattagtaagagccaaagttttcagcaaggttacctggttgaagccgcagccgttgatgcgggcgctgagccggccccggcggaacggactgcccgccgtgtcccggtcattcccaacgctgcgacttcgacgctagggctagtttgaaagccacaaaagtggagataatgtg

SEQ ID NO: 36735 - DNA, 2547 bp, Zea Mays
cggcagggagatatagcacgctacagccgcagcccgcaggcaagcaccgcggtccgtggctaggctacacctacaccagatcttcttagctggggaccaagcaaagcaagcaaggctacccgcaaccgccaactgaccgctgtagcggagacgatggcagccgccgcgccctcctcgtcctcgtcctcgtccgcgcgggcgcgcgcgcgcgcgccgccccggccattgcatcccctcgcccgcggcggccccgagcgcgaagaaatggaggccgtcgcggcgacccaccccggcgcgccaccgatgcggcgcaaggggaggaagcagaagcagctgtggcccaggaccgtgctgcggaagtggctcaacataaggtcgccggagtccgacttcagcgccgacgagggcgacaccaccggcgacgacaccgacagcgaggtcgattacgaagagatgtgcgcatgggagcgcaagttgcacgatgaggagaggagcgtccgaggattcggtgctgaggctattgcacactgacaaactaagatgtactgctagcctgtcgtatgatcactaatttcagataagtatctctaaagcccctttggagcatacacgctcatgcattgaagtaaaaatatacacttgctgaatagtgcataaacctttccgtatgcactgatacaatctactaaatatgtaggaaaccaattgggggtggttccttgtggccttcgtagaaggcgcaagtcagagacccttcgtgctcagtatattgatgtcagggagctcaggatttgtgctggaacatggaatgttgcaggcagacttccacctaatgacttggatatccaagaatggttggatatggaagagccagctgatatatatgttcttggatttcaagaaattgttccactaaatgctgggaatatatttggcgctgaagacaaccgccctgtagcaatgtgggagcatattattcgtgaaactttgaataagatcagcccagataaacccaaatataaatctcacagtgatcctccttctccgtcaaggttcaagccatctgatgatgcttttgttatggaagatgaacttattagtgagtctgatagtgaaggtgatggggaggtgcacccattgaacgaacaagatttggtcgactctgttgatggcattcatggtaacaaatgtgaacctcaaacaattttacaagatgaagagttcagcaggttgccttcagtgaagacttttgacagatccaataacctaagttttaaagaatctaatttggaagagaagatctgccagaagatattaactaaaacattcagtcactcagagaggcttgggatgatttggcctgaaccaccattggatatgtttgcccagtgtcttccagacagcacaaagccatttgcttcaggaaaggttttaagatcatatttgtctttcaagtcggtaaatggagattctggtccatttgctgaggacaattcagttcctgatttttatatgagctgtgcagcagttaaaagaaaaaggccatactttgtaagaataataagcaagcagatggttggagtgtacctatcaatatgggtacgaagaagcctccgaaagcacattcagagtctgaaagtatcaactgtaggggttggtgctatgggctacattggtaataagggatcaatatcagtaagcatgtccatataccaaacacacttttgctttatatgttgtcacctgacctctggagaaaaggaaggagatgaactaaaaaggaatgctgatgttcaagaaatccaccgaaggacaatatttaatctagtttcgagagtcaacatgcctaaaacgatatatgaccatgaaaggattgtatggctaggtgatctcaactataggatcaacttaccatatgagaagacacacgaactcatatccaagcaggactggaacaaattgtttgggaaagaccagctgaaagtagagctgaagaaggggcatctgtttgaaggatggactgaaggggtcatcaactttcctccaacgtataagtacaaggttaactcagaaaagtacataagtgatgataacaaatctggaaggagaacacctgcatggtgtgaccgaattctttcccatggtaagggtatgagattactgtcatataagacagttgatctcagactatcagatcaccgccctgtgactgctgtgtacatggcagatgtggaggttttctcttcaaaaaagctgcagagagctctgaccttcaccgatgcagaggctgaggaacagctctccttcgaggaagacaatgcttctggaatatacaaccttggactatatgaaagttcaagtgaagtttacaccccattagtaagagccaaagttttcagcaaggttacctggttgaagccgcagccgttgatgcgggcgctgagccggccccggcggaacggactgcccgccgtgtcccggtcattcccaacgctgcgacttcgacgctagggctagtttgaaagccacaaaagtggagataatgtg

SEQ ID NO: 36736 - DNA, 2267 bp, Zea Mays
aaacaacgcggcgccgccaccggtttcttttgccgaaggaaggcggcagggagatatagcacgctacagccgcagcccgcaggcaagcaccgcggtccgtggctaggctacacctacaccagatcttcttagctggggaccaagcaaagcaagcaaggctacccgcaaccgccaactgaccgctgtagcggagacgatggcagccgccgcgccctcctcgtcctcgtcctcgtccgcgcgggcgcgcgcgcgcgcgccgccccggccattgcatcccctcgcccgcggcggccccgagcgcgaagaaatggaggccgtcgcggcgacccaccccggcgcgccaccgatgcggcgcaaggggaggaagcagaagcagcggtgctcactcgtgccgtccggacctactacgcagctgtggcccaggaccgtgctgcggaagtggctcaacataaggtcgccggagtccgacttcagcgccgacgagggcgacaccaccggcgacgacaccgacagcgaggtcgattacgaagagatgtgcgcatgggagcgcaagttgcacgatgaggagaggagcgtccgaggattcggtgctgaggctattggaaaccaattgggggtggttccttgtggccttcgtagaaggcgcaagtcagagacccttcgtgctcagtatattgatgtcagggagctcaggatttgtgctggaacatggaatgttgcaggcagacttccacctaatgacttggatatccaagaatggttggatatggaagagccagctgatatatatgttcttggatttcaagaaattgttccactaaatgctgggaatatatttggcgctgaagacaaccgccctgtagcaatgtgggagcatattattcgtgaaactttgaataagatcagcccagataaacccaaatataaatctcacagtgatcctccttctccgtcaaggttcaagccatctgatgatgcttttgttatggaagatgaacttattagtgagtctgatagtgaaggtgatggggaggtgcacccattgaacgaacaagatttggtcgactctgttgatggcattcatggtaacaaatgtgaacctcaaacaattttacaagatgaagagttcagcaggttgccttcagtgaagacttttgacagatccaataacctaagttttaaagaatctaatttggaagagaagatctgccagaagatattaactaaaacattcagtcactcagagaggcttgggatgatttggcctgaaccaccattggatatgtttgcccagtgtcttccagacagcacaaagccatttgcttcaggaaaggttttaagatcatatttgtctttcaagtcggtaaatggagattctggtccatttgctgaggacaattcagttcctgatttttatatgagctgtgcagcagttaaaagaaaaaggccatactttgtaagaataataagcaagcagatggttggagtgtacctatcaatatgggtacgaagaagcctccgaaagcacattcagagtctgaaagtatcaactgtaggggttggtgctatgggctacattggtaataagaaggattgtatggctaggtgatctcaactataggatcaacttaccatatgagaagacacacgaactcatatccaagcaggactggaacaaattgtttgggaaagaccagctgaaagtagagctgaagaaggggcatctgtttgaaggatggactgaaggggtcatcaactttcctccaacgtataagtacaaggttaactcagaaaagtacataagtgatgataacaaatctggaaggagaacacctgcatggtgtgaccgaattctttcccatggtaagggtatgagattactgtcatataagacagttgatctcagactatcagatcaccgccctgtgactgctgtgtacatggcagatgtggaggttttctcttcaaaaaagctgcagagagctctgaccttcaccgatgcagaggctgaggaacagctctccttcgaggaagacaatgcttctggaatatacaaccttggactatatgaaagttcaagtgaagtttacaccccattagtaagagccaaagttttcagcaaggttacctggttgaagccgcagccgttgatgcgggcgctgagccggccccggcggaacggactgcccgccgtgtcccggtcattcccaacgctgcgacttcgacgctagggctagtttgaaagccacaaaagtggagataatgtg

SEQ ID NO: 36737 - DNA, 2748 bp, Zea Mays
caagcgcccacgacagtaaacaacgcggcgccgccaccggtttcttttgccgaaggaaggcggcagggagatatagcacgctacagccgcagcccgcaggcaagcaccgcggtccgtggctaggctacacctacaccagatcttcttagctggggaccaagcaaagcaagcaaggctacccgcaaccgccaactgaccgctgtagcggagacgatggcagccgccgcgccctcctcgtcctcgtcctcgtccgcgcgggcgcgcgcgcgcgcgccgccccggccattgcatcccctcgcccgcggcggccccgagcgcgaagaaatggaggccgtcgcggcgacccaccccggcgcgccaccgatgcggcgcaaggggaggaagcagaagcagcggtgctcactcgtgccgtccggacctactacgcagctgtggcccaggaccgtgctgcggaagtggctcaacataaggtcgccggagtccgacttcagcgccgacgagggcgacaccaccggcgacgacaccgacagcgaggtcgattacgaaggaatgaaacaaaagatgggcgtctatttcgatgaactaccggagtacaatgttattcctcgtggtttccaaaacgataagatctcccactttatttttatatcctgcattttgtttacgagttgtaaaagaaaaggaaggtccgaatctgattgcacgaaatacagttgcagcacatggtagcttacaaaaaagcgggtaactttctgaaaagggaaaacagggagcataatgctgcacttcactttgttggcggtgatttcagagatgtgcgcatgggagcgcaagttgcacgatgaggagaggagcgtccgaggattcggtgctgaggctattggaaaccaattgggggtggttccttgtggccttcgtagaaggcgcaagtcagagacccttcgtgctcagtatattgatgtcagggagctcaggatttgtgctggaacatggaatgttgcaggcagacttccacctaatgacttggatatccaagaatggttggatatggaagagccagctgatatatatgttcttggatttcaagaaattgttccactaaatgctgggaatatatttggcgctgaagacaaccgccctgtagcaatgtgggagcatattattcgtgaaactttgaataagatcagcccagataaacccaaatataaatctcacagtgatcctccttctccgtcaaggttcaagccatctgatgatgcttttgttatggaagatgaacttattagtgagtctgatagtgaaggtgatggggaggtgcacccattgaacgaacaagatttggtcgactctgttgatggcattcatggtaacaaatgtgaacctcaaacaattttacaagatgaagagttcagcaggttgccttcagtgaagacttttgacagatccaataacctaagttttaaagaatctaatttggaagagaagatctgccagaagatattaactaaaacattcagtcactcagagaggcttgggatgatttggcctgaaccaccattggatatgtttgcccagtgtcttccagacagcacaaagccatttgcttcaggaaaggttttaagatcatatttgtctttcaagtcggtaaatggagattctggtccatttgctgaggacaattcagttcctgatttttatatgagctgtgcagcagttaaaagaaaaaggccatactttgtaagaataataagcaagcagatggttggagtgtacctatcaatatggagtatttatgttttagcaccaattgtcttccagtctttccattctcatatcactggcatttactttccatcaatacaccaacactacatttggaaaaggggatcaatatcagtaagcatgtccatataccaaacacacttttgctttatatgttgtcacctgacctctggagaaaaggaaggagatgaactaaaaaggaatgctgatgttcaagaaatccaccgaaggacaatatttaatctagtttcgagagtcaacatgcctaaaacgatatatgaccatgaaaggattgtatggctaggtgatctcaactataggatcaacttaccatatgagaagacacacgaactcatatccaagcaggactggaacaaattgtttgggaaagaccagctgaaagtagagctgaagaaggggcatctgtttgaaggatggactgaaggggtcatcaactttcctccaacgtataagtacaaggttaactcagaaaagtacataagtgatgataacaaatctggaaggagaacacctgcatggtgtgaccgaattctttcccatggtaagggtatgagattactgtcatataagacagttgatctcagactatcagatcaccgccctgtgactgctgtgtacatggcagatgtggaggttttctcttcaaaaaagctgcagagagctctgaccttcaccgatgcagaggctgaggaacagctctccttcgaggaagacaatgcttctggaatatacaaccttggactatatgaaagttcaagtgaagtttacaccccattagtaagagccaaagttttcagcaaggttacctggttgaagccgcagccgttgatgcgggcgctgagccggccccggcggaacggactgcccgccgtgtcccggtcattcccaacgctgcgacttcgacgctagggctagtttgaaagccacaaaagtggagataatgtg

SEQ ID NO: 36738 - DNA, 2355 bp, Zea Mays
ctcagccaagcgcccacgacagtaaacaacgcggcgccgccaccggtttcttttgccgaaggaaggcggcagggagatatagcacgctacagccgcagcccgcaggcaagcaccgcggtccgtggctaggctacacctacaccagatcttcttagctggggaccaagcaaagcaagcaaggctacccgcaaccgccaactgaccgctgtagcggagacgatggcagccgccgcgccctcctcgtcctcgtcctcgtccgcgcgggcgcgcgcgcgcgcgccgccccggccattgcatcccctcgcccgcggcggccccgagcgcgaagaaatggaggccgtcgcggcgacccaccccggcgcgccaccgatgcggcgcaaggggaggaagcagaagcagacgcagctgtggcccaggaccgtgctgcggaagtggctcaacataaggtcgccggagtccgacttcagcgccgacgagggcgacaccaccggcgacgacaccgacagcgaggtcgattacgaagagatgtgcgcatgggagcgcaagttgcacgatgaggagaggagcgtccgaggattcggtgctgaggctattggaaaccaattgggggtggttccttgtggccttcgtagaaggcgcaagtcagagacccttcgtgctcagtatattgatgtcagggagctcaggatttgtgctggaacatggaatgttgcaggcagacttccacctaatgacttggatatccaagaatggttggatatggaagagccagctgatatatatgttcttggatttcaagaaattgttccactaaatgctgggaatatatttggcgctgaagacaaccgccctgtagcaatgttcaagccatctgatgatgcttttgttatggaagatgaacttattagtgagtctgatagtgaaggtgatggggaggtgcacccattgaacgaacaagatttggtcgactctgttgatggcattcatggtaacaaatgtgaacctcaaacaattttacaagatgaagagttcagcaggttgccttcagtgaagacttttgacagatccaataacctaagttttaaagaatctaatttggaagagaagatctgccagaagatattaactaaaacattcagtcactcagagaggcttgggatgatttggcctgaaccaccattggatatgtttgcccagtgtcttccagacagcacaaagccatttgcttcaggaaaggttttaagatcatatttgtctttcaagtcggtaaatggagattctggtccatttgctgaggacaattcagttcctgatttttatatgagctgtgcagcagttaaaagaaaaaggccatactttgtaagaataataagcaagcagatggttggagtgtacctatcaatatgggtacgaagaagcctccgaaagcacattcagagtctgaaagtatcaactgtaggggttggtgctatgggctacattggtaataagggatcaatatcagtaagcatgtccatataccaaacacacttttgctttatatgttgtcacctgacctctggagaaaaggaaggagatgaactaaaaaggaatgctgatgttcaagaaatccaccgaaggacaatatttaatctagtttcgagagtcaacatgcctaaaacgatatatgaccatgaaaggattgtatggctaggtgatctcaactataggatcaacttaccatatgagaagacacacgaactcatatccaagcaggactggaacaaattgtttgggaaagaccagctgaaagtagagctgaagaaggggcatctgtttgaaggatggactgaaggggtcatcaactttcctccaacgtataagtacaaggttaactcagaaaagtacataagtgatgataacaaatctggaaggagaacacctgcatggtgtgaccgaattctttcccatggtaagggtatgagattactgtcatataagacagttgatctcagactatcagatcaccgccctgtgactgctgtgtacatggcagatgtggaggttttctcttcaaaaaagctgcagagagctctgaccttcaccgatgcagaggctgaggaacagctctccttcgaggaagacaatgcttctggaatatacaaccttggactatatgaaagttcaagtgaagtttacaccccattagtaagagccaaagttttcagcaaggttacctggttgaagccgcagccgttgatgcgggcgctgagccggccccggcggaacggactgcccgccgtgtcccggtcattcccaacgctgcgacttcgacgctagggctagtttgaaagccacaaaagtggagataatgtg

SEQ ID NO: 36739 - DNA, 3386 bp, Zea Mays
aaacaggagctctcagccaagcgcccacgacagtaaacaacgcggcgccgccaccggtttcttttgccgaaggaaggcggcagggagatatagcacgctacagccgcagcccgcaggcaagcaccgcggtccgtggctaggctacacctacaccagatcttcttagctggggaccaagcaaagcaagcaaggctacccgcaaccgccaactgaccgctgtagcggagacgatggcagccgccgcgccctcctcgtcctcgtcctcgtccgcgcgggcgcgcgcgcgcgcgccgccccggccattgcatcccctcgcccgcggcggccccgagcgcgaagaaatggaggccgtcgcggcgacccaccccggcgcgccaccgatgcggcgcaaggggaggaagcagaagcagctgtggcccaggaccgtgctgcggaagtggctcaacataaggtcgccggagtccgacttcagcgccgacgagggcgacaccaccggcgacgacaccgacagcgaggtcgattacgaagagatgtgcgcatgggagcgcaagttgcacgatgaggagaggagcgtccgaggattcggtgctgaggctattggtaattacttgtggttgttatcatattagctattatatctgacagcaaatgtgcttctttttttagtggtattattcgcaaacaaacaagaggaagcgctaagtcactgtgcatgaaattttggtcactgaagattcatactggtttgattatttcaaggagatataatatgtacatcatgctatttctatgaaacaaatatcataccccttgtgttaggacatgttcggtttgatatcaatccatgtgagggcttgttcggtttattcccattccatatggattggagtggattgaggtgaattttgacttggtatggatttaattcgactcaatctcactcaatccacgtgaattaactacaaaacgaacaagcccagaattaggtgggattgagtgaggttagatcccaagcaaatcaaagttcttaattttttccaatctcatccaatccatgtggaatgagaataacaaaacaaggccttaggaagtttttgcgacggtttagggatgagtataagctttggtgcctatccagagctacaaaacttcatgctctcggattgaacaggataggagcttttggacgagtcttttcgttgttgtttggtcgttaaaagtatttttcgtaatcttgttgtgaagtgtttccaaccttcctagtgtatggtccttgcatgagttctaatgtatatggaccattttttcctctctataataaaaagatatgcagctctcctgcatatttgataaaaagcaaataccatactaagcatattttttatttttaaaaagaaaaaggggtttccttagtttcccccctcctcatagtaagtttttaaccaccatgtgaactgttagatttccaatgcatgcagcacactgacaaactaagatgtactgctagcctgtcgtatgatcactaatttcagataagaaaccaattgggggtggttccttgtggccttcgtagaaggcgcaagtcagagacccttcgtgctcagtatattgatgtcagggagctcaggatttgtgctggaacatggaatgttgcaggcagacttccacctaatgacttggatatccaagaatggttggatatggaagagccagctgatatatatgttcttggatttcaagaaattgttccactaaatgctgggaatatatttggcgctgaagacaaccgccctgtagcaatgtgggagcatattattcgtgaaactttgaataagatcagcccagataaacccaaatataaatctcacagtgatcctccttctccgtcaaggttcaagccatctgatgatgcttttgttatggaagatgaacttattagtgagtctgatagtgaaggtgatggggaggtgcacccattgaacgaacaagatttggtcgactctgttgatggcattcatggtaacaaatgtgaacctcaaacaattttacaagatgaagagttcagcaggttgccttcagtgaagacttttgacagatccaataacctaagttttaaagaatctaatttggaagagaagatctgccagaagatattaactaaaacattcagtcactcagagaggcttgggatgatttggcctgaaccaccattggatatgtttgcccagtgtcttccagacagcacaaagccatttgcttcaggaaaggttttaagatcatatttgtctttcaagtcggtaaatggagattctggtccatttgctgaggacaattcagttcctgatttttatatgagctgtgcagcagttaaaagaaaaaggccatactttgtaagaataataagcaagcagatggttggagtgtacctatcaatatgggtacgaagaagcctccgaaagcacattcagagtctgaaagtatcaactgtaggggttggtgctatgggctacattggtaataagggatcaatatcagtaagcatgtccatataccaaacacacttttgctttatatgttgtcacctgacctctggagaaaaggaaggagatgaactaaaaaggaatgctgatgttcaagaaatccaccgaaggacaatatttaatctagtttcgagagtcaacatgcctaaaacgatatatgaccatgaaaggattgtatggctaggtgatctcaactataggatcaacttaccatatgagaagacacacgaactcatatccaagcaggactggaacaaattgtttgggaaagaccagctgaaagtagagctgaagaaggggcatctgtttgaaggatggactgaaggggtcatcaactttcctccaacgtataagtacaaggttaactcagaaaagtacataagtgatgataacaaatctggaaggagaacacctgcatggtgtgaccgaattctttcccatggtaagggtatgagattactgtcatataagacagttgatctcagactatcagatcaccgccctgtgactgctgtgtacatggcagatgtggaggttttctcttcaaaaaagctgcagagagctctgaccttcaccgatgcagaggctgaggaacagctctccttcgaggaagacaatgcttctggaatatacaaccttggactatatgaaagttcaagtgaagtttacaccccattagtaagagccaaagttttcagcaaggttacctggttgaagccgcagccgttgatgcgggcgctgagccggccccggcggaacggactgcccgccgtgtcccggtcattcccaacgctgcgacttcgacgctagggctagtttgaaagccacaaaagtggagataatgtg

SEQ ID NO: 36740 - DNA, 2843 bp, Zea Mays
gtccacaaacaggagctctcagccaagcgcccacgacagtaaacaacgcggcgccgccaccggtttcttttgccgaaggaaggcggcagggagatatagcacgctacagccgcagcccgcaggcaagcaccgcggtccgtggctaggctacacctacaccagatcttcttagctggggaccaagcaaagcaagcaaggctacccgcaaccgccaactgaccgctgtagcggagacgatggcagccgccgcgccctcctcgtcctcgtcctcgtccgcgcgggcgcgcgcgcgcgcgccgccccggccattgcatcccctcgcccgcggcggccccgagcgcgaagaaatggaggccgtcgcggcgacccaccccggcgcgccaccgatgcggcgcaaggggaggaagcagaagcagcggtgctcactcgtgccgtccggacctactacgcagctgtggcccaggaccgtgctgcggaagtggctcaacataaggtcgccggagtccgacttcagcgccgacgagggcgacaccaccggcgacgacaccgacagcgaggtcgattacgaaggaaaccaattgggggtggttccttgtggccttcgtagaaggcgcaagtcagagacccttcgtgctcagtatattgatgtcagggagctcaggatttgtgctggaacatggaatgttgcaggcagacttccacctaatgacttggatatccaagaatggttggatatggaagagccagctgatatatatgttcttggatttcaagaaattgttccactaaatgctgggaatatatttggcgctgaagacaaccgccctgtagcaatgtgggagcatattattcgtgaaactttgaataagatcagcccagataaacccaaatataaatctcacagtgatcctccttctccgtcaaggttcaagccatctgatgatgcttttgttatggaagatgaacttattagtgagtctgatagtgaaggtgatggggaggtgcacccattgaacgaacaagatttggtcgactctgttgatggcattcatggtaacaaatgtgaacctcaaacaattttacaagatgaagagttcagcaggttgccttcagtgaagacttttgacagatccaataacctaagttttaaagaatctaatttggaagagaagatctgccagaagatattaactaaaacattcagtcactcagagaggcttgggatgatttggcctgaaccaccattggatatgtttgcccagtgtcttccagacagcacaaagccatttgcttcaggaaaggttttaagatcatatttgtctttcaagtcggtaaatggagattctggtccatttgctgaggacaattcagttcctgatttttatatgagctgtgcagcagttaaaagaaaaaggccatactttgtaagaataataagcaagcagatggttggagtgtacctatcaatatgggtacgaagaagcctccgaaagcacattcagagtctgaaagtatcaactgtaggggttggtgctatgggctacattggtaataaggcaagtttcaataagccacaatattctcagatccctttttgttcaattcaagaaactctgctgtttaaaaaaaacatgctgtctgaaacctgagtttcaaatataagtattccctccgtcctaaaacagtatttgttttagcttttagtttttatgtctatattcaaatggatctagatacatatataaaatacatacatcaagtattgtatgaatctattaattttctaaaacgaattttaatttgggaatgagggagtatttgtcagctggcttgcagtcacttacctaaactaccgtaaacaacaactgacatttttgtagagtatttatgttttagcaccaattgtcttccagtctttccattctcatatcactggcatttactttccatcaatacaccaacactacatttggaaaaggggatcaatatcagtaagcatgtccatataccaaacacacttttgctttatatgttgtcacctgacctctggagaaaaggaaggagatgaactaaaaaggaatgctgatgttcaagaaatccaccgaaggacaatatttaatctagtttcgagagtcaacatgcctaaaacgatatatgaccatgaaaggattgtatggctaggtgatctcaactataggatcaacttaccatatgagaagacacacgaactcatatccaagcaggactggaacaaattgtttgggaaagaccagctgaaagtagagctgaagaaggggcatctgtttgaaggatggactgaaggggtcatcaactttcctccaacgtataagtacaaggttaactcagaaaagtacataagtgatgataacaaatctggaaggagaacacctgcatggtgtgaccgaattctttcccatggtaagggtatgagattactgtcatataagacagttgatctcagactatcagatcaccgccctgtgactgctgtgtacatggcagatgtggaggttttctcttcaaaaaagctgcagagagctctgaccttcaccgatgcagaggctgaggaacagctctccttcgaggaagacaatgcttctggaatatacaaccttggactatatgaaagttcaagtgaagtttacaccccattagtaagagccaaagttttcagcaaggttacctggttgaagccgcagccgttgatgcgggcgctgagccggccccggcggaacggactgcccgccgtgtcccggtcattcccaacgctgcgacttcgacgctagggctagtttgaaagccacaaaagtggagataatgtg

SEQ ID NO: 36741 - DNA, 3037 bp, Zea Mays
ccagtccacaaacaggagctctcagccaagcgcccacgacagtaaacaacgcggcgccgccaccggtttcttttgccgaaggaaggcggcagggagatatagcacgctacagccgcagcccgcaggcaagcaccgcggtccgtggctaggctacacctacaccagatcttcttagctggggaccaagcaaagcaagcaaggctacccgcaaccgccaactgaccgctgtagcggagacgatggcagccgccgcgccctcctcgtcctcgtcctcgtccgcgcgggcgcgcgcgcgcgcgccgccccggccattgcatcccctcgcccgcggcggccccgagcgcgaagaaatggaggccgtcgcggcgacccaccccggcgcgccaccgatgcggcgcaaggggaggaagcagaagcagcggtgctcactcgtgccgtccggacctactacgcagctgtggcccaggaccgtgctgcggaagtggctcaacataaggtcgccggagtccgacttcagcgccgacgagggcgacaccaccggcgacgacaccgacagcgaggtcgattacgaagagatgtgcgcatgggagcgcaagttgcacgatgaggagaggagcgtccgaggattcggtgctgaggctattgcacactgacaaactaagatgtactgctagcctgtcgtatgatcactaatttcagataagtatctctaaagcccctttggagcatacacgctcatgcattgaagtaaaaatatacacttgctgaatagtgcataaacctttccgtatgcactgatacaatctactaaatatgtaggaaaccaattgggggtggttccttgtggccttcgtagaaggcgcaagtcagagacccttcgtgctcagtatattgatgtcagggagctcaggatttgtgctggaacatggaatgttgcaggcagacttccacctaatgacttggatatccaagaatggttggatatggaagagccagctgatatatatgttcttggatttcaagaaattgttccactaaatgctgggaatatatttggcgctgaagacaaccgccctgtagcaatgttcaagccatctgatgatgcttttgttatggaagatgaacttattagtgagtctgatagtgaaggtgatggggaggtgcacccattgaacgaacaagatttggtcgactctgttgatggcattcatggtaacaaatgtgaacctcaaacaattttacaagatgaagagttcagcaggttgccttcagtgaagacttttgacagatccaataacctaagttttaaagaatctaatttggaagagaagatctgccagaagatattaactaaaacattcagtcactcagagaggcttgggatgatttggcctgaaccaccattggatatgtttgcccagtgtcttccagacagcacaaagccatttgcttcaggaaaggttttaagatcatatttgtctttcaagtcggtaaatggagattctggtccatttgctgaggacaattcagttcctgatttttatatgagctgtgcagcagttaaaagaaaaaggccatactttgtaagaataataagcaagcagatggttggagtgtacctatcaatatgggtacgaagaagcctccgaaagcacattcagagtctgaaagtatcaactgtaggggttggtgctatgggctacattggtaataaggcaagtttcaataagccacaatattctcagatccctttttgttcaattcaagaaactctgctgtttaaaaaaaacatgctgtctgaaacctgagtttcaaatataagtattccctccgtcctaaaacagtatttgttttagcttttagtttttatgtctatattcaaatggatctagatacatatataaaatacatacatcaagtattgtatgaatctattaattttctaaaacgaattttaatttgggaatgagggagtatttgtcagctggcttgcagtcacttacctaaactaccgtaaacaacaactgacatttttgtagagtatttatgttttagcaccaattgtcttccagtctttccattctcatatcactggcatttactttccatcaatacaccaacactacatttggaaaagggtatgctaacctcttcttactttggcatgcttcagggatcaatatcagtaagcatgtccatataccaaacacacttttgctttatatgttgtcacctgacctctggagaaaaggaaggagatgaactaaaaaggaatgctgatgttcaagaaatccaccgaaggacaatatttaatctagtttcgagagtcaacatgcctaaaacgatatatgaccatgaaaggattgtatggctaggtgatctcaactataggatcaacttaccatatgagaagacacacgaactcatatccaagcaggactggaacaaattgtttgggaaagaccagctgaaagtagagctgaagaaggggcatctgtttgaaggatggactgaaggggtcatcaactttcctccaacgtataagtacaaggttaactcagaaaagtacataagtgatgataacaaatctggaaggagaacacctgcatggtgtgaccgaattctttcccatggtaagggtatgagattactgtcatataagacagttgatctcagactatcagatcaccgccctgtgactgctgtgtacatggcagatgtggaggttttctcttcaaaaaagctgcagagagctctgaccttcaccgatgcagaggctgaggaacagctctccttcgaggaagacaatgcttctggaatatacaaccttggactatatgaaagttcaagtgaagtttacaccccattagtaagagccaaagttttcagcaaggttacctggttgaagccgcagccgttgatgcgggcgctgagccggccccggcggaacggactgcccgccgtgtcccggtcattcccaacgctgcgacttcgacgctagggctagtttgaaagccacaaaagtggagataatgtg

SEQ ID NO: 36742 - DNA, 2671 bp, Zea Mays
ctccagtccacaaacaggagctctcagccaagcgcccacgacagtaaacaacgcggcgccgccaccggtttcttttgccgaaggaaggcggcagggagatatagcacgctacagccgcagcccgcaggcaagcaccgcggtccgtggctaggctacacctacaccagatcttcttagctggggaccaagcaaagcaagcaaggctacccgcaaccgccaactgaccgctgtagcggagacgatggcagccgccgcgccctcctcgtcctcgtcctcgtccgcgcgggcgcgcgcgcgcgcgccgccccggccattgcatcccctcgcccgcggcggccccgagcgcgaagaaatggaggccgtcgcggcgacccaccccggcgcgccaccgatgcggcgcaaggggaggaagcagaagcagcggtgctcactcgtgccgtccggacctactacgcagctgtggcccaggaccgtgctgcggaagtggctcaacataaggtcgccggagtccgacttcagcgccgacgagggcgacaccaccggcgacgacaccgacagcgaggtcgattacgaaggaatgaaacaaaagatgggcgtctatttcgatgaactaccggagtacaatgttattcctcgtggtttccaaaacgataagatctcccactttatttttatatcctgcattttgtttacgagttgtaaaagaaaaggaaggtccgaatctgattgcacgaaatacagttgcagcacatggtagcttacaaaaaagcgggtaactttctgaaaagggaaaacagggagcataatgctgcacttcactttgttggcggtgatttcagagatgtgcgcatgggagcgcaagttgcacgatgaggagaggagcgtccgaggattcggtgctgaggctattggaaaccaattgggggtggttccttgtggccttcgtagaaggcgcaagtcagagacccttcgtgctcagtatattgatgtcagggagctcaggatttgtgctggaacatggaatgttgcaggcagacttccacctaatgacttggatatccaagaatggttggatatggaagagccagctgatatatatgttcttggatttcaagaaattgttccactaaatgctgggaatatatttggcgctgaagacaaccgccctgtagcaatgttcaagccatctgatgatgcttttgttatggaagatgaacttattagtgagtctgatagtgaaggtgatggggaggtgcacccattgaacgaacaagatttggtcgactctgttgatggcattcatggtaacaaatgtgaacctcaaacaattttacaagatgaagagttcagcaggttgccttcagtgaagacttttgacagatccaataacctaagttttaaagaatctaatttggaagagaagatctgccagaagatattaactaaaacattcagtcactcagagaggcttgggatgatttggcctgaaccaccattggatatgtttgcccagtgtcttccagacagcacaaagccatttgcttcaggaaaggttttaagatcatatttgtctttcaagtcggtaaatggagattctggtccatttgctgaggacaattcagttcctgatttttatatgagctgtgcagcagttaaaagaaaaaggccatactttgtaagaataataagcaagcagatggttggagtgtacctatcaatatgggtacgaagaagcctccgaaagcacattcagagtctgaaagtatcaactgtaggggttggtgctatgggctacattggtaataagggatcaatatcagtaagcatgtccatataccaaacacacttttgctttatatgttgtcacctgacctctggagaaaaggaaggagatgaactaaaaaggaatgctgatgttcaagaaatccaccgaaggacaatatttaatctagtttcgagagtcaacatgcctaaaacgatatatgaccatgaaaggattgtatggctaggtgatctcaactataggatcaacttaccatatgagaagacacacgaactcatatccaagcaggactggaacaaattgtttgggaaagaccagctgaaagtagagctgaagaaggggcatctgtttgaaggatggactgaaggggtcatcaactttcctccaacgtataagtacaaggttaactcagaaaagtacataagtgatgataacaaatctggaaggagaacacctgcatggtgtgaccgaattctttcccatggtaagggtatgagattactgtcatataagacagttgatctcagactatcagatcaccgccctgtgactgctgtgtacatggcagatgtggaggttttctcttcaaaaaagctgcagagagctctgaccttcaccgatgcagaggctgaggaacagctctccttcgaggaagacaatgcttctggaatatacaaccttggactatatgaaagttcaagtgaagtttacaccccattagtaagagccaaagttttcagcaaggttacctggttgaagccgcagccgttgatgcgggcgctgagccggccccggcggaacggactgcccgccgtgtcccggtcattcccaacgctgcgacttcgacgctagggctagtttgaaagccacaaaagtggagataatgtg

SEQ ID NO: 36743 - DNA, 2955 bp, Zea Mays
ctccagtccacaaacaggagctctcagccaagcgcccacgacagtaaacaacgcggcgccgccaccggtttcttttgccgaaggaaggcggcagggagatatagcacgctacagccgcagcccgcaggcaagcaccgcggtccgtggctaggctacacctacaccagatcttcttagctggggaccaagcaaagcaagcaaggctacccgcaaccgccaactgaccgctgtagcggagacgatggcagccgccgcgccctcctcgtcctcgtcctcgtccgcgcgggcgcgcgcgcgcgcgccgccccggccattgcatcccctcgcccgcggcggccccgagcgcgaagaaatggaggccgtcgcggcgacccaccccggcgcgccaccgatgcggcgcaaggggaggaagcagaagcagcggtgctcactcgtgccgtccggacctactacgcagctgtggcccaggaccgtgctgcggaagtggctcaacataaggtcgccggagtccgacttcagcgccgacgagggcgacaccaccggcgacgacaccgacagcgaggtcgattacgaagagatgtgcgcatgggagcgcaagttgcacgatgaggagaggagcgtccgaggattcggtgctgaggctattggaaaccaattgggggtggttccttgtggccttcgtagaaggcgcaagtcagagacccttcgtgctcagtatattgatgtcagggagctcaggatttgtgctggaacatggaatgttgcaggcagacttccacctaatgacttggatatccaagaatggttggatatggaagagccagctgatatatatgttcttggatttcaagaaattgttccactaaatgctgggaatatatttggcgctgaagacaaccgccctgtagcaatgtgggagcatattattcgtgaaactttgaataagatcagcccagataaacccaaatataaatctcacagtgatcctccttctccgtcaaggttcaagccatctgatgatgcttttgttatggaagatgaacttattagtgagtctgatagtgaaggtgatggggaggtgcacccattgaacgaacaagatttggtcgactctgttgatggcattcatggtaacaaatgtgaacctcaaacaattttacaagatgaagagttcagcaggttgccttcagtgaagacttttgacagatccaataacctaagttttaaagaatctaatttggaagagaagatctgccagaagatattaactaaaacattcagtcactcagagaggcttgggatgatttggcctgaaccaccattggatatgtttgcccagtgtcttccagacagcacaaagccatttgcttcaggaaaggttttaagatcatatttgtctttcaagtcggtaaatggagattctggtccatttgctgaggacaattcagttcctgatttttatatgagctgtgcagcagttaaaagaaaaaggccatactttgtaagaataataagcaagcagatggttggagtgtacctatcaatatgggtacgaagaagcctccgaaagcacattcagagtctgaaagtatcaactgtaggggttggtgctatgggctacattggtaataaggcaagtttcaataagccacaatattctcagatccctttttgttcaattcaagaaactctgctgtttaaaaaaaacatgctgtctgaaacctgagtttcaaatataagtattccctccgtcctaaaacagtatttgttttagcttttagtttttatgtctatattcaaatggatctagatacatatataaaatacatacatcaagtattgtatgaatctattaattttctaaaacgaattttaatttgggaatgagggagtatttgtcagctggcttgcagtcacttacctaaactaccgtaaacaacaactgacatttttgtagagtatttatgttttagcaccaattgtcttccagtctttccattctcatatcactggcatttactttccatcaatacaccaacactacatttggaaaagggtatgctaacctcttcttactttggcatgcttcagggatcaatatcagtaagcatgtccatataccaaacacacttttgctttatatgttgtcacctgacctctggagaaaaggaaggagatgaactaaaaaggaatgctgatgttcaagaaatccaccgaaggacaatatttaatctagtttcgagagtcaacatgcctaaaacgatatatgaccatgaaaggattgtatggctaggtgatctcaactataggatcaacttaccatatgagaagacacacgaactcatatccaagcaggactggaacaaattgtttgggaaagaccagctgaaagtagagctgaagaaggggcatctgtttgaaggatggactgaaggggtcatcaactttcctccaacgtataagtacaaggttaactcagaaaagtacataagtgatgataacaaatctggaaggagaacacctgcatggtgtgaccgaattctttcccatggtaagggtatgagattactgtcatataagacagttgatctcagactatcagatcaccgccctgtgactgctgtgtacatggcagatgtggaggttttctcttcaaaaaagctgcagagagctctgaccttcaccgatgcagaggctgaggaacagctctccttcgaggaagacaatgcttctggaatatacaaccttggactatatgaaagttcaagtgaagtttacaccccattagtaagagccaaagttttcagcaaggttacctggttgaagccgcagccgttgatgcgggcgctgagccggccccggcggaacggactgcccgccgtgtcccggtcattcccaacgctgcgacttcgacgctagggctagtttgaaagccacaaaagtggagataatgtg

SEQ ID NO: 36744 - DNA, 2618 bp, Zea Mays
ctccgggcaagcaagtgggtacgcgcgccggtcggcactcagcacagagaaagagaaaaagaaggcgcgaggtgccggtgcgcctctcgccgcgcgaggtgccggtgagcccggggccctgcatccatcatccacttccactggcaccagcgcgcagctggtttggtcggtcggcggtgccccgcctgcgccacgtggcgccacgccggagcacgcggctgtgtcgcgcgtcctcttcgcctccagactccagtccacaaacaggagctctcagccaagcgcccacgacagtaaacaacgcggcgccgccaccggtttcttttgccgaaggaaggcggcagggagatatagcacgctacagccgcagcccgcaggcaagcaccgcggtccgtggctaggctacacctacaccagatcttcttagctggggaccaagcaaagcaagcaaggctacccgcaaccgccaactgaccgctgtagcggagacgatggcagccgccgcgccctcctcgtcctcgtcctcgtccgcgcgggcgcgcgcgcgcgcgccgccccggccattgcatcccctcgcccgcggcggccccgagcgcgaagaaatggaggccgtcgcggcgacccaccccggcgcgccaccgatgcggcgcaaggggaggaagcagaagcagctgtggcccaggaccgtgctgcggaagtggctcaacataaggtcgccggagtccgacttcagcgccgacgagggcgacaccaccggcgacgacaccgacagcgaggtcgattacgaagagatgtgcgcatgggagcgcaagttgcacgatgaggagaggagcgtccgaggattcggtgctgaggctattggaaaccaattgggggtggttccttgtggccttcgtagaaggcgcaagtcagagacccttcgtgctcagtatattgatgtcagggagctcaggatttgtgctggaacatggaatgttgcaggcagacttccacctaatgacttggatatccaagaatggttggatatggaagagccagctgatatatatgttcttggatttcaagaaattgttccactaaatgctgggaatatatttggcgctgaagacaaccgccctgtagcaatgttcaagccatctgatgatgcttttgttatggaagatgaacttattagtgagtctgatagtgaaggtgatggggaggtgcacccattgaacgaacaagatttggtcgactctgttgatggcattcatggtaacaaatgtgaacctcaaacaattttacaagatgaagagttcagcaggttgccttcagtgaagacttttgacagatccaataacctaagttttaaagaatctaatttggaagagaagatctgccagaagatattaactaaaacattcagtcactcagagaggcttgggatgatttggcctgaaccaccattggatatgtttgcccagtgtcttccagacagcacaaagccatttgcttcaggaaaggttttaagatcatatttgtctttcaagtcggtaaatggagattctggtccatttgctgaggacaattcagttcctgatttttatatgagctgtgcagcagttaaaagaaaaaggccatactttgtaagaataataagcaagcagatggttggagtgtacctatcaatatgggtacgaagaagcctccgaaagcacattcagagtctgaaagtatcaactgtaggggttggtgctatgggctacattggtaataagggatcaatatcagtaagcatgtccatataccaaacacacttttgctttatatgttgtcacctgacctctggagaaaaggaaggagatgaactaaaaaggaatgctgatgttcaagaaatccaccgaaggacaatatttaatctagtttcgagagtcaacatgcctaaaacgatatatgaccatgaaaggattgtatggctaggtgatctcaactataggatcaacttaccatatgagaagacacacgaactcatatccaagcaggactggaacaaattgtttgggaaagaccagctgaaagtagagctgaagaaggggcatctgtttgaaggatggactgaaggggtcatcaactttcctccaacgtataagtacaaggttaactcagaaaagtacataagtgatgataacaaatctggaaggagaacacctgcatggtgtgaccgaattctttcccatggtaagggtatgagattactgtcatataagacagttgatctcagactatcagatcaccgccctgtgactgctgtgtacatggcagatgtggaggttttctcttcaaaaaagctgcagagagctctgaccttcaccgatgcagaggctgaggaacagctctccttcgaggaagacaatgcttctggaatatacaaccttggactatatgaaagttcaagtgaagtttacaccccattagtaagagccaaagttttcagcaaggttacctggttgaagccgcagccgttgatgcgggcgctgagccggccccggcggaacggactgcccgccgtgtcccggtcattcccaacgctgcgacttcgacgctagggctagtttgaaagccacaaaagtggagataatgtg

SEQ ID NO: 36745 - DNA, 1213 bp, Zea Mays
cgatgaactaccggagtacaatgttattcctcgtggtttccaaaacgataagatctcccactttatttttatatcctgcattttgtttacgagttgtaaaagaaaaggaaggtccgaatctgattgcacgaaatacagttgcagcacatggtagcttacaaaaaagcgggtaactttctgaaaagggaaaacagggagcataatgctgcacttcactttgttggcggtgatttcagagatgtgcgcatgggagcgcaagttgcacgatgaggagaggagcgtccgaggattcggtgctgaggctattggaaaccaattgggggtggttccttgtggccttcgtagaaggcgcaagtcagagacccttcgtgctcagtatattgatgtcagggagctcaggatttgtgctggaacatggaatgttgcaggcagacttccacctaatgacttggatatccaagaatggttggatatggaagagccagctgatatatatgttcttggatttcaagaaattgttccactaaatgctgggaatatatttggcgctgaagacaaccgccctgtagcaatgtgggagcatattattcgtgaaactttgaataagatcagcccagataaacccaaatataaatctcacagtgatcctccttctccgtcaaggttcaagccatctgatgatgcttttgttatggaagatgaacttattagtgagtctgatagtgaaggtgatggggaggtgcacccattgaacgaacaagatttggtcgactctgttgatggcattcatggtaacaaatgtgaacctcaaacaattttacaagatgaagagttcagcaggttgccttcagtgaagacttttgacagatccaataacctaagttttaaagaatctaatttggaagagaagatctgccagaagatattaactaaaacattcagtcactcagagaggcttgggatgatttggcctgaaccaccattggatatgtttgcccagtgtcttccagacagcacaaagccatttgcttcaggaaaggttttaagatcatatttgtctttcaagtcggtaaatggagattctggtccatttgctgaggacaattcagttcctgatttttatatgagctgtgcagcagttaaaagaaaaaggccatactttgtaagaataataagcaagcagatggttggagtgtacctatcaatatgagta

SEQ ID NO: 36746 - DNA, 1748 bp, Zea Mays
gttttgagagagatagaggaaccattaaccaatggttgagtagcagttttgacaaccggagatatgggtccatggatgagctgaaggaacttgtgaagattttccatgaagctggtatcaaggttcttggcgacgctgttctaaatcataggtgtgctcagtttcagaacaacaatggtgtctggaatatatttggtggtcgtatgaactgggatgatcgagcagttgttgctgatgatccacatttccagggaagaggaaacaagagcagtggagataatttccatgcagcaccaaacattgatcactcccaagagtttgtgaggaatgatcttaaagaatggctttgctggatgagaaaggaagtcggctacgatggatggagacttgactttgttcgtggtttctggggtggatatgtcaaggactatttggaagcaagtgaaccatactttgcagtaggagagtactgggactccctcagttatacttatggtgaaatggactacaatcaggatgcccacaggcagagaattgttgattggataaatgctacaaatggaactgctggcgcatttgatgttaccactaaaggaatacttcatgcggcgcttgaaagatcagagtattggcgcctgtccgatgaaaaagggaaaccccctggagtattgggttggtggccttcaagagcagtcacatttatagagaatcatgatactggttctactcagggccattggaggttcccctatggtatggaactgcaaggatacgcctacatcctgacacaccctggcactcccgcagtcttctatgaccacatattttcacacttacaaccagagatcgctaaatttatttccattcgacaccgtcaaaagattcattgccgcagcaagatcaagatactaaaggcagagaggagtttatatgcggctgaaattgatgagaaggtaacaatgaaaatcggatcagaacattttgagccaagcggtccccagaactggattgttgctgctgagggtcaagattacaaaatctgggaagcgtcttcatagacttggcgggctgcgagtgccatataactgctcaaagactaaaaagctacaagaaagcataatgctaggagatggcgcctcagaatggtcagctggcgggagctgctgccgctgccgccatggagcagcaaaattcaacaacataagctatggaagcacttgccacggcgataggattatctaataggactactgttgaacattcgatatatccagaaccacccatcatttgcaggcacattggccattaaaatttagcttcgtcctctattttggagctatgtaaaagcatgcacaactctatttatgtgtgaaataaaatttgaatcttcatcatgggtcaagagatgtattttgccacccacaacatgacttcggtgattctacattcatagcatgcaaccgtaggcagaaatgatatattggacgaaccaaacttgaaaacatcgaaaagataacagtgaaggtgaagattccgagctttagacaatgtgtcaacggagtaatgtacttgatcacattgtcgtttgcagattcagttctcaacatctaaaaccagctagggagaccgcgaactttcaggatgacaccaagttcagagagagctgaggttcagaattatttcactcgacctcaagtattgatacggagacttgactgtgctaggactaggggggatcggcatcatca

SEQ ID NO: 36747 - DNA, 2987 bp, Zea Mays
gtcgtggcccgagccggggccgcggagacgccggtggctggcactgacgaggacgctggagcggcgttctccgagacgttccccctgcgccgatgccaagctgtggaagggaaggcgtgggtgagggtggacgcagagccggactccgaaggcaagtgcaaggtcgttgttgggtgtaatgtggcggggaagtgggtactgcactggggtgtctcgtacgatgatgaacatggaagagaatgggatcagcctccttcagaaatgagaccacctggttcagttgcaatcaaggactatgcaattgaaacaccattggagattttgcccaattcagaaggacagcccctttatgaaatgcaaatcaaatttgataaagacattccaatcgccgctgtcaactttgttctaaaggaagaggaaacaggtgcatggtttcagcataagggcagggatttcagaatacccttaaatggatccttcaatgatggcggaaaacaagatattgatatctggccaggagatttggggcatgtattgaagaaatctgaaggctctagttctcagccacaaaacacttcacctgaggatacaggtttgagtggcaaacatatatcagggttctatgaggaataccccatccttaaatcagagtatgttcagaatcttgttactgtcactgtgaggagagacattgaagcgcataaaagacttgtggaatttgacactgatattcctggagaagttatcattcattggggagtttgcagagacaatactatgacatgggagatcccaccagaaccacatccaccaaaaacgaaaatattccgacacaaagctcttcaaactttgctgcagcaaaaagctgatggagcaggaaactcaatttcattctcacttgatgcagagtattcttgtctgttttttgtgctcaaacttgacgagtatacttggttgagaaatcttgagaatggatctgatttctatgtgccacttacaagagtggggcagtatggcagcactcaggatcctgacaaggctgaggcacagaaaatagaggataagtcttcacaggctgatggcttaatcagtgatataagaaatctggtggttggcctatcgtctagaagaggtcagaaagctaagaataaagttcttcaagaggacatcctacaagaaatcgaaagacttgcagcagaagcttatagcattttcaggagccccactattgattccgtagatgaatctgtacagctcgatgacacattaagcgcaaagccagcatgttctggcactggatctggttttgagatattgtgccaaggatttaactgggaatctcataaatcagggaaatggtatgttgagcttggcacaaaggccaaggagttgtcgtccttgggtttcaccattgtctggtcaccaccaccaactgattctgtgtcacctgaaggatacatgccaagggatctatataatctaaactcacgggaagaggaaacaagagcagtggagataatttccatgcagcaccaaacattgatcactcccaagagtttgtgaggaatgatcttaaagaatggctttgctggatgagaaaggaagtcggctacgatggatggagacttgactttgttcgtggtttctggggtggatatgtcaaggactatttggaagcaagtgaaccatactttgcagtaggagagtactgggactccctcagttatacttatggtgaaatggactacaatcaggatgcccacaggcagagaattgttgattggataaatgctacaaatggaactgctggcgcatttgatgttaccactaaaggaatacttcatgcggcgcttgaaagatcagagtattggcgcctgtccgatgaaaaagggaaaccccctggagtattgggttggtggccttcaagagcagtcacatttatagagaatcatgatactggttctactcagggccattggaggttcccctatggtatggaactgcaaggatacgcctacatcctgacacaccctggcactcccgcagtcttctatgaccacatattttcacacttacaaccagagatcgctaaatttatttccattcgacaccgtcaaaagattcattgccgcagcaagatcaagatactaaaggcagagaggagtttatatgcggctgaaattgatgagaaggtaacaatgaaaatcggatcagaacattttgagccaagcggtccccagaactggattgttgctgctgagggtcaagattacaaaatctgggaagcgtcttcatagacttggcgggctgcgagtgccatataactgctcaaagactaaaaagctacaagaaagcataatgctaggagatggcgcctcagaatggtcagctggcgggagctgctgccgctgccgccatggagcagcaaaattcaacaacataagctatggaagcacttgccacggcgataggattatctaataggactactgttgaacattcgatatatccagaaccacccatcatttgcaggcacattggccattaaaatttagcttcgtcctctattttggagctatgtaaaagcatgcacaactctatttatgtgtgaaataaaatttgaatcttcatcatgggtcaagagatgtattttgccacccacaacatgacttcggtgattctacattcatagcatgcaaccgtaggcagaaatgatatattggacgaaccaaacttgaaaacatcgaaaagataacagtgaaggtgaagattccgagctttagacaatgtgtcaacggagtaatgtacttgatcacattgtcgtttgcagattcagttctcaacatctaaaaccagctagggagaccgcgaactttcaggatgacaccaagttcagagagagctgaggttcagaattatttcactcgacctcaagtattgatacggagacttgactgtgctaggactaggggggatcggcatcatca

SEQ ID NO: 36748 - DNA, 3170 bp, Zea Mays
cggacgcggacgcggacgcgggccgggcggtgccgtgccgcgcagcacgggctcgtgaggctcggcggccgcgtcgtggcccgagccggggccgcggagacgccggtggctggcactgacgaggacgctggagcggcgttctccgagacgttccccctgcgccgatgccaagctgtggaagggaaggcgtgggtgagggtggacgcagagccggactccgaaggcaagtgcaaggtcgttgttgggtgtaatgtggcggggaagtgggtactgcactggggtgtctcgtacgatgatgaacatggaagagaatgggatcagcctccttcagaaatgagaccacctggttcagttgcaatcaaggactatgcaattgaaacaccattggagattttgcccaattcagaaggacagcccctttatgaaatgcaaatcaaatttgataaagacattccaatcgccgctgtcaactttgttctaaaggaagaggaaacaggtgcatggtttcagcataagggcagggatttcagaatacccttaaatggatccttcaatgatggcggaaaacaagatattgatatctggccaggagatttggggcatgtattgaagaaatctgaaggctctagttctcagccacaaaacacttcacctgaggatacaggtttgagtggcaaacatatatcagggttctatgaggaataccccatccttaaatcagagtatgttcagaatcttgttactgtcactgtgaggagagacattgaagcgcataaaagacttgtggaatttgacactgatattcctggagaagttatcattcattggggagtttgcagagacaatactatgacatgggagatcccaccagaaccacatccaccaaaaacgaaaatattccgacacaaagctcttcaaactttgctgcagcaaaaagctgatggagcaggaaactcaatttcattctcacttgatgcagagtattcttgtctgttttttgtgctcaaacttgacgagtatacttggttgagaaatcttgagaatggatctgatttctatgtgccacttacaagagtggggcagtatggcagcactcaggatcctgacaaggctgaggcacagaaaatagaggataagtcttcacaggctgatggcttaatcagtgatataagaaatctggtggttggcctatcgtctagaagaggtcagaaagctaagaataaagttcttcaagaggacatcctacaagaaatcgaaagacttgcagcagaagcttatagcattttcaggagccccactattgattccgtagatgaatctgtacagctcgatgacacattaagcgcaaagccagcatgttctggcactggatctggttttgagatattgtgccaaggatttaactgggaatctcataaatcagggaaatggtatgttgagcttggcacaaaggccaaggagttgtcgtccttgggtttcaccattgtctggtcaccaccaccaactgattctgtgtcacctgaaggatacatgccaagggatctatataatctaaactcacgatatgggtccatggatgagctgaaggaacttgtgaagattttccatgaagctggtatcaaggttcttggcgacgctgttctaaatcataggtgtgctcagtttcagaacaacaatggtgtctggaatatatttggtggtcgtatgaactgggatgatcgagcagttgttgctgatgatccacatttccagggaagaggaaacaagagcagtggagataatttccatgcagcaccaaacattgatcactcccaagagtttgtgaggaatgatcttaaagaatggctttgctggatgagaaaggaagtcggctacgatggatggagacttgactttgttcgtggtttctggggtggatatgtcaaggactatttggaagcaagtgaaccatactttgcagtaggagagtactgggactccctcagttatacttatggtgaaatggactacaatcaggatgcccacaggcagagaattgttgattggataaatgctacaaatggaactgctggcgcatttgatgttaccactaaaggaatacttcatgcggcgcttgaaagatcagagtattggcgcctgtccgatgaaaaagggaaaccccctggagtattgggttggtggccttcaagagcagtcacatttatagagaatcatgatactggttctactcagggccattggaggttcccctatggtatggaactgcaaggatacgcctacatcctgacacaccctggcactcccgcagtcttctatgaccacatattttcacacttacaaccagagatcgctaaatttatttccattcgacaccgtcaaaagattcattgccgcagcaagatcaagatactaaaggcagagaggagtttatatgcggctgaaattgatgagaaggttgagatccagatcccttcacatttgattaaatctgaaattccttgagcaaactgccttttccaaaggaagctacaagaaagcataatgctaggagatggcgcctcagaatggtcagctggcgggagctgctgccgctgccgccatggagcagcaaaattcaacaacataagctatggaagcacttgccacggcgataggattatctaataggactactgttgaacattcgatatatccagaaccacccatcatttgcaggcacattggccattaaaatttagcttcgtcctctattttggagctatgtaaaagcatgcacaactctatttatgtgtgaaataaaatttgaatcttcatcatgggtcaagagatgtattttgccacccacaacatgacttcggtgattctacattcatagcatgcaaccgtaggcagaaatgatatattggacgaaccaaacttgaaaacatcgaaaagataacagtgaaggtgaagattccgagctttagacaatgtgtcaacggagtaatgtacttgatcacattgtcgtttgcagattcagttctcaacatctaaaaccagctagggagaccgcgaactttcaggatgacaccaagttcagagagagctgaggttcagaattatttcactcgacctcaagtattgatacggagacttgactgtgctaggactaggggggatcggcatcatca

SEQ ID NO: 36749 - DNA, 3071 bp, Zea Mays
atttcttatttccgactcatctcgcctcgcttttcccccttcttctccctcttcctcccgttctagttttctcattcgcttcggctccttcacacaatcacacgcacacaccagaggtggaagggaaggcgtgggtgagggtggacgcagagccggactccgaaggcaagtgcaaggtcgttgttgggtgtaatgtggcggggaagtgggtactgcactggggtgtctcgtacgatgatgaacatggaagagaatgggatcagcctccttcagaaatgagaccacctggttcagttgcaatcaaggaagaggaaacaggtgcatggtttcagcataagggcagggatttcagaatacccttaaatggatccttcaatgatggcggaaaacaagatattgatatctggccaggagatttggggcatgtattgaagaaatctgaaggctctagttctcagccacaaaacacttcacctgaggatacaggtttgagtggcaaacatatatcagggttctatgaggaataccccatccttaaatcagagtatgttcagaatcttgttactgtcactgtgaggagagacattgaagcgcataaaagacttgtggaatttgacactgatattcctggagaagttatcattcattggggagtttgcagagacaatactatgacatgggagatcccaccagaaccacatccaccaaaaacgaaaatattccgacacaaagctcttcaaactttgctgcagcaaaaagctgatggagcaggaaactcaatttcattctcacttgatgcagagtattcttgtctgttttttgtgctcaaacttgacgagtatacttggttgagaaatcttgagaatggatctgatttctatgtgccacttacaagagtggggcagtatggcagcactcaggatcctgacaaggctgaggcacagaaaatagaggataagtcttcacaggctgatggcttaatcagtgatataagaaatctggtggttggcctatcgtctagaagaggtcagaaagctaagaataaagttcttcaagaggacatcctacaagaaatcgaaagacttgcagcagaagcttatagcattttcaggagccccactattgattccgtagatgaatctgtacagctcgatgacacattaagcgcaaagccagcatgttctggcactggatctggttttgagatattgtgccaaggatttaactgggaatctcataaatcagggaaatggtatgttgagcttggcacaaaggccaaggagttgtcgtccttgggtttcaccattgtctggtcaccaccaccaactgattctgtgtcacctgaaggatacatgccaagggatctatataatctaaactcacgatatgggtccatggatgagctgaaggaacttgtgaagattttccatgaagctggtatcaaggttcttggcgacgctgttctaaatcataggtgtgctcagtttcagaacaacaatggtgtctggaatatatttggtggtcgtatgaactgggatgatcgagcagttgttgctgatgatccacatttccagggaagaggaaacaagagcagtggagataatttccatgcagcaccaaacattgatcactcccaagagtttgtgaggaatgatcttaaagaatggctttgctggatgagaaaggaagtcggctacgatggatggagacttgactttgttcgtggtttctggggtggatatgtcaaggactatttggaagcaagtgaaccatactttgcagtaggagagtactgggactccctcagttatacttatggtgaaatggactacaatcaggatgcccacaggcagagaattgttgattggataaatgctacaaatggaactgctggcgcatttgatgttaccactaaaggaatacttcatgcggcgcttgaaagatcagagtattggcgcctgtccgatgaaaaagggaaaccccctggagtattgggttggtggccttcaagagcagtcacatttatagagaatcatgatactggttctactcagggccattggaggttcccctatggtatggaactgcaaggatacgcctacatcctgacacaccctggcactcccgcagtcttctatgaccacatattttcacacttacaaccagagatcgctaaatttatttccattcgacaccgtcaaaagattcattgccgcagcaagatcaagatactaaaggcagagaggagtttatatgcggctgaaattgatgagaaggtaacaatgaaaatcggatcagaacattttgagccaagcggtccccagaactggattgttgctgctgagggtcaagattacaaaatctgggaagcgtcttcatagacttggcgggctgcgagtgccatataactgctcaaagactaaaaagctacaagaaagcataatgctaggagatggcgcctcagaatggtcagctggcgggagctgctgccgctgccgccatggagcagcaaaattcaacaacataagctatggaagcacttgccacggcgataggattatctaataggactactgttgaacattcgatatatccagaaccacccatcatttgcaggcacattggccattaaaatttagcttcgtcctctattttggagctatgtaaaagcatgcacaactctatttatgtgtgaaataaaatttgaatcttcatcatgggtcaagagatgtattttgccacccacaacatgacttcggtgattctacattcatagcatgcaaccgtaggcagaaatgatatattggacgaaccaaacttgaaaacatcgaaaagataacagtgaaggtgaagattccgagctttagacaatgtgtcaacggagtaatgtacttgatcacattgtcgtttgcagattcagttctcaacatctaaaaccagctagggagaccgcgaactttcaggatgacaccaagttcagagagagctgaggttcagaattatttcactcgacctcaagtattgatacggagacttgactgtgctaggactaggggggatcggcatcatca

SEQ ID NO: 36750 - DNA, 1789 bp, Zea Mays
gcactcgaaaaccccaaacccaaaggcatctcccagtcggagtcgccccatggccccacccacctattctccctgccggcggcagccttaaccctaatctcatcgcctcctcttccttctccagttcctcgaaggcccagcagacaacagcccctctttcttctcagccatgtcggaggacgaagcgaacgctgctgctgcgccggcagagggaaagaactggcggcggaaggggaagcacgacaagcccaagccgtgggacgaggaccccaacatcgaccgctggaagatcgacaagttcgaccctgcctggaacgagggcggcatgctcgaagtcagctccttctccaccctctttccccagtaccgagagaagtacctacaggaggcgtggccggtcgtgaagggcgcattgaaggagtacgggatctcgtgcgagctcaatttgcctctctctcggtgtgtgtaggtggagggatccatgactgtgtcgacgaccagaaagacaagggatcccttcgctattatcaaggccagggaactaattaagcttttgtccaggagcgtccctgcacctcaggcaatcaaaattcttgatgatgagatgaactgcgatattattaagattggtggtcttgtgagaaataaggagcggtttgttaaaaggagggaacggcttttaggccctaacttgtctacactcaaggctattgagattttgactggctgctacatcttagtgcagggaaatactgttgcagccatgggcaactataggggaaggggactgaaacaagtgagaaggattgtagaggattgcatgaagaatgtaaagcatccagtgtaccacatcaaggaactactaatcaaacgtgagctagcaaaaaatcctgctctagccaatgaaaattgggacagatttctcccgaagttcaagaagaagaatgtcaagcagaagaagcctcaaactaaggagaagaaaccgtacacaccctttccaccgcctcaacagcctagcaagattgatcttgaacttgagaacggtgagtatttcatgagtgacaaaaagaaatcagcaaagaaatggcaagagaagctggacaagcaatctgggagagctgaagaaaataaaagaaaaagagaggctgcatttgttcctccaaaggagaacactgcaggtccatccaaatctgacaagaatgccagtgacaacagtgagatagccgatatagcgaagtcattaaagagaaaggcgaaggaatttagaaagaacgaggcccaggagagtgtcatagctgaatcatatatcgcaagtaatgatgaattgcggcaaaaaaagaaaaagaaatcaactaagtccaagtagccctaatcctcatgcataatgacactggcaattgagaaggattgcatgagccatccctataattatgtcattcatgctgtgatcgtattagatgatgaaacaaaattcgaaccttccgctggtctgttgttgcaacagttcatatgcaataggtttttaatgggtaactgccatgataaccaaggaacagaaagagccctcaagcttatcattctccaaagatatatattttcatcctataggttgtgttggttggtagagcctggctggtctaggcctgttgtatcatagtacgttatatgcaggcctcggcatttggtagaatcggtcaagctgcagagttttggttttggcaaaatgttagtcgaatttactgttaaaaaaagctcaacatattttcataaaagaatatccaagcaaggg

SEQ ID NO: 36751 - DNA, 1731 bp, Zea Mays
gcactcgaaaaccccaaacccaaaggcatctcccagtcggagtcgccccatggccccacccacctattctccctgccggcggcagccttaaccctaatctcatcgcctcctcttccttctccagttcctcgaaggcccagcagacaacagcccctctttcttctcagccatgtcggaggacgaagcgaacgctgctgctgcgccggcagagggaaagaactggcggcggaaggggaagcacgacaagcccaagccgtgggacgaggaccccaacatcgaccgctggaagatcgacaagttcgaccctgcctggaacgagggcggcatgctcgaaagaagtacctacaggaggcgtggccggtcgtgaagggcgcattgaaggagtacgggatctcgtgcgagctcaatttggtggagggatccatgactgtgtcgacgaccagaaagacaagggatcccttcgctattatcaaggccagggaactaattaagcttttgtccaggagcgtccctgcacctcaggcaatcaaaattcttgatgatgagatgaactgcgatattattaagattggtggtcttgtgagaaataaggagcggtttgttaaaaggagggaacggcttttaggccctaacttgtctacactcaaggctattgagattttgactggctgctacatcttagtgcagggaaatactgttgcagccatgggcaactataggggaaggggactgaaacaagtgagaaggattgtagaggattgcatgaagaatgtaaagcatccagtgtaccacatcaaggaactactaatcaaacgtgagctagcaaaaaatcctgctctagccaatgaaaattgggacagatttctcccgaagttcaagaagaagaatgtcaagcagaagaagcctcaaactaaggagaagaaaccgtacacaccctttccaccgcctcaacagcctagcaagattgatcttgaacttgagaacggtgagtatttcatgagtgacaaaaagaaatcagcaaagaaatggcaagagaagctggacaagcaatctgggagagctgaagaaaataaaagaaaaagagaggctgcatttgttcctccaaaggagaacactgcaggtccatccaaatctgacaagaatgccagtgacaacagtgagatagccgatatagcgaagtcattaaagagaaaggcgaaggaatttagaaagaacgaggcccaggagagtgtcatagctgaatcatatatcgcaagtaatgatgaattgcggcaaaaaaagaaaaagaaatcaactaagtccaagtagccctaatcctcatgcataatgacactggcaattgagaaggattgcatgagccatccctataattatgtcattcatgctgtgatcgtattagatgatgaaacaaaattcgaaccttccgctggtctgttgttgcaacagttcatatgcaataggtttttaatgggtaactgccatgataaccaaggaacagaaagagccctcaagcttatcattctccaaagatatatattttcatcctataggttgtgttggttggtagagcctggctggtctaggcctgttgtatcatagtacgttatatgcaggcctcggcatttggtagaatcggtcaagctgcagagttttggttttggcaaaatgttagtcgaatttactgttaaaaaaagctcaacatattttcataaaagaatatccaagcaaggg

SEQ ID NO: 36752 - DNA, 1744 bp, Zea Mays
gcactcgaaaaccccaaacccaaaggcatctcccagtcggagtcgccccatggccccacccacctattctccctgccggcggcagccttaaccctaatctcatcgcctcctcttccttctccagttcctcgaaggcccagcagacaacagcccctctttcttctcagccatgtcggaggacgaagcgaacgctgctgctgcgccggcagagggaaagaactggcggcggaaggggaagcacgacaagcccaagccgtgggacgaggaccccaacatcgaccgctggaagatcgacaagttcgaccctgcctggaacgagggcggcatgctcgaagtcagctccttctccaccctctttccccagtaccgagagaagtacctacaggaggcgtggccggtcgtgaagggcgcattgaaggagtacgggatctcgtgcgagctcaatttggtggagggatccatgactgtgtcgacgaccagaaagacaagggatcccttcgctattatcaaggccagggaactaattaagcttttgtccaggagcgtccctgcacctcagatgaactgcgatattattaagattggtggtcttgtgagaaataaggagcggtttgttaaaaggagggaacggcttttaggccctaacttgtctacactcaaggctattgagattttgactggctgctacatcttagtgcagggaaatactgttgcagccatgggcaactataggggaaggggactgaaacaagtgagaaggattgtagaggattgcatgaagaatgtaaagcatccagtgtaccacatcaaggaactactaatcaaacgtgagctagcaaaaaatcctgctctagccaatgaaaattgggacagatttctcccgaagttcaagaagaagaatgtcaagcagaagaagcctcaaactaaggagaagaaaccgtacacaccctttccaccgcctcaacagcctagcaagattgatcttgaacttgagaacggtgagtatttcatgagtgacaaaaagaaatcagcaaagaaatggcaagagaagctggacaagcaatctgggagagctgaagaaaataaaagaaaaagagaggctgcatttgttcctccaaaggagaacactgcaggtccatccaaatctgacaagaatgccagtgacaacagtgagatagccgatatagcgaagtcattaaagagaaaggcgaaggaatttagaaagaacgaggcccaggagagtgtcatagctgaatcatatatcgcaagtaatgatgaattgcggcaaaaaaagaaaaagaaatcaactaagtccaagtagccctaatcctcatgcataatgacactggcaattgagaaggattgcatgagccatccctataattatgtcattcatgctgtgatcgtattagatgatgaaacaaaattcgaaccttccgctggtctgttgttgcaacagttcatatgcaataggtttttaatgggtaactgccatgataaccaaggaacagaaagagccctcaagcttatcattctccaaagatatatattttcatcctataggttgtgttggttggtagagcctggctggtctaggcctgttgtatcatagtacgttatatgcaggcctcggcatttggtagaatcggtcaagctgcagagttttggttttggcaaaatgttagtcgaatttactgttaaaaaaagctcaacatattttcataaaagaatatccaagcaaggg

SEQ ID NO: 36753 - DNA, 1740 bp, Zea Mays
gcactcgaaaaccccaaacccaaaggcatctcccagtcggagtcgccccatggccccacccacctattctccctgccggcggcagccttaaccctaatctcatcgcctcctcttccttctccagttcctcgaaggcccagcagacaacagcccctctttcttctcagccatgtcggaggacgaagcgaacgctgctgctgcgccggcagagggaaagaactggcggcggaaggggaagcacgacaagcccaagccgtgggacgaggaccccaacatcgaccgctggaagatcgacaagttcgaccctgcctggaacgagggcggcatgctcgaagtcagctccttctccaccctctttccccagtaccgagagaagtacctacaggaggcgtggccggtcgtgaagggcgcattgaaggagtggagggatccatgactgtgtcgacgaccagaaagacaagggatcccttcgctattatcaaggccagggaactaattaagcttttgtccaggagcgtccctgcacctcaggcaatcaaaattcttgatgatgagatgaactgcgatattattaagattggtggtcttgtgagaaataaggagcggtttgttaaaaggagggaacggcttttaggccctaacttgtctacactcaaggctattgagattttgactggctgctacatcttagtgcagggaaatactgttgcagccatgggcaactataggggaaggggactgaaacaagtgagaaggattgtagaggattgcatgaagaatgtaaagcatccagtgtaccacatcaaggaactactaatcaaacgtgagctagcaaaaaatcctgctctagccaatgaaaattgggacagatttctcccgaagttcaagaagaagaatgtcaagcagaagaagcctcaaactaaggagaagaaaccgtacacaccctttccaccgcctcaacagcctagcaagattgatcttgaacttgagaacggtgagtatttcatgagtgacaaaaagaaatcagcaaagaaatggcaagagaagctggacaagcaatctgggagagctgaagaaaataaaagaaaaagagaggctgcatttgttcctccaaaggagaacactgcaggtccatccaaatctgacaagaatgccagtgacaacagtgagatagccgatatagcgaagtcattaaagagaaaggcgaaggaatttagaaagaacgaggcccaggagagtgtcatagctgaatcatatatcgcaagtaatgatgaattgcggcaaaaaaagaaaaagaaatcaactaagtccaagtagccctaatcctcatgcataatgacactggcaattgagaaggattgcatgagccatccctataattatgtcattcatgctgtgatcgtattagatgatgaaacaaaattcgaaccttccgctggtctgttgttgcaacagttcatatgcaataggtttttaatgggtaactgccatgataaccaaggaacagaaagagccctcaagcttatcattctccaaagatatatattttcatcctataggttgtgttggttggtagagcctggctggtctaggcctgttgtatcatagtacgttatatgcaggcctcggcatttggtagaatcggtcaagctgcagagttttggttttggcaaaatgttagtcgaatttactgttaaaaaaagctcaacatattttcataaaagaatatccaagcaaggg

SEQ ID NO: 36754 - DNA, 1729 bp, Zea Mays
gcactcgaaaaccccaaacccaaaggcatctcccagtcggagtcgccccatggccccacccacctattctccctgccggcggcagccttaaccctaatctcatcgcctcctcttccttctccagttcctcgaaggcccagcagacaacagcccctctttcttctcagccatgtcggaggacgaagcgaacgctgctgctgcgccggcagagggaaagaactggcggcggaaggggaagcacgacaagcccaagccgtgggacgaggaccccaacatcgaccgctggaagatcgacaagttcgaccctgcctggaacgagggcggcatgctcgaagtcagctccttctccaccctctttccccagtaccgagagaagtacctacaggaggcgtggccggtcgtgaagggcgcattgaaggagtacgggatctcgtgcgagctcaatttggtggagggatccatgactgtgtcgacgaccagaaagacaagggatcccttcgctattatcaaggccagggaactaattaagcttttgtccaggagcgtccctgcacctcaggcaatcaaaattcttgatgatgagatgaactgcgatattattaagattggtggtcttgtgagaaataaggagcggtttgttaaaaggagggaacggcttttaggccctaacttgtctacactcaagggaaatactgttgcagccatgggcaactataggggaaggggactgaaacaagtgagaaggattgtagaggattgcatgaagaatgtaaagcatccagtgtaccacatcaaggaactactaatcaaacgtgagctagcaaaaaatcctgctctagccaatgaaaattgggacagatttctcccgaagttcaagaagaagaatgtcaagcagaagaagcctcaaactaaggagaagaaaccgtacacaccctttccaccgcctcaacagcctagcaagattgatcttgaacttgagaacggtgagtatttcatgagtgacaaaaagaaatcagcaaagaaatggcaagagaagctggacaagcaatctgggagagctgaagaaaataaaagaaaaagagaggctgcatttgttcctccaaaggagaacactgcaggtccatccaaatctgacaagaatgccagtgacaacagtgagatagccgatatagcgaagtcattaaagagaaaggcgaaggaatttagaaagaacgaggcccaggagagtgtcatagctgaatcatatatcgcaagtaatgatgaattgcggcaaaaaaagaaaaagaaatcaactaagtccaagtagccctaatcctcatgcataatgacactggcaattgagaaggattgcatgagccatccctataattatgtcattcatgctgtgatcgtattagatgatgaaacaaaattcgaaccttccgctggtctgttgttgcaacagttcatatgcaataggtttttaatgggtaactgccatgataaccaaggaacagaaagagccctcaagcttatcattctccaaagatatatattttcatcctataggttgtgttggttggtagagcctggctggtctaggcctgttgtatcatagtacgttatatgcaggcctcggcatttggtagaatcggtcaagctgcagagttttggttttggcaaaatgttagtcgaatttactgttaaaaaaagctcaacatattttcataaaagaatatccaagcaaggg

SEQ ID NO: 36755 - DNA, 1089 bp, Zea Mays
ctctctttccccgcagcaaggccccagcggcggcacggcgcagtggcgcaccctctggagtcaccttcttcctgcccaatacggccagcggcggcaccccgaccaggttgaccccgccccggcaacgaccagcgggtcgtacagcacgccgatccaattcctccgtgaaggtcgataaactgtgagatactgagattgaagctgcacactgttttagtttcttcaaggacaaggaacattaatatcaccaaatactttcgtcaatggagcttgaagctgatttcgctgatgaagatgtcagttcaaataatggattacaagatctgtggtcacttgacgagatagattcaaagagagcaagattcccgtgctgcattgtttggactcctcttcctgtagtttcatggcttgccccttacatagggcatgttggaatctgtcaggaggatggggctatcttggattttgctggttcaaatttggtgagcatggataattttgcttatggttcagttgccagatacctccagcttgacagaaagaagtcctacagccattcagaagttggagcagcgatgtcatgggatgatgctctgcaatcgggcatgagacgcttccagcacaagtactacaatctgttcacctgcaattgccactcgtttgtggcaaactgcctgaaccggctcgcttacaatggctctgtggagtggaatgttttgaatgtggcttcccttgtttggtttcatggccaatgggtggacaaaatgtctttcgctcggtctttcttgcctttcctaactgtgacatgcatcggtattttaatggctggctggtctttcctggtagggatggcagcattctctattcttttgattggatggtttgtttttacggtatactgcgttaagggtttgatatgttgaccggagaagaattactgaaagcactcattagcgcatcgcagtctacatgtaatcgctgtgctagattcaattaaataattgatgtcatcagcttcagtgattcagaaacctgttcaaattcagaccaatttattttgacttatggaggcggtctcgtgaaaaattt

SEQ ID NO: 36756 - DNA, 866 bp, Zea Mays
cctcactctctttccccgcagcaaggccccagcggcggcacggcgcagtggcgcaccctctggagtcaccttcttcctgcccaatacggccagcggcggcaccccgaccaggttgaccccgccccggcaacgaccagcgggtcgtacagcacgccgatccaattcctccgtgaaggtcgataaactgtgagatactgagattgaagctgcacactgttttagtttcttcaaggacaaggaacattaatatcaccaaatactttcgtcaatggagcttgaagctgatttcgctgatgaagatgtcagttcaaataatggattacaagatctgtggtcacttgacgagatagattcaaagagagcaagattcccgtgctgcattgtttggactcctcttcctgtagtttcatggcttgccccttacatagggcatgttggaatctgtcaggaggatggggctatcttggattttgctggttcaaatttggtgagcatggataattttgcttatggttcagttgccagatacctccagcttgacagaaagaaggttaggatgaatggatgactataatttcattttctgggctatgcaattcaacataggtgctcatcttgtactttattttacctaaaccactactaagatgtcaacaggtttaggatccatggagctaaaatctggatttctccaagggtagaaagcctaataatcctatagttctgagtacacaatcatagtattttgttttaactggtggtttcagcttccaatgtcatcaatatctgaatttatttctggacagcatgaagtcaatgtacctttgttctatttacctttattcataaacagtcgatattttcca

SEQ ID NO: 36757 - DNA, 2440 bp, Zea Mays
aaaatccagcacgccatgccaatcccaatcccaaacccaaaccaaacaaccacaaacctccccaaccactggcccctttccgctgcagccgccactccacgacatccccaatctcgcacccgatcacggaaggaacggaaacgggtggcaaatcgccgtgcgcgagcgcgcagcagagctcccagagaggagacgggtgagacaaaacttgaacccgctgattgatggattgatccctactgcctagtcgctactcgctagtcggctttgtgcccgtgctctgctccctgctatcccgcccacctgggacttggacccggccgccccatccggccatccccatctgtttactggctccagtccccgccccgaatcttttccctcctcagcaccgccaccaacctcgaccccgcctctgtgctcatgttgagcgtgcagcgtatcggagatgtgatcggagcccgactgtcggtccgagtttgtttgcctctggaccgtggcgtggaggaggcaagctggcggtgagatgggtcggcgcggaggaggaagaggagcaggagggggacgttttcgcggctgtgctctcctcgctgctgccttcgttgtctcaacgttcgtgatccagggtgctggaggattgaagcaatctcatgcacccgctgttgctcacaaggttcttctatccataacaaattggcatccacaaaattacttggatgatgtacttcatccatcagaagtacaagatcgaatactcgaacgcttaggattaacagtaaaaccacccgcatggactactatttgttgtacatgtttataaatggtaggattaatatgcaaccgacaacccatcaatcaaccagacaaccatgaagtttttatgttgtgactgaaaagcggatgatttttcctctttttatctgccaggaaatggttacacagcttctaataagctgccttccacaggtgaaactgtttcaccaactaaacaatcagtactgactgcagcaggatctagtgctcttgaccatttttatcaataaccaaagagaaaaacgtccccatttatgcagatcccagagccaattgttgaggagtttattgaaatctatctgcatcttaacctttagaatcagtttggtatgatggtttcttatttttccttcattcaacggccaatatgtcccatcatttcaaactggcaatgaacttcctttcccttcaaacccagctatctttacaccaattgatgtgaacagagacaaggttcctgttgctccaccttctatacatcatgctattccatggccacccgcacaccccacaacagagttcaagttcacatttaactggtattggactcaactaggtcatgctgtgattttatcatctgcatttacacattacgactgtatgatatatatctccgttcttgaatatttgtcgaccgctagttcatttttgaactaaaacgcgacaaataaaaaagaacgtagggagtacaatatctttttagataatggaatagtaaatcccagatgatgtacaaatatctgctctcttcatcaccaatcacttctcctgccatccatagtatggtacacatgttgctgcgcctcaccactccagggaaatcgtctgtcccttcatcctattcacattatgaacatatagaaggtcaccttctcctttagttaaagttcaaaagacttgctaacaatatggtagtcaggctcacttccttcacgatcacaaaacacgtgattggttgtcggccccacctccacccggtttgcgccagcctgggccggtagaaacacgcctccctcacgtctccgctcatggaagcagaacgttgaaaaagcaccaagactgcgtccgcgcatgcaggtaaccaatcactggctcaagtatggtcaatgcacgtgctaagcctggacgtggctggccaggcaaccaatcacataaagtgttccacccacaaataagataaggtgcatgacgttcagattgctgccccccctcccaaaaaaaaggtggagcgttggagtagggctggtgcaaagcaacttgaaagccttggcctcccagctgccttctgtagggtcaggactatttctagtgcttaatgctgtgacagctgaggtcatcctattacagcatgagataaggatagagttttttttccctgtttgtattagggttctggtcttttttccctgtgttcttttgccttgtttgggcattgtattgtgtgttggaatctgcgccggagagacaaccctgcaggttgccggcgagttcctacctcccaggtaagttcttcaggtatgagaaaaacctcccagggactcacacgcacgcgaactctttgttggagaggaacacagcagatttggtggcgtcctattgactgccttttcttagcctctaaggccat

SEQ ID NO: 36758 - DNA, 2280 bp, Zea Mays
aaaatccagcacgccatgccaatcccaatcccaaacccaaaccaaacaaccacaaacctccccaaccactggcccctttccgctgcagccgccactccacgacatccccaatctcgcacccgatcacggaaggaacggaaacgggtggcaaatcgccgtgcgcgagcgcgcagcagagctcccagagaggagacgggtgagacaaaacttgaacccgctgattgatggattgatccctactgcctagtcgctactcgctagtcggctttgtgcccgtgctctgctccctgctatcccgcccacctgggacttggacccggccgccccatccggccatccccatctgtttactggctccagtccccgccccgaatcttttccctcctcagcaccgccaccaacctcgaccccgcctctgtgctcatgttgagcgtgcagcgtatcggagatgtgatcggagcccgactgtcggtccgagtttgtttgcctctggaccgtggcgtggaggaggcaagctggcggtgagatgggtcggcgcggaggaggaagaggagcaggagggggacgttttcgcggctgtgctctcctcgctgctgccttcgttgtctcaacgttcgtgatccagggtgctggaggattgaagcaatctcatgcacccgctgttgctcacaaggttcttctatccataacaaattggcatccacaaaattacttggatgatgtacttcatccatcagaagtacaagatcgaatactcgaacgcttaggaaatggttacacagcttctaataagctgccttccacaggtgaaactgtttcaccaactaaacaatcagtactgactgcagcaggatctagtgctcttgaccatttttatcaataaccaaagagaaaaacgtccccatttatgcagatcccagagccaattgttgaggagtttattgaaatctatctgcatcttaacctttagaatcagtttggtatgatggtttcttatttttccttcattcaacggccaatatgtcccatcatttcaaactggcaatgaacttcctttcccttcaaacccagctatctttacaccaattgatgtgaacagagacaaggttcctgttgctccaccttctatacatcatgctattccatggccacccgcacaccccacaacagagttcaagttcacatttaactggtattggactcaactaggtcatgctgtgattttatcatctgcatttacacattacgactgtatgatatatatctccgttcttgaatatttgtcgaccgctagttcatttttgaactaaaacgcgacaaataaaaaagaacgtagggagtacaatatctttttagataatggaatagtaaatcccagatgatgtacaaatatctgctctcttcatcaccaatcacttctcctgccatccatagtatggtacacatgttgctgcgcctcaccactccagggaaatcgtctgtcccttcatcctattcacattatgaacatatagaaggtcaccttctcctttagttaaagttcaaaagacttgctaacaatatggtagtcaggctcacttccttcacgatcacaaaacacgtgattggttgtcggccccacctccacccggtttgcgccagcctgggccggtagaaacacgcctccctcacgtctccgctcatggaagcagaacgttgaaaaagcaccaagactgcgtccgcgcatgcaggtaaccaatcactggctcaagtatggtcaatgcacgtgctaagcctggacgtggctggccaggcaaccaatcacataaagtgttccacccacaaataagataaggtgcatgacgttcagattgctgccccccctcccaaaaaaaaggtggagcgttggagtagggctggtgcaaagcaacttgaaagccttggcctcccagctgccttctgtagggtcaggactatttctagtgcttaatgctgtgacagctgaggtcatcctattacagcatgagataaggatagagttttttttccctgtttgtattagggttctggtcttttttccctgtgttcttttgccttgtttgggcattgtattgtgtgttggaatctgcgccggagagacaaccctgcaggttgccggcgagttcctacctcccaggtaagttcttcaggtatgagaaaaacctcccagggactcacacgcacgcgaactctttgttggagaggaacacagcagatttggtggcgtcctattgactgccttttcttagcctctaaggccat

SEQ ID NO: 36759 - DNA, 809 bp, Zea Mays
catgaatgcaatatgccttgttttttaataactgttaaggttgagaaagctcacagtggagatgttcattgtgttgattggaatccccttgatgttaactatatcttaactggttctgccgataactctgtccgaatgtgggatcgtcgcaatctgggttcgggaggagctggttctccaattcacaaatttgagggccataaagctgctgttctttgtgttcagtggtcacctgacagagcatctgtttttggaagttctgcagaagatggtttcttaaatgtttgggaccatgagaagggataagatcgtagacttccactggaattcgtcagatccttggacaattgtcagtgtctcagatgatggtgagagcactggtggaggtggaacactgcagatatggcgaatgagtgatttgatctaccgcccagaggatgaagttcttacagagctggagaatttcaaggctcacctggccagttgcgctccgaggaattgagtcatgtgaaaactctgagtaggttatgtagtttcctggccctaagtagtttcctggccataagtatggccccaattgacattggatctgtcttctcatgctcctagagctgtacccttcgaggtgcttgtgcctttgtgagcttgtgttgaaccatgttgtatgactaaatagtccgcaaacgagtcagctggatggctaatctgtaggccaactattgggatattgttggatattatcaacaaccggttcagattcgtgatgagattgtccgcaattgtttagttttgtgccttcgtgtgtgggt

SEQ ID NO: 36760 - DNA, 830 bp, Zea Mays
catgaatgcaatatgccttgttttttaataactgttaaggttgagaaagctcacagtggagatgttcattgtgttgattggaatccccttgatgttaactatatcttaactggttctgccgataactctgtccgaatgtgggatcgtcgcaatctgggttcgggaggagctggttctccaattcacaaatttgagggccataaagctgctgttctttgtgttcagaagatggtttcttaaatgtttgggaccatgagaaggttgggaagaagaaaaattctaatgtcccagctgggcttttctttcagcatgctggtcatagggataagatcgtagacttccactggaattcgtcagatccttggacaattgtcagtgtctcagatgatggtgagagcactggtggaggtggaacactgcaatatggcgaatgagtgatttgatctaccgcccagaggatgaagttcttacagagctggagaatttcaaggctcacctggccagttgcgctccgaggaattgagtcatgtgaaaactctgagtaggttatgtagtttcctggccctaagtagtttcctggccataagtatggccccaattgacattggatctgtcttctcatgctcctagagctgtacccttcgaggtgcttgtgcctttgtgagcttgtgttgaaccatgttgtatgactaaatagtccgcaaacgagtcagctggatggctaatctgtaggccaactattgggatattgttggatattatcaacaaccggttcagattcgtgatgagattgtccgcaattgtttagttttgtgccttcgtgtgtgggt

SEQ ID NO: 36761 - DNA, 872 bp, Zea Mays
gcatgaatgcaatatgccttgttttttaataactgttaaggttgagaaagctcacagtggagatgttcattgtgttgattggaatccccttgatgttaactatatcttaactggttctgccgataactctgtccgaatgtgggatcgtcgcaatctgggttcgggaggagctggttctccaattcacaaatttgagggccataaagctgctgttctttgtgttcagtggtcacctgacagagcatctgtttttggaagttctgcagaagatggtttcttaaatgtttgggaccatgagaaggttgggaagaagaaaaattctaatgtcccagctgggcttttctttcagcatgctggtcatagggataagatcgtagacttccactggaattcgtcagatccttggacaattgtcagtgtctcagatgatggtgagagcactggtggaggtggaacactgcagatatggcgaatgagtgatttgatctaccgcccagaggatgaagttcttacagagctggagaatttcaaggctcacctggccagttgcgctccgaggaattgagtcatgtgaaaactctgagtaggttatgtagtttcctggccctaagtagtttcctggccataagtatggccccaattgacattggatctgtcttctcatgctcctagagctgtacccttcgaggtgcttgtgcctttgtgagcttgtgttgaaccatgttgtatgactaaatagtccgcaaacgagtcagctggatggctaatctgtaggccaactattgggatattgttggatattatcaacaaccggttcagattcgtgatgagattgtccgcaattgtttagttttgtgccttcgtgtgtgggt

SEQ ID NO: 36762 - DNA, 1817 bp, Zea Mays
gggttttgatccggggttgtaatcgaggtgggggccacagtttgagaaagctacctacaagaatcgtcaacgcctttacctatctgaacagaccgatgggagtgtgcctaatactctggttatcgcaaactgtgaagttgtgaaaccaagggttgcagctgctgaacatatctcgcagtttaacgaggaagcacgatcaccttttgtaaagaagtacaagactatagttcatcctggtgaagttaacagaatcagggagcttccacagaacagtaagatcatagccacacacactgacagtccagatgtacttgtttgggatgttgaagcacaaccaaatagacatgctgtcttaggagcttctgaatctcgtcctgatctgatattaacgggacaccaggaaaatgcagaatttgcgcttgccatgtgtccagcagaaccatatgtcctgtcaggaggaaaggacaaatttgttgtcttgtggagcatccaagaccacatatctgcccttggggattcctcgtcttctcccggagcatctggcagcaagcagtctggcaaaattgcaaatgaaaaggagagtcctaaagttgatcctagaggtatattccatggccatgacagtactgttgaagatgttcagttctgcccttccagtgcgcaggagttttgtagtgtgggtgatgatgcttgtcttattctgtgggatgctcgaactggcactgacccagctgttaaggttgagaaagctcacagtggagatgttcattgtgttgattggaatccccttgatgttaactatatcttaactggttctgccgataactctgtccgaatgtgggatcgtcgcaatctgggttcgggaggagctggttctccaattcacaaatttgagggccataaagctgctgttctttgtgttcaggcatgtcaagataatattttgctattttgtactctttatgcagatatggttgcctcctatgatgtttttggatacctttttgccataattctagtctcggattgcagtggtcacctgacagagcatctgtttttggaagttctgcagaagatggtttcttaaatgtttgggaccatgagaaggtaaccactcataaactgaagtatcctatcttttttgaaggaaacctgcacaactattggcgaaggtgattgggttcagttgcccgtgattcctcatgtacctctcttgtctgactaatataagtttttgtaatggcaggttgggaagaagaaaaattctaatgtcccagctgggcttttctttcagcatgctggtcatagggataagatcgtagacttccactggaattcgtcagatccttggacaattgtcagtgtctcagatgatggtgagagcactggtggaggtggaacactgcagatatggcgaatgagtgatttgatctaccgcccagaggatgaagttcttacagagctggagaatttcaaggctcacctggccagttgcgctccgaggaattgagtcatgtgaaaactctgagtaggttatgtagtttcctggccctaagtagtttcctggccataagtatggccccaattgacattggatctgtcttctcatgctcctagagctgtacccttcgaggtgcttgtgcctttgtgagcttgtgttgaaccatgttgtatgactaaatagtccgcaaacgagtcagctggatggctaatctgtaggccaactattgggatattgttggatattatcaacaaccggttcagattcgtgatgagattgtccgcaattgtttagttttgtgccttcgtgtgtgggt

SEQ ID NO: 36763 - DNA, 1139 bp, Zea Mays
agcagctcgagggggtgacgaagtaaaagagaacacgaggacaggactgaaagcaaaagagagcaagatggtcccatgttcgtgttcccatcccagtgggacgtttgaacgggacaagccagcctgtggctactcaattaccatccgtgaaaccatcactgcgacatcggtggatttcacaggtgctaaagcttttgagatatcaggcacgccggttgactgtgtctcgttggccttatctgggaggttgtttccttggtcgtctcctgctttggtgatcagcggtatcaacacaggaccaaactgtgggtttcactcttctgccattgctgctgcaagggaggccttagtgtatggggtgccttcaattgcaatctcattgaattggaagaaggatgaaaccaaagacagcgacttcaaggatgcagctcaggcatgcttaccattgataaatgctgccttggatgacattgagaaaggaactttcctcagaggatgcctattgaatattggagttccaagtgcaccatctgcaattaagggtttcaagttgaccaaacagagtggatatagtcctgctcaaagttggcaagctgtgtcagcaagcaggccctcatctgctactcacttcatgggcatgcaccaaagccttggtattcagctggcgcagcttgggaaggatgcatctgcagcagcagctgcacgtagagttagtggtcaacgaaaggcggtcgaggttgagtctgttgcaactgctggtaaacaagagactcgagaagtagtgaagaagttattccgtgctgagtttgtcgagaggcaacatcaaggtttagatgaggataccgatttgagagctttggagaatggatttgtgagctctcatttctctctctctctctctttccctcctttcaaatggctaagtattcaccccactctacaggtatcggtcacccctctgaatgttcatgggcaagtggagcctgaaatccaagccccagcttcagattggctctcagcagctgtatcactagagaaagaaaaggaagctgctccagctacagctgaagctcattcagcagcctaacaaacacgcagacatgtacacactccggttcgatcgggggcgaatccttccg

SEQ ID NO: 36764 - DNA, 1776 bp, Zea Mays
agcagctcgagggggtgacgaagtaaaagagaacacgaggacaggactgaaagcaaaagagagcaagatggtcccatgttcgtgttcccatcccagtgggacgtttgaacgggacaagccagcctgtggctactcaattaccatccgtgaaaccatcactgcgacatcggtggatttcacaggcacgccggttgactgtgtctcgttggccttatctgggaggttgtttccttggtcgtctcctgctttggtgatcagcggtatcaacacaggaccaaactgtgggtatgagatggaggccttagtgtatggggtgccttcaattgcaatctcattgaattgaaggatgaaaccaaagacagcgacttcaaggatgcagctcaggcatgcttaccattgataaatgctgccttggatgacattgagaaaggaactttcctcagaggatgcctattgaatattggagttccaagtgcaccatctgcaattaagggtttcaagttgaccaaacagagtggatatagtcctgctcaaagttggcaagctgtgtcagcaagcaggccctcatctgctactcacttcatgggcatgcaccaaagccttggtattcagctggcgcagcttgggaaggatgcatctgcagcagcagctgcacgtagagttagtggtcaacgaaaggcggtcgaggttgagtctgttgcaactgctggtaaacaagagactcgagaagtagtgaagaagttattccgtgctgagtttgtcgagaggcaacatcaaggtttagatgaggataccgatttgagagctttggagaatggatttgtgagctctcatttctctctctctctctctttccctcctttcaaatggctaagtattcaccccactctacaggtatcggtcacccctctgaatgttcatgggcaagtggagcctgaaatccaagccccagcttcagattggctctcagcagctgtatcactagagaaagaaaaggaagctgctccagctacagctgaagctcattcagcagcctaacaaacacgcagacatgtacacactccgtaggtgccttagttcctgtggtgatggcgctcttttctctcttccgtttatcagttcagtttgtttagtatttctcccgcaatatttgtttggcgcagtgtctatttttttgttcatcttttcagccgactatcggcttccttggccgtgcaaatgatttgatgcaggtggccctacattttggatgcaaccatgtaggctacggcaactaccagatgaatactgcccagccccccactattttttcagtgtggtttgttctaggaaggtgttgtattcagcatgggatatagttgattttgtcttgcaccggtctgaaccgtggccaccaaatatgttttggccgcttgtaaccagaaatgcaatcgcaaccattcaagggcctgtttgttttatcttaattcacattgatcggagagaattttaggagtttaaatctatagcaaatcaaaatctgtcgacctctcctagtcccctccagtctatatgggatataaataactgaacaaggtctaattctgcaattttacttttgcatttaggtcatggctatcaaggtgattatactattcgttggccttgcaattttgatattaccctttatttttcaactttatgattttacccatcgtgttttgataatgaagttattgtttgccccttcctcttaacgatgttagagaaattcagaattagtgattaaaaaataaa

SEQ ID NO: 36765 - DNA, 1734 bp, Zea Mays
agcagctcgagggggtgacgaagtaaaagagaacacgaggacaggactgaaagcaaaagagagcaagatggtcccatgttcgtgttcccatcccagtgggacgtttgaacgggacaagccagcctgtggctactcaattaccatccgtgaaaccatcactgcgacatcggtggatttcacaggtgctaaagcttttgagatatcaggcacgccggttgactgtgtctcgttggccttatctgggaggtgatcagcggtatcaacacaggaccaaactgtgggtatgagatgtttcactcttctgccattgctgctgcaagggaggccttagtgtatggggtgccttcaattgcaatctcattgaattggaagaaggatgaaaccaaagacagcgacttcaaggatgcagctcaggcatgcttaccattgataaatgctgccttggatgacattgagaaaggaactttcctcagaggatgcctattgaatattggagttccaagtgcaccatctgcaattaagggtttcaagttgaccaaacagagtggatatagtcctgctcaaagttggcaagctgtgtcagcaagcaggccctcatctgctactcacttcatgggcatgcaccaaagccttggtattcagctggcgcagcttgggaaggatgcatctgcagcagcagctgcacgtagagttagtggtcaacgaaaggcggtcgaggttgagtctgttgcaactgctggtaaacaagagactcgagaagtagtgaagaagttattccgtgctgagtttgtcgagaggcaacatcaaggtttagatgaggataccgatttgagagctttggagaatggatttgtatcggtcacccctctgaatgttcatgggcaagtggagcctgaaatccaagccccagcttcagattggctctcagcagctgtatcactagagaaagaaaaggaagctgctccagctacagctgaagctcattcagcagcctaacaaacacgcagacatgtacacactccgtaggtgccttagttcctgtggtgatggcgctcttttctctcttccgtttatcagttcagtttgtttagtatttctcccgcaatatttgtttggcgcagtgtctatttttttgttcatcttttcagccgactatcggcttccttggccgtgcaaatgatttgatgcaggtggccctacattttggatgcaaccatgtaggctacggcaactaccagatgaatactgcccagccccccactattttttcagtgtggtttgttctaggaaggtgttgtattcagcatgggatatagttgattttgtcttgcaccggtctgaaccgtggccaccaaatatgttttggccgcttgtaaccagaaatgcaatcgcaaccattcaagggcctgtttgttttatcttaattcacattgatcggagagaattttaggagtttaaatctatagcaaatcaaaatctgtcgacctctcctagtcccctccagtctatatgggatataaataactgaacaaggtctaattctgcaattttacttttgcatttaggtcatggctatcaaggtgattatactattcgttggccttgcaattttgatattaccctttatttttcaactttatgattttacccatcgtgttttgataatgaagttattgtttgccccttcctcttaacgatgttagagaaattcagaattagtgattaaaaaataaa

SEQ ID NO: 36766 - DNA, 1585 bp, Zea Mays
agcagctcgagggggtgacgaagtaaaagagaacacgaggacaggactgaaagcaaaagagagcaagatggtcccatgttcgtgttcccatcccagtgggacgtttgaacgggacaagccagcctgtggctactcaattaccatccgtgaaaccatcactgcgacatcggtggatttcacaggtgctaaagcttttgagatatcaggcacgccggttgactgtgtctcgttggccttatctgggaggttgtttccttggtcgtctcctgctttggtgatcagcggtatcaacacaggaccaaactgtgggtttcactcttctgccattgctgctgcaagggaggccttagtgtatggggtgccttcaattgcaatctcattgaattggaagaaggatgaaaccaaagacagcgacttcaaggatgcagctcaggcatgcttaccattgataaatgctgccttggatgacattgagaaaggaactttcctcagaggatgcctattgaatattggagttccaagtgcaccatctgcaattaagggtttcaagttgaccaaacagagtggatatagtcctgctcaaagttggcaagctgtgtcagcaagcaggccctcatctgctactcacttcatgggcatgcaccaaagccttggtattcagctggcgcagcttgggaaggatgcatctgcagcagcagctgcacgtagagttagtggtcaacgaaaggcggtcgaggttgagtctgttgcaactgctggtaaacaagagactcgagaagtagtgaagaagttattccgtgctgagtttgtcgagaggcaacatcaaggtttagatgaggataccgatttgagagctttggagaatggatttgtatcggtcacccctctgaatgttcatgggcaagtggagcctgaaatccaagccccagcttcagattggctctcagcagctgtatcactagagaaagaaaaggaagctgctccagctacagctgaagctcattcagcagcctaacaaacacgcagacatgtacacactccgtggccctacattttggatgcaaccatgtaggctacggcaactaccagatgaatactgcccagccccccactattttttcagtgtggtttgttctaggaaggtgttgtattcagcatgggatatagttgattttgtcttgcaccggtctgaaccgtggccaccaaatatgttttggccgcttgtaaccagaaatgcaatcgcaaccattcaagggcctgtttgttttatcttaattcacattgatcggagagaattttaggagtttaaatctatagcaaatcaaaatctgtcgacctctcctagtcccctccagtctatatgggatataaataactgaacaaggtctaattctgcaattttacttttgcatttaggtcatggctatcaaggtgattatactattcgttggccttgcaattttgatattaccctttatttttcaactttatgattttacccatcgtgttttgataatgaagttattgtttgccccttcctcttaacgatgttagagaaattcagaattagtgattaaaaaataaa

SEQ ID NO: 36767 - DNA, 1560 bp, Zea Mays
agcagctcgagggggtgacgaagtaaaagagaacacgaggacaggactgaaagcaaaagagagcaagatggtcccatgttcgtgttcccatcccagtgggacgtttgaacgggacaagccagcctgtggctactcaattaccatccgtgaaaccatcactgcgacatcggtggatttcacaggtgctaaagcttttgagatatcaggcacgccggttgactgtgtctcgttggccttatctgggaggttgtttccttggtcgtctcctgctttggtgatcagcggtatcaacacaggaccaaactgtgggtatgagatggaggccttagtgtatggggtgccttcaattgcaatctcattgaattgaaggatgaaaccaaagacagcgacttcaaggatgcagctcaggcatgcttaccattgataaatgctgccttggatgacattgagaaaggaactttcctcagaggatgcctattgaatattggagttccaagtgcaccatctgcaattaagggtttcaagttgaccaaacagagtggatatagtcctgctcaaagttggcaagctgtgtcagcaagcaggccctcatctgctactcacttcatgggcatgcaccaaagccttggtattcagctggcgcagcttgggaaggatgcatctgcagcagcagctgcacgtagagttagtggtcaacgaaaggcggtcgaggttgagtctgttgcaactgctggtaaacaagagactcgagaagtagtgaagaagttattccgtgctgagtttgtcgagaggcaacatcaaggtttagatgaggataccgatttgagagctttggagaatggatttgtatcggtcacccctctgaatgttcatgggcaagtggagcctgaaatccaagccccagcttcagattggctctcagcagctgtatcactagagaaagaaaaggaagctgctccagctacagctgaagctcattcagcagcctaacaaacacgcagacatgtacacactccgtggccctacattttggatgcaaccatgtaggctacggcaactaccagatgaatactgcccagccccccactattttttcagtgtggtttgttctaggaaggtgttgtattcagcatgggatatagttgattttgtcttgcaccggtctgaaccgtggccaccaaatatgttttggccgcttgtaaccagaaatgcaatcgcaaccattcaagggcctgtttgttttatcttaattcacattgatcggagagaattttaggagtttaaatctatagcaaatcaaaatctgtcgacctctcctagtcccctccagtctatatgggatataaataactgaacaaggtctaattctgcaattttacttttgcatttaggtcatggctatcaaggtgattatactattcgttggccttgcaattttgatattaccctttatttttcaactttatgattttacccatcgtgttttgataatgaagttattgtttgccccttcctcttaacgatgttagagaaattcagaattagtgattaaaaaataaa

SEQ ID NO: 36768 - DNA, 1594 bp, Zea Mays
agcagctcgagggggtgacgaagtaaaagagaacacgaggacaggactgaaagcaaaagagagcaagatggtcccatgttcgtgttcccatcccagtgggacgtttgaacgggacaagccagcctgtggctactcaattaccatccgtgaaaccatcactgcgacatcggtggatttcacaggtgctaaagcttttgagatatcaggcacgccggttgactgtgtctcgttggccttatctgggaggttgtttccttggtcgtctcctgctttggtgatcagcggtatcaacacaggaccaaactgtgggtatgagatgtttcactcttctgccattgctgctgcaagggaggccttagtgtatggggtgccttcaattgcaatctcattgaattggaagaaggatgaaaccaaagacagcgacttcaaggatgcagctcaggcatgcttaccattgataaatgctgccttggatgacattgagaaaggaactttcctcagaggatgcctattgaatattggagttccaagtgcaccatctgcaattaagggtttcaagttgaccaaacagagtggatatagtcctgctcaaagttggcaagctgtgtcagcaagcaggccctcatctgctactcacttcatgggcatgcaccaaagccttggtattcagctggcgcagcttgggaaggatgcatctgcagcagcagctgcacgtagagttagtggtcaacgaaaggcggtcgaggttgagtctgttgcaactgctggtaaacaagagactcgagaagtagtgaagaagttattccgtgctgagtttgtcgagaggcaacatcaaggtttagatgaggataccgatttgagagctttggagaatggatttgtatcggtcacccctctgaatgttcatgggcaagtggagcctgaaatccaagccccagcttcagattggctctcagcagctgtatcactagagaaagaaaaggaagctgctccagctacagctgaagctcattcagcagcctaacaaacacgcagacatgtacacactccgtggccctacattttggatgcaaccatgtaggctacggcaactaccagatgaatactgcccagccccccactattttttcagtgtggtttgttctaggaaggtgttgtattcagcatgggatatagttgattttgtcttgcaccggtctgaaccgtggccaccaaatatgttttggccgcttgtaaccagaaatgcaatcgcaaccattcaagggcctgtttgttttatcttaattcacattgatcggagagaattttaggagtttaaatctatagcaaatcaaaatctgtcgacctctcctagtcccctccagtctatatgggatataaataactgaacaaggtctaattctgcaattttacttttgcatttaggtcatggctatcaaggtgattatactattcgttggccttgcaattttgatattaccctttatttttcaactttatgattttacccatcgtgttttgataatgaagttattgtttgccccttcctcttaacgatgttagagaaattcagaattagtgattaaaaaataaa

SEQ ID NO: 36769 - DNA, 1590 bp, Zea Mays
agcagctcgagggggtgacgaagtaaaagagaacacgaggacaggactgaaagcaaaagagagcaagatggtcccatgttcgtgttcccatcccagtgggacgtttgaacgggacaagccagcctgtggctactcaattaccatccgtgaaaccatcactgcgacatcggtggatttcacaggtgctaaagcttttgagatatcaggcacgccggttgactgtgtctcgttggccttatctgggaggttgtttccttggtcgtctcctgctttggtgatcagcggtatcaacacaggaccaaactgtgggtatgagatgtttcactcttctgccattgctgctgcaagggaggccttagtgtatggggtgccttcaattgcaatctcattgaattgaaggatgaaaccaaagacagcgacttcaaggatgcagctcaggcatgcttaccattgataaatgctgccttggatgacattgagaaaggaactttcctcagaggatgcctattgaatattggagttccaagtgcaccatctgcaattaagggtttcaagttgaccaaacagagtggatatagtcctgctcaaagttggcaagctgtgtcagcaagcaggccctcatctgctactcacttcatgggcatgcaccaaagccttggtattcagctggcgcagcttgggaaggatgcatctgcagcagcagctgcacgtagagttagtggtcaacgaaaggcggtcgaggttgagtctgttgcaactgctggtaaacaagagactcgagaagtagtgaagaagttattccgtgctgagtttgtcgagaggcaacatcaaggtttagatgaggataccgatttgagagctttggagaatggatttgtatcggtcacccctctgaatgttcatgggcaagtggagcctgaaatccaagccccagcttcagattggctctcagcagctgtatcactagagaaagaaaaggaagctgctccagctacagctgaagctcattcagcagcctaacaaacacgcagacatgtacacactccgtggccctacattttggatgcaaccatgtaggctacggcaactaccagatgaatactgcccagccccccactattttttcagtgtggtttgttctaggaaggtgttgtattcagcatgggatatagttgattttgtcttgcaccggtctgaaccgtggccaccaaatatgttttggccgcttgtaaccagaaatgcaatcgcaaccattcaagggcctgtttgttttatcttaattcacattgatcggagagaattttaggagtttaaatctatagcaaatcaaaatctgtcgacctctcctagtcccctccagtctatatgggatataaataactgaacaaggtctaattctgcaattttacttttgcatttaggtcatggctatcaaggtgattatactattcgttggccttgcaattttgatattaccctttatttttcaactttatgattttacccatcgtgttttgataatgaagttattgtttgccccttcctcttaacgatgttagagaaattcagaattagtgattaaaaaataaa

SEQ ID NO: 36770 - DNA, 1501 bp, Zea Mays
cttttaccctgcctgcccagccctggccctgggtgcgtttgcattgcagccactgcatggatgcatttggcatgccgcggtactgctgctcgctcgccccttccgtgcgcggtgcgccactgctagtgagaagagatatagctaggcttcagtgcgacgacgacgacgagatggggcaccactcctgctgcaacaagcagaaggtccggaggggcttgtggtcgccggaggaggacgagaagctcgtcaagtacatcaccgcgcacggccatggttgctggagctcagtcccaaggcaagcagggctgcagcggtgcggcaagagctgcaggctgaggtggatcaactacctgaggccggacctgaagaggggaagcttctcgcagcaggaggaggccctcatcgtcgagctccacagggtgcttgggaacaggtgggcccagatcgccaagcatctgcctggtagaacggacaacgaggtgaagaacttctggaactccaccatcaagaagaagctcatctcccaggccgtgggcagcctccacccagacctgtactacaacattctggatggaggagccgccggagcacaggacctcgcggccgccggatgcgcgccgctgaacggggcggacagcgcgtcagcagcggcggcgcaagcagtgggcgtgacgacgacgcagccttctccttccatggcgcacgtcgaccccgcggcggcgtgggcggcggacttcggctcccagacgctcttcctccccggcggcgcggccgctctccagtacgccgccgccgtcgagggggagttcgtcaagcagtgccgcacggcggcggacgcctgctacccgccggagccggaggacggcggcggcggcgcgaggcagtgcaacaaccaggcagctgccgatgtcgtgacggcggcggtgcaaccggaaggcgccggcctcccggtgttccttgaacccaagtgcgccggcagtttcatgcccgagcctgctctggctccggtgatggacttcatggaagccatcctggggtcgacggcggcggcgtcggctgccagcgcttcgtctctcgacgacacctgcttctcggcgaacgccggcatgcagtcccactgttggattccctgaattattcaccctatttacttccatcggtagatgcatatatacatgcatggatgactcttcatcaagcgcgcgcggagtatcagatatgattaagtatagagtttatgaaataattaatatagatatagtaggtttctctcactctcatcgatcagggtagtaacaacatgggttacatgtaaatatgtttacgtacgtatatataatgtctagtgaaggcaagggcaagcatatatatatgagtgggtgtcagtcacgcgccagtaaggaatagtacttgaaactcctttacagctaagctatatgtttgtagcgtgcatgttattgcattggacacggatgcgcggctagagattcttacattattc

SEQ ID NO: 36771 - DNA, 1881 bp, Zea Mays
tgaagccctcggcggtccagccactcacatttgaggcaacctagagcgtgtgcagtaacatgcctgctcacacgcctaggctcatagctagctaagcttagggttccaactgcatgcacaggtttgggccgacttttcctgcccgtgcttttaccctgcctgcccagccctggccctgggtgcgtttgcattgcagccactgcatggatgcatttggcatgccgcggtactgctgctcgctcgccccttccggtccggccctcgtcgtcttctttataaccacgcgccactgaaagctcgagcgcttctggcacttgaatccgtttgcgtcgtcgtcgttcctgtgtgcagtgcgcggtgcgccactgctagtgagaagagatatagctaggcttcagtgcgacgacgacgacgagatggggcaccactcctgctgcaacaagcagaaggtccggaggggcttgtggtcgccggaggaggacgagaagctcgtcaagtacatcaccgcgcacggccatggttgctggagctcagtcccaaggcaagcagggctgcagcggtgcggcaagagctgcaggctgaggtggatcaactacctgaggccggacctgaagaggggaagcttctcgcagcaggaggaggccctcatcgtcgagctccacagggtgcttgggaacagttgttcctttatctctacatgcaactgccgcccacatatgtcgccttaataacttgcttgggagtttgggacaaaggaaagagacgcgaatggaaaatgcagctagctaaaaatgcgtgccactgcacacacaggtgggcccagatcgccaagcatctgcctggtagaacggacaacgaggtgaagaacttctggaactccaccatcaagaagaagctcatctcccaggccgtgggcagcctccacccagacctgtactacaacattctggatggaggagccgccggagcacaggacctcgcggccgccggatgcgcgccgctgaacggggcggacagcgcgtcagcagcggcggcgcaagcagtgggcgtgacgacgacgcagccttctccttccatggcgcacgtcgaccccgcggcggcgtgggcggcggacttcggctcccagacgctcttcctccccggcggcgcggccgctctccagtacgccgccgccgtcgagggggagttcgtcaagcagtgccgcacggcggcggacgcctgctacccgccggagccggaggacggcggcggcggcgcgaggcagtgcaacaaccaggcagctgccgatgtcgtgacggcggcggtgcaaccggaaggcgccggcctcccggtgttccttgaacccaagtgcgccggcagtttcatgcccgagcctgctctggctccggtgatggacttcatggaagccatcctggggtcgacggcggcggcgtcggctgccagcgcttcgtctctcgacgacacctgcttctcggcgaacgccggcatgcagtcccactgttggattccctgaattattcaccctatttacttccatcggtagatgcatatatacatgcatggatgactcttcatcaagcgcgcgcggagtatcagatatgattaagtatagagtttatgaaataattaatatagatatagtaggtttctctcactctcatcgatcagggtagtaacaacatgggttacatgtaaatatgtttacgtacgtatatataatgtctagtgaaggcaagggcaagcatatatatatgagtgggtgtcagtcacgcgccagtaaggaatagtacttgaaactcctttacagctaagctatatgtttgtagcgtgcatgttattgcattggacacggatgcgcggctagagattcttacattattc

SEQ ID NO: 36772 - DNA, 1172 bp, Zea Mays
tttaggttaacaattttttccttttgcagccttccttggcaaggtcttaaagcaggaacaaagaagcaaaagtatgagaaaattagcgagaagaaagttgcaacatcaattgaggctctatgccgtgggtatcctacagagtttgcatcatatttccattattgccgttcactgcgatttgatgacaagcctgactattcctacctcaagcgattattccgtgacctttttatccgtgaaggttttcagtttgactatgtctttgactggacaatattgaagtatcaacaagctcaaattgccactgctccaccccgtgcgggccatggcgctgggccttctgggttggcacctgcattacagaatgataggcaaccaggccctgaggaagcaaggactagtggttggtcatcaatggatcggcgtcgtgccccactaccaattacaagtgtggggacattatctaagcagaaagcaccggtagggaatgatgctactgtttctagagacgctgtgatatctggaccaaatttcttgggaaggtcaagtggatcttcaaggaggcctgttatctcgagtagccgcgatgcggtggtcaccgatagttccgagccttcacgagcgcgcacaactgatgcaagccctggggttttccgcagagcctcaggtcctcagagaagctcacctgtccactctgcagaacagaagcgctcatcctcaggccgtcatccatctaatgcgaagaactacgattccgctctcaaaggcattgaaggccttactttagatggcgacgagagggttcagtactagagcggcaagaagaaattctacatcccctgtaaaaaagcataaccaggtggtaagcattgtgtttcctgttgagttttggatcaacaggaaacagaatgatggaaggaggatctggtcacgtgttgtgcggtttcgggttgccttctgagcaaggtgctgaaccttggggcaacaaggctgaagctggtagggacttcaattggagaactggggttcaagcatgtagaattttaaaatcggttcatttgtctggacaatgttcctgactagtaatgtgatcgcaagacaaacgatgttatttctctctgtggttatcgatatgtccatctcttcacacgcctgatagaatattatttgac

SEQ ID NO: 36773 - DNA, 2427 bp, Zea Mays
caacaacggccgcggcagccgcagagagacaaggtggacacgacaggactacaggacaccgccccgaagcggcacctgcaaggcggccgagaaaagcgcagccctgcgcccctgccacgactcggccacctctccctctggtctcctcctccacttgctcctgctcctccagacctccactccacccctccaaaaggtctagtaaaatagaaggaagccgcccccaatcgttcggtcgttcctagcccggcgcacggcgcacgaaggggttcgatcggatcggcgccggcggaggcgagatgtgggagtcggtggcgctgacgctggcgggcaccgccggcaataacatcggcaaggtcctgcagaagaagggcaccctcatcctccctccactctccctcaagctcaaggtggtcaaggcgtacgcgtcgaaccagctctggatcagcggtttccttatggacatgtgcggtgccgcgctcatgctcaccgcgctctctcaggcgccggtctccgtcgttcagcccattgctggttgcggtctcgcaatactctgcgttttctcccatttttacctcaaggaggttatgaacggcctcgattggattgccatcacgctagctggtctcggcaccataggtgtaggtgttggaggtgaggaacagaaagttgaccagatacctcttttaaatataccctggctagtgctctccattgtcatcttgtttgtactgctcaacacttggcttcatatgtataaaaagcaaaggcgtgagcaagagttgactggacctgaagtgattgaggagatcatatatggcttagaatcaggcattttgtttgggatttcttcagtgatctctaagatgggatttgtgatgtccgagatgggttttccaaagattgttgtgcctgctgccatatcttgtagtgtttgctgcagtgcagtgggatttgtgtatcaggtacatctagttttttcgagatttgccaactgggtttgtgtcattcatcgtagcctccacaggaggtgcgatatgttgttgttcgtagaagataggccacagttgttttttctcttgtaccaattcacgaattatgtgcccacaccttcataaccttggcctttggggagggggggggtctgaagcggggttgcatagtggctgtagagacaaaagttgaaaacaaaacataaaattcataaacagcatgaccgacagggtatactgttgtaaccatccgttgaaaatactatagtcagttttttagtcatttagtgggactgagtgactttatttttcacggcgaaaagtatgtgctggttttatgcataaaatgaaactcctaggacacttacactgaaattgtaatttcaaggacatggattatttgcaaattttaatctcttgcctcactgcagatattgtactgattgttatttctattataaattgcactagtttattcgacctgttttttttttttgaaacattcgtatgtttaagatgaagcataaggactagcccaaccgttttcttgcagtgtcgttacttcatctatattctccttttatggttcttttatccatgcagactcgaggcctcaagcatgggagggcaattgttgtatctacatgtacatcagtggcatctatagtgtccggtgttgttgctggcatgattgcacttgatgaacatctgcctaaagctcccacagctcgatttttcctcttactgggatggttcttcatcatcacaggagtaatactgcttgttagttcaacccgattgattgcgcgtctacctaggcctgttcagaagtttttgaagagcaacatagagcgcacccacagcatcaggaggcctggttcagcacgagggaaggatcccatcccaacaacaacgatccatacgtcgtcactgcacttgcttgcttctccaacaaaggagaaggcctagaaaaatgttggcactagagcaacttcgtttcggcgcctcacgtttgccatgtcattgattgattgaatggttccgtgaacgtagtctagagtagcatcttaaaagcttgggtttggttattcaccatactgccctttataggtctaacagagacttggggaaaaattgctgagtttttatcaggtctcgttttttttgtttggttgctgagtgcaaaatccgaagctgttactctctgacccttcttaactctcgtcatggaaagtatgttggtcaaacttaaagactagatttatagataaatattattaatgtttgtgtttttaaataaggttagtataaaattagatttaatgatcaattcaatgatattaattatacatcataaatattactattttcatgtataattttggttaaaggtgaatatgtttgacttctcataaacgggaacggtaattatgat

SEQ ID NO: 36774 - DNA, 1680 bp, Zea Mays
caacaacggccgcggcagccgcagagagacaaggtggacacgacaggactacaggacaccgccccgaagcggcacctgcaaggcggccgagaaaagcgcagccctgcgcccctgccacgactcggccacctctccctctggtctcctcctccacttgctcctgctcctccagacctccactccacccctccaaaaggtctagtaaaatagaaggaagccgcccccaatcgttcggtcgttcctagcccggcgcacggcgcacgaaggggttcgatcggatcggcgccggcggaggcgagatgtgggagtcggtggcgctgacgctggcgggcaccgccggcaataacatcggcaaggtcctgcagaagaagggcaccctcatcctccctccactctccctcaagctcaaggtggtcaaggcgtacgcgtcgaaccagctctggatcagcggtttccttatggacatgtgcggtgccgcgctcatgctcaccgcgctctctcaggcgccggtctccgtcgttcagcccattgctggttgcggtctcgcaatactctgcgttttctcccatttttacctcaaggaggttatgaacggcctcgattggattgccatcacgctagctggtctcggcaccataggtgtaggtgttggaggtgaggaacagaaagttgaccagatacctcttttaaatataccctggctagtgctctccattgtcatcttgtttgtaggtactgctcaacacttggcttcatatgtataaaaagcaaaggcgtgagcaagagttgactggacctgaagtgattgaggagatcatatatggcttagaatcaggcattttgtttggactcgaggcctcaagcatgggagggcaattgttgtatctacatgtacatcagtggcatctatagtgtccggtgttgttgctggcatgattgcacttgatgaacatctgcctaaagctcccacagctcgatttttcctcttactgggatggttcttcatcatcacaggagtaatactgcttgttagttcaacccgattgattgcgcgtctacctaggcctgttcagaagtttttgaagagcaacatagagcgcacccacagcatcaggaggcctggttcagcacgagggaaggatcccatcccaacaacaacgatccatacgtcgtcactgcacttgcttgcttctccaacaaaggagaaggcctagaaaaatgttggcactagagcaacttcgtttcggcgcctcacgtttgccatgtcattgattgattgaatggttccgtgaacgtagtctagagtagcatcttaaaagcttgggtttggttattcaccatactgccctttataggtctaacagagacttggggaaaaattgctgagtttttatcaggtctcgttttttttgtttggttgctgagtgcaaaatccgaagctgttactctctgacccttcttaactctcgtcatggaaagtatgttggtcaaacttaaagactagatttatagataaatattattaatgtttgtgtttttaaataaggttagtataaaattagatttaatgatcaattcaatgatattaattatacatcataaatattactattttcatgtataattttggttaaaggtgaatatgtttgacttctcataaacgggaacggtaattatgat

SEQ ID NO: 36775 - DNA, 1621 bp, Zea Mays
caacaacggccgcggcagccgcagagagacaaggtggacacgacaggactacaggacaccgccccgaagcggcacctgcaaggcggccgagaaaagcgcagccctgcgcccctgccacgactcggccacctctccctctggtctcctcctccacttgctcctgctcctccagacctccactccacccctccaaaaggtctagtaaaatagaaggaagccgcccccaatcgttcggtcgttcctagcccggcgcacggcgcacgaaggggttcgatcggatcggcgccggcggaggcgagatgtgggagtcggtggcgctgacgctggcgggcaccgccggcaataacatcggcaaggtcctgcagaagaagggcaccctcatcctccctccactctccctcaagctcaaggtggtcaaggcgtacgcgtcgaaccagctctggatcagcggtttccttatggacatgtgcggtgccgcgctcatgctcaccgcgctctctcaggcgccggtctccgtcgttcagcccattgctggttgcggtctcgcaatactctgcgttttctcccatttttacctcaaggaggttatgaacggcctcgattggattgccatcacgctagctggtctcggcaccataggtgtaggtgttggaggtgaggaacagaaagttgaccagatacctcttttaaatataccctggctagtgctctccattgtcatcttgtttgtaggtactgctcaacacttggcttcatatgtataaaaagcaaaggcgtgagcaagagttgactcgaggcctcaagcatgggagggcaattgttgtatctacatgtacatcagtggcatctatagtgtccggtgttgttgctggcatgattgcacttgatgaacatctgcctaaagctcccacagctcgatttttcctcttactgggatggttcttcatcatcacaggagtaatactgcttgttagttcaacccgattgattgcgcgtctacctaggcctgttcagaagtttttgaagagcaacatagagcgcacccacagcatcaggaggcctggttcagcacgagggaaggatcccatcccaacaacaacgatccatacgtcgtcactgcacttgcttgcttctccaacaaaggagaaggcctagaaaaatgttggcactagagcaacttcgtttcggcgcctcacgtttgccatgtcattgattgattgaatggttccgtgaacgtagtctagagtagcatcttaaaagcttgggtttggttattcaccatactgccctttataggtctaacagagacttggggaaaaattgctgagtttttatcaggtctcgttttttttgtttggttgctgagtgcaaaatccgaagctgttactctctgacccttcttaactctcgtcatggaaagtatgttggtcaaacttaaagactagatttatagataaatattattaatgtttgtgtttttaaataaggttagtataaaattagatttaatgatcaattcaatgatattaattatacatcataaatattactattttcatgtataattttggttaaaggtgaatatgtttgacttctcataaacgggaacggtaattatgat

SEQ ID NO: 36776 - DNA, 2373 bp, Zea Mays
caacaacggccgcggcagccgcagagagacaaggtggacacgacaggactacaggacaccgccccgaagcggcacctgcaaggcggccgagaaaagcgcagccctgcgcccctgccacgactcggccacctctccctctggtctcctcctccacttgctcctgctcctccagacctccactccacccctccaaaaggtctagtaaaatagaaggaagccgcccccaatcgttcggtcgttcctagcccggcgcacggcgcacgaaggggttcgatcggatcggcgccggcggaggcgagatgtgggagtcggtggcgctgacgctggcgggcaccgccggcaataacatcggcaaggtcctgcagaagaagggcaccctcatcctccctccactctccctcaagctcaaggtggtcaaggcgtacgcgtcgaaccagctctggatcagcggtttccttatggacatcccattgctggttgcggtctcgcaatactctgcgttttctcccatttttacctcaaggaggttatgaacggcctcgattggattgccatcacgctagctggtctcggcaccataggtgtaggtgttggaggtgaggaacagaaagttgaccagatacctcttttaaatataccctggctagtgctctccattgtcatcttgtttgtaggtactgctcaacacttggcttcatatgtataaaaagcaaaggcgtgagcaagagttgactggacctgaagtgattgaggagatcatatatggcttagaatcaggcattttgtttgggatttcttcagtgatctctaagatgggatttgtgatgtccgagatgggttttccaaagattgttgtgcctgctgccatatcttgtagtgtttgctgcagtgcagtgggatttgtgtatcaggtacatctagttttttcgagatttgccaactgggtttgtgtcattcatcgtagcctccacaggaggtgcgatatgttgttgttcgtagaagataggccacagttgttttttctcttgtaccaattcacgaattatgtgcccacaccttcataaccttggcctttggggagggggggggtctgaagcggggttgcatagtggctgtagagacaaaagttgaaaacaaaacataaaattcataaacagcatgaccgacagggtatactgttgtaaccatccgttgaaaatactatagtcagttttttagtcatttagtgggactgagtgactttatttttcacggcgaaaagtatgtgctggttttatgcataaaatgaaactcctaggacacttacactgaaattgtaatttcaaggacatggattatttgcaaattttaatctcttgcctcactgcagatattgtactgattgttatttctattataaattgcactagtttattcgacctgttttttttttttgaaacattcgtatgtttaagatgaagcataaggactagcccaaccgttttcttgcagtgtcgttacttcatctatattctccttttatggttcttttatccatgcagactcgaggcctcaagcatgggagggcaattgttgtatctacatgtacatcagtggcatctatagtgtccggtgttgttgctggcatgattgcacttgatgaacatctgcctaaagctcccacagctcgatttttcctcttactgggatggttcttcatcatcacaggagtaatactgcttgttagttcaacccgattgattgcgcgtctacctaggcctgttcagaagtttttgaagagcaacatagagcgcacccacagcatcaggaggcctggttcagcacgagggaaggatcccatcccaacaacaacgatccatacgtcgtcactgcacttgcttgcttctccaacaaaggagaaggcctagaaaaatgttggcactagagcaacttcgtttcggcgcctcacgtttgccatgtcattgattgattgaatggttccgtgaacgtagtctagagtagcatcttaaaagcttgggtttggttattcaccatactgccctttataggtctaacagagacttggggaaaaattgctgagtttttatcaggtctcgttttttttgtttggttgctgagtgcaaaatccgaagctgttactctctgacccttcttaactctcgtcatggaaagtatgttggtcaaacttaaagactagatttatagataaatattattaatgtttgtgtttttaaataaggttagtataaaattagatttaatgatcaattcaatgatattaattatacatcataaatattactattttcatgtataattttggttaaaggtgaatatgtttgacttctcataaacgggaacggtaattatgat

SEQ ID NO: 36777 - DNA, 2412 bp, Zea Mays
caacaacggccgcggcagccgcagagagacaaggtggacacgacaggactacaggacaccgccccgaagcggcacctgcaaggcggccgagaaaagcgcagccctgcgcccctgccacgactcggccacctctccctctggtctcctcctccacttgctcctgctcctccagacctccactccacccctccaaaaggtctagtaaaatagaaggaagccgcccccaatcgttcggtcgttcctagcccggcgcacggcgcacgaaggggttcgatcggatcggcgccggcggaggcgagatgtgggagtcggtggcgctgacgctggcgggcaccgccggcaataacatcggcaaggtcctgcagaagaagggcaccctcatcctccctccactctccctcaagctcaaggtggtcaaggcgtacgcgtcgaaccagctctggatcagcggtttccttatggacatgtgcggtgccgcgctcatgctcaccgcgctctctcaggcgccgcccattgctggttgcggtctcgcaatactctgcgttttctcccatttttacctcaaggaggttatgaacggcctcgattggattgccatcacgctagctggtctcggcaccataggtgtaggtgttggaggtgaggaacagaaagttgaccagatacctcttttaaatataccctggctagtgctctccattgtcatcttgtttgtactgctcaacacttggcttcatatgtataaaaagcaaaggcgtgagcaagagttgactggacctgaagtgattgaggagatcatatatggcttagaatcaggcattttgtttgggatttcttcagtgatctctaagatgggatttgtgatgtccgagatgggttttccaaagattgttgtgcctgctgccatatcttgtagtgtttgctgcagtgcagtgggatttgtgtatcaggtacatctagttttttcgagatttgccaactgggtttgtgtcattcatcgtagcctccacaggaggtgcgatatgttgttgttcgtagaagataggccacagttgttttttctcttgtaccaattcacgaattatgtgcccacaccttcataaccttggcctttggggagggggggggtctgaagcggggttgcatagtggctgtagagacaaaagttgaaaacaaaacataaaattcataaacagcatgaccgacagggtatactgttgtaaccatccgttgaaaatactatagtcagttttttagtcatttagtgggactgagtgactttatttttcacggcgaaaagtatgtgctggttttatgcataaaatgaaactcctaggacacttacactgaaattgtaatttcaaggacatggattatttgcaaattttaatctcttgcctcactgcagatattgtactgattgttatttctattataaattgcactagtttattcgacctgttttttttttttgaaacattcgtatgtttaagatgaagcataaggactagcccaaccgttttcttgcagtgtcgttacttcatctatattctccttttatggttcttttatccatgcagactcgaggcctcaagcatgggagggcaattgttgtatctacatgtacatcagtggcatctatagtgtccggtgttgttgctggcatgattgcacttgatgaacatctgcctaaagctcccacagctcgatttttcctcttactgggatggttcttcatcatcacaggagtaatactgcttgttagttcaacccgattgattgcgcgtctacctaggcctgttcagaagtttttgaagagcaacatagagcgcacccacagcatcaggaggcctggttcagcacgagggaaggatcccatcccaacaacaacgatccatacgtcgtcactgcacttgcttgcttctccaacaaaggagaaggcctagaaaaatgttggcactagagcaacttcgtttcggcgcctcacgtttgccatgtcattgattgattgaatggttccgtgaacgtagtctagagtagcatcttaaaagcttgggtttggttattcaccatactgccctttataggtctaacagagacttggggaaaaattgctgagtttttatcaggtctcgttttttttgtttggttgctgagtgcaaaatccgaagctgttactctctgacccttcttaactctcgtcatggaaagtatgttggtcaaacttaaagactagatttatagataaatattattaatgtttgtgtttttaaataaggttagtataaaattagatttaatgatcaattcaatgatattaattatacatcataaatattactattttcatgtataattttggttaaaggtgaatatgtttgacttctcataaacgggaacggtaattatgat

SEQ ID NO: 36778 - DNA, 1676 bp, Zea Mays
caacaacggccgcggcagccgcagagagacaaggtggacacgacaggactacaggacaccgccccgaagcggcacctgcaaggcggccgagaaaagcgcagccctgcgcccctgccacgactcggccacctctccctctggtctcctcctccacttgctcctgctcctccagacctccactccacccctccaaaaggtctagtaaaatagaaggaagccgcccccaatcgttcggtcgttcctagcccggcgcacggcgcacgaaggggttcgatcggatcggcgccggcggaggcgagatgtgggagtcggtggcgctgacgctggcgggcaccgccggcaataacatcggcaaggtcctgcagaagaagggcaccctcatcctccctccactctccctcaagctcaaggtggtcaaggcgtacgcgtcgaaccagctctggatcagcggtttccttatggacatgtgcggtgccgcgctcatgctcaccgcgctctctcaggcgccggtctccgtcgttcagcccattgctggttgcggtctcgcaatactctgcgttttctcccatttttacctcaaggaggttatgaacggcctcgattggattgccatcacgctagctggtctcggcaccataggtgtaggtgttggaggtgaggaacagaaagttgaccagatacctcttttaaatataccctggctagtgctctccattgtcatcttgtttgtactgctcaacacttggcttcatatgtataaaaagcaaaggcgtgagcaagagttgactggacctgaagtgattgaggagatcatatatggcttagaatcaggcattttgtttggactcgaggcctcaagcatgggagggcaattgttgtatctacatgtacatcagtggcatctatagtgtccggtgttgttgctggcatgattgcacttgatgaacatctgcctaaagctcccacagctcgatttttcctcttactgggatggttcttcatcatcacaggagtaatactgcttgttagttcaacccgattgattgcgcgtctacctaggcctgttcagaagtttttgaagagcaacatagagcgcacccacagcatcaggaggcctggttcagcacgagggaaggatcccatcccaacaacaacgatccatacgtcgtcactgcacttgcttgcttctccaacaaaggagaaggcctagaaaaatgttggcactagagcaacttcgtttcggcgcctcacgtttgccatgtcattgattgattgaatggttccgtgaacgtagtctagagtagcatcttaaaagcttgggtttggttattcaccatactgccctttataggtctaacagagacttggggaaaaattgctgagtttttatcaggtctcgttttttttgtttggttgctgagtgcaaaatccgaagctgttactctctgacccttcttaactctcgtcatggaaagtatgttggtcaaacttaaagactagatttatagataaatattattaatgtttgtgtttttaaataaggttagtataaaattagatttaatgatcaattcaatgatattaattatacatcataaatattactattttcatgtataattttggttaaaggtgaatatgtttgacttctcataaacgggaacggtaattatgat

SEQ ID NO: 36779 - DNA, 2499 bp, Zea Mays
gtcccgtcccgcgcacgcgacccaccaccagcagcgacgatgccaccagcccaccaccgccacccatccaacaacggccgcggcagccgcagagagacaaggtggacacgacaggactacaggacaccgccccgaagcggcacctgcaaggcggccgagaaaagcgcagccctgcgcccctgccacgactcggccacctctccctctggtctcctcctccacttgctcctgctcctccagacctccactccacccctccaaaaggtctagtaaaatagaaggaagccgcccccaatcgttcggtcgttcctagcccggcgcacggcgcacgaaggggttcgatcggatcggcgccggcggaggcgagatgtgggagtcggtggcgctgacgctggcgggcaccgccggcaataacatcggcaaggtcctgcagaagaagggcaccctcatcctccctccactctccctcaagctcaaggtggtcaaggcgtacgcgtcgaaccagctctggatcagcggtttccttatggacatgtgcggtgccgcgctcatgctcaccgcgctctctcaggcgccggtctccgtcgttcagcccattgctggttgcggtctcgcaatactctgcgttttctcccatttttacctcaaggaggttatgaacggcctcgattggattgccatcacgctagctggtctcggcaccataggtgtaggtgttggaggtgaggaacagaaagttgaccagatacctcttttaaatataccctggctagtgctctccattgtcatcttgtttgtaggtactgctcaacacttggcttcatatgtataaaaagcaaaggcgtgagcaagagttgactggacctgaagtgattgaggagatcatatatggcttagaatcaggcattttgtttgggatttcttcagtgatctctaagatgggatttgtgatgtccgagatgggttttccaaagattgttgtgcctgctgccatatcttgtagtgtttgctgcagtgcagtgggatttgtgtatcaggtacatctagttttttcgagatttgccaactgggtttgtgtcattcatcgtagcctccacaggaggtgcgatatgttgttgttcgtagaagataggccacagttgttttttctcttgtaccaattcacgaattatgtgcccacaccttcataaccttggcctttggggagggggggggtctgaagcggggttgcatagtggctgtagagacaaaagttgaaaacaaaacataaaattcataaacagcatgaccgacagggtatactgttgtaaccatccgttgaaaatactatagtcagttttttagtcatttagtgggactgagtgactttatttttcacggcgaaaagtatgtgctggttttatgcataaaatgaaactcctaggacacttacactgaaattgtaatttcaaggacatggattatttgcaaattttaatctcttgcctcactgcagatattgtactgattgttatttctattataaattgcactagtttattcgacctgttttttttttttgaaacattcgtatgtttaagatgaagcataaggactagcccaaccgttttcttgcagtgtcgttacttcatctatattctccttttatggttcttttatccatgcagactcgaggcctcaagcatgggagggcaattgttgtatctacatgtacatcagtggcatctatagtgtccggtgttgttgctggcatgattgcacttgatgaacatctgcctaaagctcccacagctcgatttttcctcttactgggatggttcttcatcatcacaggagtaatactgcttgttagttcaacccgattgattgcgcgtctacctaggcctgttcagaagtttttgaagagcaacatagagcgcacccacagcatcaggaggcctggttcagcacgagggaaggatcccatcccaacaacaacgatccatacgtcgtcactgcacttgcttgcttctccaacaaaggagaaggcctagaaaaatgttggcactagagcaacttcgtttcggcgcctcacgtttgccatgtcattgattgattgaatggttccgtgaacgtagtctagagtagcatcttaaaagcttgggtttggttattcaccatactgccctttataggtctaacagagacttggggaaaaattgctgagtttttatcaggtctcgttttttttgtttggttgctgagtgcaaaatccgaagctgttactctctgacccttcttaactctcgtcatggaaagtatgttggtcaaacttaaagactagatttatagataaatattattaatgtttgtgtttttaaataaggttagtataaaattagatttaatgatcaattcaatgatattaattatacatcataaatattactattttcatgtataattttggttaaaggtgaatatgtttgacttctcataaacgggaacggtaattatgat

SEQ ID NO: 36780 - DNA, 1824 bp, Zea Mays
gctttgctaattgctctaggagagcatcccacgacaacgatagatctcttgtctccaaattgcccgctgccccctggcgttcccctcccccgcgtcgtcgtctcttctctccccaaaaggatcccccaaaccctaccgccgatccgggcccagatcgccatggccgcccccaacagcaacgacgcggccagcgccagtggcaccggcccggctggtgaggaggacatctccatcgaggcgttggcgcggcgcgtgcaggagcacatgaccctcagttccaaccccgccgctcgccgccacaagttctgggaaacgcagcccgtcggccagttccgcgacgtcgccgacacatcgctaccggacggccccatcgagccgcccacgccactctccgaggtgcgcgccgacccctacccgctacccgccgccttcgagtggctcacctgcgacctcgatgacgacgcgctcctcgccgacctctactcgctgcttgcccacaactacgtcgaggacgacgagaacatgttccgcttcaactactctccggccttcctccgctgggcgctcaagccgccgtccttcttccgggcctggcacatcggcgttcgcgccaaggagtccaagaagctcgtcgccttcatctcgggcgtcccggcccgcatccgcgctcgggacgacgtcgtccgcatggccgagatcaacttcctctgcgtccacaagaagctccgatccaagcgcctggcgcccgtgctcatccgggaggtcacccgccgcgtccaccaggagaacatttggcaggctgcatacaccgcgggggtcgtcctcccaacccccatcaccacctgccgctactggcaccgatccctcaaccccaagaagcttatcgatgttgggttctctcgccttggtccacgcatgacaatgagccgcacggtccggctatacaagctgcctgacgcgccgctcacccctgggttccgcagaatggaactgcgggatgttgctgcggtcacacggctgctgagggcttaccttgcgaggttcgtggtggcaccggattttgatgaggtggatgtggagcactggctgctgccgcaagaggatgtcgtggacagctaccttgtggagagccctgagacgcatgagctgatgaatgatgctctgattgttgccaagcagaagaattacgatgtgttcaatgctctcgatgtcatggagaatgagtcgttcctcaaggagctcaagtttggtcctggagatgggcagctccactattacctctacaactaccgtattcgcaatggcatcaagccctctgagcttggtcttgtgctactatagggcagtctaatcaggacagtcctgagtttacaccttcccttccgcagcaggtctcattgtgcaatcccagtggtttctcattttgcctactgtggtagtgattctccttgatatgattgccatggtcactgataggagtcccaagatgatttgcaaacaagggagactggaattagagatatcctttcctcaatttaaggttactgttcccattagtgacatttcgcgtgcatcgtccacaatgtgtatgctggcaccgattttaccgagaaattttgatgtgtattcgaagttgtttgtgtgctgttgtgctatgtctgcacatgtatggatgtcttgatgctagaactgctgccacagctccttcagccctacccaaattttgatggtttctttttattatgaacaagttctattagtttgccatttgatttgctttgtccagattccaaaataaccagaaatgtacttatcgtgtccttc

SEQ ID NO: 36781 - DNA, 1325 bp, Zea Mays
gaaagggctttaatagtgtggtcatccttggggcctggaggctttggaaacagagaaataggagccaagaacatgcgttctctttttgatcctggttagaggaaggacaaatggaggaatttaagtttcagtgcaagtggactgggatcaagtaaactgcgggttccaaagataactggaccctcatcttccccatcatctagctcgcagcctctgcttctcccagcggcaaacaaatttactgaagctacactgcctgcagatgctgagaaaaagccacaggatgggaaaactctgccaaagtatggtgccatgatcatggaagctcttttggaattgaatgagccgaatggttcagatattgctgcaatcttcggcttcatagagcaaaggtatgcggtacaaccgaccttcagaagatttctagcctcaaagttacggcgacttgcagactcaaacaaaattgaaaagatcgataagtcctataggctcccagactcccttgcaacaaggactccagctccaatgaatgcttcagctccaaaacagaaggatccatcaaagccatcgaaggtgtcaaaggccataggattgttttctgcctccagccctgcactagaggctgcgatggcagctgctgtcaaggtggctgacgcggaggcaaaagcacatgatgcgcatgatcagacgatggaggcagaaaggatcttcaagatggccgaggataccgagtctctcctcataattgcagcagagatctatgatcgatgttcaaggggagagataaccacgttagttccagtggcacaaagggagatttgagatctattggagtctctcttgtgttgtttgttgtacatggataggttctggaatccagtggcccggattgctcctgttgtatgatgtaaccgtttgtgttatactgtctccgttcttcgatatttatcgtatcctagttcatttttaaaataaaatgcgacaaataaaaaagaacggagtgagtacttaggatgtgccctagggttaacaaaataacatcagcgcaccgcctgccttcaaacttctgtaatatgtaaccccgtctttcccagcctgtcactgcaagctgcgatcgtgtatcctgatgtcagtattgtattttttttttccttggcatgatgagagaatagggaagtgttctaaacaaatgaagtagggtaggaaggtgaagtgttcttggtatgcgataacaataatctgtgccgcactttcaatttgagaatgttgtgttagacccttgttcatcacgactgtgataattgtttttttagagtactcttttt

SEQ ID NO: 36782 - DNA, 1233 bp, Zea Mays
gcagcccctaagtgacaaatggaggaatttaagtttcagtgcaagtggactgggatcaagtaaactgcgggttccaaagataactggaccctcatcttccccatcatctagctcgcagcctctgcttctcccagcggcaaacaaatttactgaagctacactgcctgcagatgctgagaaaaagccacaggatgggaaaactctgccaaagtatggtgccatgatcatggaagctcttttggaattgaatgagccgaatggttcagatattgctgcaatcttcggcttcatagagcaaaggtatgcggtacaaccgaccttcagaagatttctagcctcaaagttacggcgacttgcagactcaaacaaaattgaaaagatcgataagtcctataggctcccagactcccttgcaacaaggactccagctccaatgaatgcttcagctccaaaacagaaggatccatcaaagccatcgaaggtgtcaaaggccataggattgttttctgcctccagccctgcactagaggctgcgatggcagctgctgtcaaggtggctgacgcggaggcaaaagcacatgatgcgcatgatcagacgatggaggcagaaaggatcttcaagatggccgaggataccgagtctctcctcataattgcagcagagatctatgatcgatgttcaaggggagagataaccacgttagttccagtggcacaaagggagatttgagatctattggagtctctcttgtgttgtttgttgtacatggataggttctggaatccagtggcccggattgctcctgttgtatgatgtaaccgtttgtgttatactgtctccgttcttcgatatttatcgtatcctagttcatttttaaaataaaatgcgacaaataaaaaagaacggagtgagtacttaggatgtgccctagggttaacaaaataacatcagcgcaccgcctgccttcaaacttctgtaatatgtaaccccgtctttcccagcctgtcactgcaagctgcgatcgtgtatcctgatgtcagtattgtattttttttttccttggcatgatgagagaatagggaagtgttctaaacaaatgaagtagggtaggaaggtgaagtgttcttggtatgcgataacaataatctgtgccgcactttcaatttgagaatgttgtgttagacccttgttcatcacgactgtgataattgtttttttagagtactcttttt

SEQ ID NO: 36783 - DNA, 1264 bp, Zea Mays
tgggcctgtttggttgtggagcaaagaagcctgaccaaaattaggacaaatggaggaatttaagtttcagtgcaagtggactgggatcaagtaaactgcgggttccaaagataactggaccctcatcttccccatcatctagctcgcagcctctgcttctcccagcggcaaacaaatttactgaagctacactgcctgcagatgctgagaaaaagccacaggatgggaaaactctgccaaagtatggtgccatgatcatggaagctcttttggaattgaatgagccgaatggttcagatattgctgcaatcttcggcttcatagagcaaaggtatgcggtacaaccgaccttcagaagatttctagcctcaaagttacggcgacttgcagactcaaacaaaattgaaaagatcgataagtcctataggctcccagactcccttgcaacaaggactccagctccaatgaatgcttcagctccaaaacagaaggatccatcaaagccatcgaaggtgtcaaaggccataggattgttttctgcctccagccctgcactagaggctgcgatggcagctgctgtcaaggtggctgacgcggaggcaaaagcacatgatgcgcatgatcagacgatggaggcagaaaggatcttcaagatggccgaggataccgagtctctcctcataattgcagcagagatctatgatcgatgttcaaggggagagataaccacgttagttccagtggcacaaagggagatttgagatctattggagtctctcttgtgttgtttgttgtacatggataggttctggaatccagtggcccggattgctcctgttgtatgatgtaaccgtttgtgttatactgtctccgttcttcgatatttatcgtatcctagttcatttttaaaataaaatgcgacaaataaaaaagaacggagtgagtacttaggatgtgccctagggttaacaaaataacatcagcgcaccgcctgccttcaaacttctgtaatatgtaaccccgtctttcccagcctgtcactgcaagctgcgatcgtgtatcctgatgtcagtattgtattttttttttccttggcatgatgagagaatagggaagtgttctaaacaaatgaagtagggtaggaaggtgaagtgttcttggtatgcgataacaataatctgtgccgcactttcaatttgagaatgttgtgttagacccttgttcatcacgactgtgataattgtttttttagagtactcttttt

SEQ ID NO: 36784 - DNA, 1744 bp, Zea Mays
gtttcgggtccccgcagccgcaagtaccgtcggccgcttgcttcccacggcaacaactcacctcccgggcctaccacgcagaaagaaacatctcctttgtatcggcctcggcaatcctgaccggatcaacaaagacgtagctaccccctcccgcgtccgtcgaattcgcctccgccgcctgctcgatccggtgggaattcgccgctgccgggttgttttcgctggggtgattaaggctcgggattcgagatctacgcgagtcgcgggcaagcagccatgagcgaggtgttcgagggctacgagcggcagtactgcgaggcctccgcctcgctctcccgcaagtgcaccgctgcctccgccctcgatggggagaagaagaagcagaagctgtccgagatccaatccggcgttgaggaagctgaatcgctgattcgtaagatggacctggaggcaaggaacctacagcctagcattaaggctggtttgcttgcaaagctgagggagtataaatctgacctcaacaacgtcaagagtgagcttaagaggatctcagcgcccaatgctaggcaggctacccgggaggagctcctggagtctggaatggctgatactctcgcggtgtctactgatcagagggggagattgatgatgacaactgaaagactgaatcagtcaactgacagaattaaagagagccgaagaactatgttggagacagaagagcttggtgtgtcaattcttcaggatcttcaccaacagcgacagtcactactacatgctcatactactttgcacggagttgatgacaacattggcaagagcaagaagatcctggctgcaatgtcaaagaggatggataggaacaagtggatcattgggggaattatcacggctctcgttctggccatccttctcatactctacttcaagctcgctaattaagcctgcctgcaggtaacagcaaaaggtttgaggacgctgaaacaagaaaagaggcgggacgggacgggacggggggctagcgcgtacgttttggtcttgtgcggttgtgccttcagccttgtgttgttgtgaagcagaagcctggaggtagtaacaagtaaaacctgtcacaacttgtcccctgtgacagcacgggcagcaacttgtgttacatcgatcgatcggatatccctttgtttgacgaaacattcaatgcgtaacgaccgtgatgcgacgcgcaagtgctctggagtctggacagatgcttcgccggcctcttctctcgacaggaaaaaaaagagtgcttcgccggcctcttctgtcgacaggaaaaaaaagagggaacgcgagtaggcaccaccagctgcgcgcccgtcgcttcatgggcggttctcttgatcgaatcagccgtgacgtcttgctaccccgactataggcggagcggagctacagctacagggtacggcaattgcgtcatagctaccccttatttagttcaattgtactaatagcagaagaatattaaaggccattttagtcttcttatgagccatttagtatatttttactatttttagcccctagaaccaaacatgttagggactaaactttagtcccctaaataaactttagtccctagactaaacaaaccaaacatggccttaattgataaattcattcattttcattgctaccagctgtaataaacctcgccatgtaagagccctgcttggaggaatttaggcacaagagtcagtcaaac

SEQ ID NO: 36785 - DNA, 753 bp, Zea Mays
taggaccttgctgtgtattcaaagtgttgagctatgcttgatgcttcaacacgtgtctactgatcagagggggagattgatgatgacaactgaaagactgaatcagtcaactgacagaattaaagagagccgaagaactatgttggagacagaagagcttggtgtgtcaattcttcaggatcttcaccaacagcgacagtcactactacatgctcatactactttgcacggagttgatgacaacattggcaagagcaagaagatcctggctgcaatgtcaaagaggatggataggaacaagtggatcattgggggaattatcacggctctcgttctggccatccttctcatactctacttcaagctcgctaattaagcctgcctgcaggtaggttccccctacatatctgtgttcagtaattgtgtgatatgagttgtctgaatgccgtgtattgagcaacacgcagctctccgagcgtcatttgttccccctcaaacctgtaaactcaaaatggcttattctgtgtatagttagttattcccaactatgtaaaatgtctaaagagtaaaaaaataatacttggtgttgagtctcatgtgcacatcgcacgttgttctgtcatgttaaactagagtggttactagagcagtatgtactacctctgtcccaaaacaaatcaacttctaaagttgtcatccctaagtcaaactattttaagttcgattaaatttatagaaaataccagtgtttgt

SEQ ID NO: 36786 - DNA, 1278 bp, Zea Mays
ttgcttcccacggcaacaactcacctcccgggcctaccacgcagaaagaaacatctcctttgtatcggcctcggcaatcctgaccggatcaacaaagacgtagctaccccctcccgcgtccgtcgaattcgcctccgccgcctgctcgatccggtgggaattcgccgctgccgggttgttttcgctggggtgattaaggctcgggattcgagatctacgcgagtcgcgggcaagcagccatgagcgaggtgttcgagggctacgagcggcagtactgcgaggcctccgcctcgctctcccgcaagtgcaccgctgcctccgccctcgatggggagaagaagaagcagaagctgtccgagatccaatccggcgttgaggaagctgaatcattcgtaagatggacctggaggcaaggaacctacagcctagcattaaggctggtttgcttgcaaagctgagggagtataaatctgacctcaacaacgtcaagagtgagcttaagaggatctcagcgcccaatgctaggcaggctacccgggaggagctcctggagtctggaatggctgatactctcgcggtgtctactgatcagagggggagattgatgatgacaactgaaagactgaatcagtcaactgacagaattaaagagagccgaagaactatgttggagacagaagagcttggtgtgtcaattcttcaggatcttcaccaacagcgacagtcactactacatgctcatactactttgcacggagttgatgacaacattggcaagagcaagaagatcctggctgcaatgtcaaagaggatggataggaacaagtggatcattgggggaattatcacggctctcgttctggccatccttctcatactctacttcaagctcgctaattaagcctgcctgcaggtaggttccccctacatatctgtgttcagtaattgtgtgatatgagttgtctgaatgccgtgtattgagcaacacgcagctctccgagcgtcatttgttccccctcaaacctgtaaactcaaaatggcttattctgtgtatagttagttattcccaactatgtaaaatgtctaaagagtaaaaaaataatacttggtgttgagtctcatgtgcacatcgcacgttgttctgtcatgttaaactagagtggttactagagcagtatgtactacctctgtcccaaaacaaatcaacttctaaagttgtcatccctaagtcaaactattttaagttcgattaaatttatagaaaataccagtgtttgt

SEQ ID NO: 36787 - DNA, 189 bp, Zea Mays
atggcatccaaggccttccgcgccgtcgccgccgccgcgctcgccgcgtccgccctcgcgggggtcgcgatggccgccgacgcgcccgcgcccagccccacgtctggggccgccgccgtctcgtcctccgtcgtcgccgccgtcctctgccccgccgtggcgctcctcttcggcagcctgcgccactga

SEQ ID NO: 36788 - DNA, 851 bp, Zea Mays
gtgtccagtcatattttcaccaaaaagcaggtgttgtagttctgaaagtggtaactcaagggaattattatgtaattacaaagacagaattagcacaaactgtatgccagagcaaccttaaggccatattacaccattatgtgtaaaatgttcgttttctcgaaccacgcaggagagtagcatgtcatttcattaagaaaattatgtgtagaatgtgacctaaataaccagtattttagtactgtttcagggtgtaaagtcatgcacgagtgttttgtatgcatattggttaatgtctattagaaaccacaccacatgattatgagttatgactacagatttttttccagctatttgcactatgggttgcttgctgctagagcagaggtcttaaaatctggcaatggcaatggttacaacaactgtatgttagaaggatatcaagggcaatataaatatggctctgaaacatttgaagcctcagcttcaccttctggtgcaagttattcaaaatgcaagaatgatgttgtgaaatctcttaaagtggatgaagcatgtacccacctgaaatgttcttttggtggcatttggaatggtggcggtggtgctggacagaaaaaactttttgtggcatcgtttttctttgacatggctgatgaggaaaatggaagtcatgcgactaagaggggcacgtacgacgagaacctggtgaacggacagattgcgcagcaattgacagggactcatctggttgccatctttctgtgagctcttgatgttgaacctctacgagtcatgcacgcaacatgtttcatactgttgttagtcttggtcatgggctcattgcactt

SEQ ID NO: 36789 - DNA, 856 bp, Zea Mays
atgcccgacaagaccgtctgcgagaagcactacgtccaggccaagaagcgctccgcctcctccgcgctccgtgcctcgctccgccgctcctcagcctcctccctcgcgcccgccttcccattctcctcctcctccgccgctcgcctccgcgccgccgatgacgaccctcccatggcggtcgcgaggcccctctacggcagggtcaccggggaggcggtgtacgtggctgaaccggtgccggtgcccgcgtggaaggggtcgcctacgaagggctgcctcggtgcaatgcggatggtggcaggaccacggcggtctcaactctcaagtcagtaccagtagcagagttgaatgtttgctatttgcactatgggttgcttgctgctagagcagaggtcttaaaatctggcaatggcaatggttacaacaactgtatgttagaaggatatcaagggcaatataaatatggctctgaaacatttgaagcctcagcttcaccttctggtgcaagttattcaaaatgcaagaatgatgttgtgaaatctcttaaagtggatgaagcatgtacccacctgaaatgttcttttggtggcatttggaatggtggcggtggtgctggacagaaaaaactttttgtggcatcgtttttctttgacatggctgatgaggaaaatggaagtcatgcgactaagaggggcacgtacgacgagaacctggtgaacggacagattgcgcagcaattgacagggactcatctggttgccatctttctgtgagctcttgatgttgaacctctacgagtcatgcacgcaacatgtttcatactgttgttagtcttggtcatgggctcattgcactt

SEQ ID NO: 36790 - DNA, 1078 bp, Zea Mays
caaaaaccgacttcatccccgcaggcaagcgctccgatggcaagcagtggcgctgcagcgtgccctccatgcccgacaagaccgtctgcgagaagcactacgtccaggccaagaagcgctccgcctcctccgcgctccgtgcctcgctccgccgctcctcagcctcctccctcgcgcccgccttcccattctcctcctcctccgccgctcgcctccgcgccgccgatgacgaccctcccatggcggtcgcgaggcccctctacggcagggtcaccggggaggcggtgtacgtggctgaaccggtgccggtgcccgcgtggaaggggtcgcctacgaagggctgcctcggtgcaatgcggatggtggcaggaccacggcgtgctagtcggcagaggcccactatggtttcctggtggcagcgctgaagggataaggagttgccactagtgccggaaggctgggggtgtcatctggtgtactagctgtgacaggagaggctactgtgccagatgcatctccagatggtctcaactctcaagtcagtaccagtagcagagttgaatgtttggtaatttggctatttgcactatgggttgcttgctgctagagcagaggtcttaaaatctggcaatggcaatggttacaacaactgtatgttagaaggatatcaagggcaatataaatatggctctgaaacatttgaagcctcagcttcaccttctggtgcaagttattcaaaatgcaagaatgatgttgtgaaatctcttaaagtggatgaagcatgtacccacctgaaatgttcttttggtggcatttggaatggtggcggtggtgctggacagaaaaaactttttgtggcatcgtttttctttgacatggctgatgaggaaaatggaagtcatgcgactaagaggggcacgtacgacgagaacctggtgaacggacagattgcgcagcaattgacagggactcatctggttgccatctttctgtgagctcttgatgttgaacctctacgagtcatgcacgcaacatgtttcatactgttgttagtcttggtcatgggctcattgcactt

SEQ ID NO: 36791 - DNA, 6860 bp, Zea Mays
attatttatcaagtcgcgtagggtactgcagctgcattaactccttgtgcttgtgttagctagctgtgcgagccacaatgggctcctcgaaatgtcaatgtgccgtgggctgcggccacagacaactcatcgatgacacgcatgcatggctgcgtcgtgcgtggacgcgtgcacgtgtacaccatctgccatatacgcaccggactagctgtaccgcacatccagtgtttccatccaaggctggagtacgcaatacacacataaacatccacacgttcatgacgcgtacgccagccaaaaaaagcaccatcatcgcaaagcaaagcactgcacgtactactgagcggtgacagcacagatcgatgcatggatcgaagcggccagcgtcgtcccactcccagtcccagcacactactagcgctagtcgatcgctagctggcccggctggccggagaaggcagatgatgtatataccagcatactacactgtactgcactgtactgatgtacatgtcgaaattaattgatcgtatatcgtcgtagaagaatccaggatggatttgtgtataaatacacacacacacacacacacagatcgaccctcttcgtcagtccatagtacacgtacgtacttgcaccgtactatacgacccctgcgaccggaccaggccggccggatccatgcctgttgccgctgcgggcctacacgcgccgccgacgacgacgaccgttcttgttggttattaatcggcgagcgcaagcaggaggagcagctgcctgtgtagctaagggcaggccatggggaggctcgacggcgggctgggtgcggcgacgccgccgtcgttcgtgcgcgcggcctggcaggcggtgaggtggtccgtggtggttccggcgctgcagctggccgtgtacatctgtgccgccatgtcgctgatgctcttcctcgagcgcctgtacatggcggccgtggtcacggggctctggctgcgccggcgccggcgccaccgcgtcgccggtgacgggcagcgcgtgctggacgacgacgacgacctggaggccgacgccggccgctgctgccccatggtcctcgtccagatccccatgttcaacgagggacaggtgtaccggctgtccatcggagcggcgtgcgggatgtcatggccatcggagaggctggtgattcaagtgctggacgactccacgaaccccgccatcagggagctggtggaggtggagtgcgcgcggtgggcgcgcaagggcgtgcgcatctgctacgagaaccgcagcaaccgcaacgggtacaaggcgggcgccatgcgcgagggcctcaagaagcactacgccagggactgcgagttcgtggccatcttcgacgccgacttccagccggactccgacttcctccgccgcaccgtgccgctgctgcagcgggaccccggggtggggctggtgcaggcgcgctggcgctacgtcaacgctgatgagtgcatcctcacgcgcatccaggagatgtccctcaactaccacttcgccgtggagcaggaggtgggctccgcctgccacgccttcttcggcttcaacggcacggccggggtgtggcgcgtcgccgcgctggcggacgcgggcggctggaaggagcgcaccaccgtggaggacatggacctggccgtgcgcgctagcctccgcggctggcgcttcgtctacgtgggcgacctggtcgtgcgcaacgagctgcccagcaccttcaaggcgtaccgctaccagcagcaccggtggtcgtgcggcccggccaacctattccgcaaggtgctccctgagatcctccgcagcgaccgggtgtcgctggggaagaagttccacctcctctatgccttcttcttcgtcaggaaggtggtggcgcatctcgtcaccttcctcttctactgcgtcgtcatcccggcctgcgtgctggtgcagggagacgtgcgcctgcccaagtatgtggccatgtacgtgccggcgctcatcacgctgctcaacgccgcctgcacgcccaggtcctgccacctgctcatcttctggatcctcttcgagaacgtcatgtccatgcaccgctctaaggccgccatcatcggcctgctggaggccagccgcgccaacgagtgggtggtcaccgacaagctcggcagtagcaaggcagctgcggctgtagtcgcgaagaagaagaaacagcagctggtccggagcaggtgctgcagcacgagacgggagatgcatgtgctggagctcgcgatgggggtgtgcttgctctattgcgctgtctacgacattgtcttctttggccgcgaccactactacatgtacctactcctgcaatcggcggcggcctttatcgtcggcttcggctacgttggcaccacgacaccctcctgactctcatgagagtcaccaacacagccagacgactgtcagtgcctgtgatccaaattaaagtcataatatttcattaaattattcgtagccttaattgtatcgatcgcatgggcaatagtcatgataaatcaggtttttttatagtactacattaaagggaaaaacagattcaacaaaaacaaaacaaaaaaaggcttcctagagccaagctggacctcagtacactgtaggctttacgttaatgtgtcatgtatacttccagtcaaatgaacatgtacttgctagctagctagctagctagctggctcatgtattctgaatgaatatgatttgttcttattacaggcatacagcagcaaaactttactaattgaacacaaaaggaaggcatacaacaggcattcagcagccacttctcatcctatcaaattccctccacctaaatctgccatcccagctgagagtagagtgtttgaggagcctccaagagccccacctcaaaaacaagtgtggttgtccaaacctaaccatctaaagaagccacttgatactttgcccgatatctctagtgatcccctttctagagcaccacagccacccaagatgaccctttcccacaaaaagactccgcctaagagagaggtgaggtaccactaagagtattcacttggttgtgttttgttaggaggaagagatatgcgagagagcagtagggacatgcaacaatcttctcatgatgtgcatgatcctcctattcagagacgtgctactagacctagaggtgttttgcgttaggtggctaggcctaaagctatgagactacatggtggtcgtgcctgacatggtatcggtgaaagggaaataggatcaaaccttttcctaaataaattttggtggttgaatttgaaagctctcttgtgggttttggtgtttggatgacaacccagttaaaggactaacaagtgtgttaagtgttgaacaggtgctgaatgcaaagctaacagggttcaacacaagtaaacaggtgtgatggtccaaagacggaattatctatagataatggacatcacaagaaagatggacattgcttaagtgagacttgatatgcataacttggagacaaccgttcaaaccaaggatgaaagcaagaagagcttcgaggtaccgagtgcacgggagaaagtcaaggagaccaggaacccaaagcgaggggtgaagaaggagacttgcgaaatcgaggttgatcgagttaagaagagttatggtgcatcaaggaacactacataaggacatgacttacaaccaatgaggtaacgtctacaattatgtggtgtaagtcataaggctcaagaccaagctcaaaaagtgaacaaggacactagaaggagaaccaatgtcaaaatcagaactggaagcagcctaaaagagctaagtgcaccttgacctttagtttgggttgttcctatgattggagatattctatgtgacctttgcaggatgttggagctcagaaatgtcaatatagatcaagtcaagctgacttgatggtttatgagtccaacataaatctcaatcatgccaaatactaaagaagtgaaaatcaaagagaaggtatgtttctagacttagtacattggtttttgtgtactaatatattttctaagtattagaaatagagaaaacaagaaaagaaaagagatgcaaaaggcttggttgtgtacagccaagactcagctcagtctggcacaccggactgttcggtggtgcaccggacagtgtccggtggtgcaccagacagtgcccagtgcgctagactaaactccggtgaacaggctgctctcgggagaagtttggcggcatacgactataattcaccggactgtctagtggtgcaccggactgtccggtgagccaacggtcgactgcgccaacagtcggcagcgcgatcagcgggtgacgcgtggcctaggccaacggatagttggtccaccggattgtccggtgtgcaccggacagtgtccggtgagccaaggcgaccgttgctccaacggtcaagtgagcccgatttggaaggagatcgcgcatcggacaagctacaggacctgtccggtggtgcaccggactgtccggtgcgctacccgacagaaagcaagtattaccttccaaaatggattccaacggctcctagaccccttgggtctataaaagggacccctaggcgtcttcaacaaacaaacaagtgcagccaacaattgtatacatcactcggatcgattctctctctcactctcgtgtatatctctctagtttgtgtgaaggcaaagttataagcttttagagagtggagaggtgctgcaaagagctagagcaaagtcttgagcgcactgttactctgccggagtgctgtcaagaagattgtaagcagccgtggctttgttgtaacccaactcaacatagtggaaggctctatctgtcatactgacagatctgagcaaacgtaggaagatgttgaaatagactccaagcccaggtgtggctaactccaacgaggactaggcaagcatttcaggcttggccaaacctcgggataaattcttgcgtctgtgtgcttcgctctgtattgtgtgctgactccttgtcttactcactttttatatctgcacttcaacacttatctatggtacaagttatatttgaagtgcagggcattttgagacatgatattctattccgctgctaacgatgaaagtagagatgaaagcgatgatgaggaggaatatgaggatgaggagtctacatcatcacaaggtacattttcctgttttgcttccactgacaataatgacagggaaaatgagaccgacgatgtggaagaagaggagattcgtcctttctacacccatctcaacaaagaagacaaagcgctcttggttaagctgttgagaaggaacaaggaacaaggcgagacgcttctcaggctagaggacactctcatcaaaaccaacgacagcctagagaagatgaccaaagaacatgaggagctaaagtgctctcatgatgatttggtccaacggtatgattcagttttaattggcaaagaaataatgatgatgatttatcttgtgttgctcaacttaaaatggaaaatgctatgcttgagaggcatgtagaattgctaaatcatgataaacttgctcttactgaaaaatatgatattgtcttattatcatgataatcttttggatagacatatcatgcttgatattgctcatgaggttgtagttgcaaacctaaattcatatgaacctcattcttgcacacgtgcacatctagataatatatcaccatgtgctaaccctggttgctcaaaagaaagccaactcttggatgagcatcaagctgcaggatcaaaagaaaaagtgcccatcaataaagaaaggaacaagaaaacaaagcaactaaggagaagacgcattgttcaaccttctcaagatatccacgggcgcgtggtgaagaagcttgagacgggaaaaactgcagcaagtgttaagctccataagaaggatgttcctaatgctaaaaatgacgaaatcaacatgaacttggaaaaaggtaaagattcaattagtcatgttgtttgcactggccatttctctatgtcatccaagaacaaaatagaaaagggaaaaggaggtgctttaagtgcaataagtcaggacacctcattgtgtcgtgtccatacaacgacaaggatgaagggataaggagatgcttcggatgcaatgacaagaaccatacgatcacttcttgtccgctaatgataaataaagcacgtgcactctccgggatgacccccactaagaaagaagacaaacagcaagcgtcatgtcaggttaagcaacgcttctgctacaagtgtggtgagcagggtcatctatccaaggtatgtaaaaagggtaaggttcctaagcaagtaaatctatctcaatctcattcacttaggagacccaaaccatacacttgtgctagatcagtaatgagatcacctagaactagcaaaattgctatttgggtaccaaaagctcttatgaatgatcgttatggacccatcccgagatgggtaccaaactgtgccaactagaccatgcaggtgcctcgagatggactggagaccatgggagagcttaagacggttaattcaaattctatgcttaagctgttaatttttattgtctattcattgacccaaggttgaattattgtgcaatactaatcccatgttcatctcaagtgaaataagttgtagaggtccgtaatcattattggtgaatcaagcaaaggaccttgatgagaatctgcaacttgctctccaaaggatggtacccgtgtatcttaagtacattaagtacattattgataatcagtattgctcttaagttggattgttg

SEQ ID NO: 36792 - DNA, 2482 bp, Zea Mays
cttgtgttagctagctgtgcgagccacaatgggctcctcgaaatgtcaatgtgccgtgggctgcggccacagacaactcatcgatgacacgcatgcatggctgcgtcgtgcgtggacgcgtgcacgtgtacaccatctgccatatacgcaccggactagctgtaccgcacatccagtgtttccatccaaggctggagtacgcaatacacacataaacatccacacgttcatgacgcgtacgccagccaaaaaaagcaccatcatcgcaaagcaaagcactgcacgtactactgagcggtgacagcacagatcgatgcatggatcgaagcggccagcgtcgtcccactcccagtcccagcacactactagcgctagtcgatcgctagctggcccggctggccggagaaggcagatgatgtatataccagcatactacactgtactgcactgtactgatgtacatgtcgaaattaattgatcgtatatcgtcgtagaagaatccaggatggatttgtgtataaatacacacacacacacacacacagatcgaccctcttcgtcagtccatagtacacgtacgtacttgcaccgtactatacgacccctgcgaccggaccaggccggccggatccatgcctgttgccgctgcgggcctacacgcgccgccgacgacgacgaccgttcttgttggttattaatcggcgagcgcaagcaggaggagcagctgcctgtgtagctaagggcaggccatggggaggctcgacggcgggctgggtgcggcgacgccgccgtcgttcgtgcgcgcggcctggcaggcggtgaggtggtccgtggtggttccggcgctgcagctggccgtgtacatctgtgccgccatgtcgctgatgctcttcctcgagcgcctgtacatggcggccgtggtcacggggctctggctgcgccggcgccggcgccaccgcgtcgccggtgacgggcagcgcgtgctggacgacgacgacgacctggaggccgacgccggccgctgctgccccatggtcctcgtccagatccccatgttcaacgagggacaggtgagcgagaccgcttattgattgttgcttgcagttgcagttgcagttcgtattctgcttctacctctcgatcatactagctagctgttgattgattggtggcacacaataaatgtgcaccggtatggtatgatactgctgctagtatagtactactacttgtttgttttaagcaagcaagcgtgcatgaagcctgcacgcaaaacaactgaaaggggtccatctttccatgcatgcgttgcgtggtcgatgatcgatcaacccaaagcacgctgcatgcctgcgcatttgtcgtgtgcagtcagttcttgctgcatgacatatattctctttctcattaattgacacgtacaagctacagactaataaaagctactttgtttttctttactttgggcgcgtttcctccctttttaaatctctttttattcgctccacgataattaaaagacacagagatgaattatatattgcatgatgagtgagtattatattaattacaacacttcttttaagcgtttatttttgcatgtgcctcagtcccgaaataagtaccgctacgatactcatgtcaattatttctttttgacttaattagccatataaaaaaatattagcaatacttgtatctacaaataaatttattatggtaataaattctactatctatgtgagtacgagaattcatgggagccaataagaccgcgtgacataatcaaacaaggtcgtaaaaaaactagcgaccgatttcataaaaaagtccttgtgtgccgaccgaatcgaggcgtgcatatcttgtggaatgttgatctctcttgaggggccggggtgtccgaagggggcgaggtcaggtgacagtctcaagctgagagttagggatcgttggttcgcaaaacttgtctgtcagcagggaactagttgcatcatcgcaatgagagggagatcgggtttgtcgagcaggccgacgttgtcgttggaaataaaccctaagatattgaaaaataagtaatgtccaactattcagggtttatttatggtggctttggccatcgaaaattgtacctctactgacatgtatgagtactttgtaaaaagatacttatcagacttaaaagtgtttgaatttttgtggaccaaagtgtgcacttgttttgaaaagggtagagtaataatactactagattggtaatcaaatatatatttaaattttacagtacatccgtacgccggttagaacgaaggtctagtttagaagccacaaaaccgaagggtatatcggaggggctaaaattatttaatttttgaataagagggtctattatcccatctggttttgtggctctcaaactagtcctaccagtatttttttatataaattcaatcaaactaaaagatattttgacttcgagtag

SEQ ID NO: 36793 - DNA, 2810 bp, Zea Mays
gcaagtcagcaactcggagtagttcgttcgcttgccggcgtgccgtttctctcccccccttcaccctttgccttcgtgagccagtggctcagcgcgcaattcacgatttacgagatgaggctgagatagccggtgaacgatcagagccccccatggcggcattcgcagccccctccttgtcctcgctcatcctcctcgcctcgccccactccgcgcccactctcctccgcctgcgccgcgcgggcggccgctctctggagctgtcgtcacggcgcggcgggagcgcgcgccttcgggtcgttcgacgagcggtgacggaggaggagagcgaggccgcgcgcggagacgaggaggtggaggaggccccggaggagccagtggctggccgcgacctcgtcacgctcgccgcctgcctcgtgggcctcctcaccggcgtctccatcgtgctcttcaacctctcggttcatgaaatacgtgacgtattttgggacggtattcctttgcgaggcgcttcatggctgagggaagaaccgattggtgaagtctggcagagagtgatatttgttccggtcagtggaggtgttatagtgggtggattgaacgctctaagaagtcagatagaaactaactcagatgcccctgtgtccaagataaagagtgcatttagaccattcttgaaagctgtggcagcatctttcactcttggaactggcaattcactgggtcctgagggtcccagtgtggaaattggttctgcaatagccaaaggatttggtgatgtatttgagtgggacggtgggaaaaggctgtctcttgtggcagctgggtcagcagctgggctttcatctggttttaatgctgctgttgctgggtgtttttttgctgtggaatctgttttgtggccttctgcggattcctcatcccttgccaactcgacacctatggtgatactcagttcagtgatagcatctgttgtttcagagattggtctaggttctgatcccgctttcactgttccggaatatgattttcgctccccaacagaacttcctctataccttttgctgggtgtcttctgcgggttggtgtcaattgcattatcaagatgtacatcacttgctatgaaggcagttgaaagtttacaaaggacaacagggttaccgaaggctgcatctccggctttaggtggcctcattgttggtctccttgcacttttgtaccctgaagtattgtactggggctttgaaaatgttgatatcttgctggaatcacggccatttacaagcggcctctcaacgaccatattggttcagcttattggagtgaaaatattagcaacatctttgtgcagggcttctggattggttggtggttattatgcaccatctctttttattggtgcagctacagggatggcatatggcaaattcatgaagtttacatttactggccctgaaccattgctgcatgtcccattcttagatgtggcatcacctcaagcatatggcctggtaggtatggcagctaccctcgccggtgtatgcaaggtgcctctgacatctgtcctactactttttgagcttacacaagactatcgtatagttctacctttgctcggggctgttgggttatcatcctggattgcttctcctcaaaggttctctaaaagaattaggagtaagctggattcttgggaggataaatcgagtattcctcagcaagcaaacgacatgctcactgaaaacaaagaggccacttccatggatgcagctgatttgtcgttagaattatataaaattgaaagctccctttgtgtctatgatgccaacgacagcaatatgttcaaaaatcttactgttggtgaggccatgaaaactaactacttctctgtctcaatgacaaccccattaattgaggcactagatcttatgcttgccgagaagcagccctttgttatgataactgagaataacacatctgcaagaggcttgctggcactaaagaatatccaagatttttgcaaagctgcaaaaactaccagatcacaagctgaggtaaaatgtaaaggaactcctgatatctcatgtttgccaagcaggcaagtgtaaatcgtggtctgtgacgcctcagatgccacttactactgcagagaagattatggactctcatgatgtggatcacctacctgtagtttctgaggatgctaatcttcaggacagaggacttttgataggttttgtagaccgagaatgcattgccattgctcgaaggtatttggatgattcttctaaaattggtatagtattgcctgcgtttccagttgcatcttataccaacagtcgtcgtttgtatttgttgctgtgttttcattcagagccatggcaacaaaagaaattttcagttctatgtatgggatcaggaaggaagagaggtagcacgaaaggaaggaatgacacgacacagaagcactccctacttggcaaatctggcttcttttcctggtcaaggctaatacctctccaggttattagttgctaagtaaaaacgtgcttcaggcatgtggttaaggtgggtctccatatttttctcgaagtatcccgcttaccggttaccaccatgactatctgcaatggtgaggttttgttgctcttgtttgctacaagttctcaatgttagaatatacccgtttagggtttggggtcttccccgtgtaatgaccatctcacccctctgtaatgggcctgacccagtttactcagcctattaatatatcacccaacccctgttagggttagggttttcattctcca

SEQ ID NO: 36794 - DNA, 2878 bp, Zea Mays
ctccctccggcctccgccgagcgacggtacagcaagtcagcaactcggagtagttcgttcgcttgccggcgtgccgtttctctcccccccttcaccctttgccttcgtgagccagtggctcagcgcgcaattcacgatttacgagatgaggctgagatagccggtgaacgatcagagccccccatggcggcattcgcagccccctccttgtcctcgctcatcctcctcgcctcgccccactccgcgcccactctcctccgcctgcgccgcgcgggcggccgctctctggagctgtcgtcacggcgcggcgggagcgcgcgccttcgggtcgttcgacgagcggtgacggaggaggagagcgaggccgcgcgcggagacgaggaggtggaggaggccccggaggagccagtggctggccgcgacctcgtcacgctcgccgcctgcctcgtgggcctcctcaccggcgtctccatcgtgctcttcaacctctcggttcatgaaatacgtgacgtattttgggacggtattcctttgcgaggcgcttcatggctgagggaagaaccgattggtgaagtctggcagagagtgatatttgttccggtcagtggaggtgttatagtgggtggattgaacgctctaagaagtcagatagaaactaactcagatgcccctgtgtccaagataaagagtgcatttagaccattcttgaaagctgtggcagcatctttcactcttggaactggcaattcactgggtcctgagggtcccagtgtggaaattggttctgcaatagccaaaggatttggtgatgtatttgagtgggacggtgggaaaaggctgtctcttgtggcagctgggtcagcagctgggctttcatctggttttaatgctgctgttgctgggtgtttttttgctgtggaatctgttttgtggccttctgcggattcctcatcccttgccaactcgacacctatggtgatactcagttcagtgatagcatctgttgtttcagagattggtctaggttctgatcccgctttcactgttccggaatatgattttcgctccccaacagagattgaaagtatgaggatatttacatgacttcataactgtcagaacttcctctataccttttgctgggtgtcttctgcgggttggtgtcaattgcattatcaagatgtacatcacttgctatgaaggcagttgaaagtttacaaaggacaacagggttaccgaaggctgcatctccggctttaggtggcctcattgttggtctccttgcacttttgtaccctgaagtattgtactggggctttgaaaatgttgatatcttgctggaatcacggccatttacaagcggcctctcaacgaccatattggttcagcttattggagtgaaaatattagcaacatctttgtgcagggcttctggattggttggtggttattatgcaccatctctttttattggtgcagctacagggatggcatatggcaaattcatgaagtttacatttactggccctgaaccattgctgcatgtcccattcttagatgtggcatcacctcaagcatatggcctggtaggtatggcagctaccctcgccggtgtatgcaaggtgcctctgacatctgtcctactactttttgagcttacacaagactatcgtatagttctacctttgctcggggctgttgggttatcatcctggattgcttctcctcaaaggttctctaaaagaattaggagtaagctggattcttgggaggataaatcgagtattcctcagcaagcaaacgacatgctcactgaaaacaaagaggccacttccatggatgcagctgatttgtcgttagaattatataaaattgaaagctccctttgtgtctatgatgccaacgacagcaatatgttcaaaaatcttactgttggtgaggccatgaaaactaactacttctctgtctcaatgacaaccccattaattgaggcactagatcttatgcttgccgagaagcagccctttgttatgataactgagaataacacatctgcaagaggcttgctggcactaaagaatatccaagatttttgcaaagctgcaaaaactaccagatcacaagctgaggtaaaggaactcctgatatctcatgtttgccaagcaggcaagtgtaaatcgtggtctgtgacgcctcagatgccacttactactgcagagaagattatggactctcatgatgtggatcacctacctgtagtttctgaggatgctaatcttcaggacagaggacttttgataggttttgtagaccgagaatgcattgccattgctcgaaggtatttggatgattcttctaaaattggtatagtattgcctgcgtttccagttgcatcttataccaacagtcgtcgtttgtatttgttgctgtgttttcattcagagccatggcaacaaaagaaattttcagttctatgtatgggatcaggaaggaagagaggtagcacgaaaggaaggaatgacacgacacagaagcactccctacttggcaaatctggcttcttttcctggtcaaggctaatacctctccaggttattagttgctaagtaaaaacgtgcttcaggcatgtggttaaggtgggtctccatatttttctcgaagtatcccgcttaccggttaccaccatgactatctgcaatggtgaggttttgttgctcttgtttgctacaagttctcaatgttagaatatacccgtttagggtttggggtcttccccgtgtaatgaccatctcacccctctgtaatgggcctgacccagtttactcagcctattaatatatcacccaacccctgttagggttagggttttcattctcca

SEQ ID NO: 36795 - DNA, 2121 bp, Zea Mays
aaaaagaaaaaaacggctccctccggcctccgccgagcgacggtacagcaagtcagcaactcggagtagttcgttcgcttgccggcgtgccgtttctctcccccccttcaccctttgccttcgtgagccagtggctcagcgcgcaattcacgatttacgagatgaggctgagatagccggtgaacgatcagagccccccatggcggcattcgcagccccctccttgtcctcgctcatcctcctcgcctcgccccactccgcgcccactctcctccgcctgcgccgcgcgggcggccgctctctggagctgtcgtcacggcgcggcgggagcgcgcgccttcgggtcgttcgacgagcggtgacggaggaggagagcgaggccgcgcgcggagacgaggaggtggaggaggccccggaggagccagtggctggccgcgacctcgtcacgctcgccgcctgcctcgtgggcctcctcaccggcgtctccatcgtgctcttcaacctctcggttcatgaaatacgtgacgtattttgggacggtattcctttgcgaggcgcttcatggctgagggaagaaccgattggtgaagtctggcagagagtgatatttgttccggtcagtggaggtgttatagtgggtggattgaacgctctaagaagtcagatagaaactaactcagatgcccctgtgtccaagataaagagtgcatttagaccattcttgaaagctgtggcagcatctttcactcttggaactggcaattcactgggtcctgagggtcccagtgtggaaattggttctgcaatagccaaaggatttggtgatgtatttgagtgggacggtgggaaaaggctgtctcttgtggcagctgggtcagcagctgggctttcatctggttttaatgctgctgttgctgggtgtttttttgctgtggaatctgttttgtggccttctgcggattcctcatcccttgccaactcgacacctatggtgatactcagttcagtgatagcatctgttgtttcagagattggtctaggttctgatcccgctttcactgttccggaatatgattttcgctccccaacagaacttcctctataccttttgctgggtgtcttctgcgggttggtgtcaattgcattatcaagatgtacatcacttgctatgaaggcagttgaaagtttacaaaggacaacagggttaccgaaggctgcatctccggctttaggtggcctcattgttggtctccttgcacttttgtaccctgaagtattgtactggggctttgaaaatgttgatatcttgctggaatcacggccatttacaagcggcctctcaacgaccatattggttcagcttattggagtgaaaatattagcaacatctttgtgcagggcttctggattggttggtggttattatgcaccatctctttttattggtgcagctacagggatggcatatggcaaattcatgaagtttacatttactggccctgaaccattgctgcatgtcccattcttagatgtggcatcacctcaagcatatggcctggtaggtatggcagctaccctcgccggtgtatgcaaggtgcctctgacatctgtcctactactttttgagcttacacaagactatcgtatagttctacctttgctcggggctgttgggttatcatcctggattgcttctcctcaaaggttctctaaaagaattaggagtaagctggattcttgggaggataaatcgagtattcctcagcaagcaaacgacatgctcactgaaaacaaagaggccacttccatggatgcagctgatttgtcgttagaattatataaaattgaaagctccctttgtgtctatgatgccaacgacagcaatatgttcaaaaatcttactgttggtgaggccatgaaaactaactacttctctgtctcaatgacaaccccattaattgaggcactagatcttatgcttgccgagaagcagccctttgttatgataactgagaataacacatctgcaagaggcttgctggcactaaagaatatccaagatttttgcaaagctgcaaaaactaccagatcacaagctgagctttctcaaccttgatgcag

SEQ ID NO: 36796 - DNA, 2139 bp, Zea Mays
cgtgtagtcgtgttcttgtgcggccggtgctcccggtgctccccatcacaccaccaaacggaccaggcgaggcgtcctccaggccctagctctgtggtgtgcgcctctgcgatactgcgactgcggggcgccggtgcccgtcccatcggccgccgaactgtgcgccccggttgcccactaggccactactgcagtctgcactctgcagataacacagaggaaggcggaagccgatggccgccgtggcaagccccgccctccggctccgcccgagagccgcctctacgtcggcgacctcctcctccgcccctcctcgctgtcgcttcggctccttctctcactcctgtttcaagtgcgctggcatggcttatatatctcagtttgggaggtcatttccagttcagagagtcaatggaagcacgatgcagcatttcggtactctaaaagctcaagtttttagcagcactggcgaccatgatggacgatttcatattaagaggactatatgctttgctgctacggacaagcaggagccggtcgtttcacgttactcagacatgccggttttgcatgaggcagaaagtggtactaaagttacccctgcatctgaaaactcctacttcgctggcagaggtgctggaaaaccaggattcatctcttttcaagaaagcaccttccgaaagtcaactgtggagagcgtgccacatcctggcaaggaagcatctcgattagtttggtttattggccctactattctcgtgtctttcttggttcttccatctctttacttgcgcaaagtactctcagcagtgtttgaagattccttgttgacagattttcttatactattctttaccgaggctttattttatggaggagttgcaatttttgtcttcttgattgataaagtctggagacctttgcagcaagtagcaccaaagagttacatttggtcaaaatccagatttttccgtatttcctcagtaacaacaatggttctgagcttgataatacctcttttaacaatgggcatggtatggccctggactggaccagcagcatcagcgactcttgccccttatttggttggactggttgtacagtttgcatttgaacagtatgcacggcatcggaaatcaccttcttggccagtgattcctattatcttcaaggtatacaggctacaccaactgaacagggcagctcagctggtgacggcactcacattttctgtcagaggaacagagacaacaaatcaaaccctagccatcatgaactcattaggagcattactgactgtccttcaaattcttggcgttatctgtgtttggtccctctcaagctttctgatgaggtttcttccctcttcagacattcctgatccctgactcctagacgttttggtagaacttttggagcgtgggcatagcttcccattgtaaattggttacacggaaccagtttcacatgtttgcaatgtttagcatttctttagggcatcttgatgcaatcttcggctgagtaattggaagagaaactgacgctggaatcaaataaacagcaaattaaaaggtccgatgcattgagtgtttccatgctgcccttgtggatcaaattctgagcttgcaaagggatcggttttgtaagaaggtatgcgagatttagtcagatttatggggtgtttggtttgaggaatcacttcatacaaaatgtggtggtgcatcatgggttcattcctcaaatttggtgggatgatcctatttctcatattagtactaactaactataaggaatgaggtgatgatggatcaactcattccattctacaaaccaaacaaaaaaagtgaggagtgagaagatgaaggactagccaattcctcaatccaaacaacttattaatgttccacaaggctcttgcagaacgcaatacatttcacaagttgatggcagtcatgtactgttgtatatcatcgccaattggtcggaccctgctgagtgctgatgctaggatacgtggagctggatccagatgattcaaattcaaacttctctatgttacctttggaaaacatatttcatgtatgctactgaattcagtttcccgttaagggcctttctggattgaaggatttttttagg

SEQ ID NO: 36797 - DNA, 2104 bp, Zea Mays
cgtgtagtcgtgttcttgtgcggccggtgctcccggtgctccccatcacaccaccaaacggaccaggcgaggcgtcctccaggccctagctctgtggtgtgcgcctctgcgatactgcgactgcggggcgccggtgcccgtcccatcggccgccgaactgtgcgccccggttgcccactaggccactactgcagtctgcactctgcagataacacagaggaaggcggaagccgatggccgccgtggcaagccccgccctccggctccgcccgagagccgcctctacgtcggcgacctcctcctccgcccctcctcgctgtcgcttcggctccttctctcactcctgtttcaagtttgggaggtcatttccagttcagagagtcaatggaagcacgatgcagcatttcggtactctaaaagctcaagtttttagcagcactggcgaccatgatggacgatttcatattaagaggactatatgctttgctgctacggacaagcaggagccggtcgtttcacgttactcagacatgccggttttgcatgaggcagaaagtggtactaaagttacccctgcatctgaaaactcctacttcgctggcagaggtgctggaaaaccaggattcatctcttttcaagaaagcaccttccgaaagtcaactgtggagagcgtgccacatcctggcaaggaagcatctcgattagtttggtttattggccctactattctcgtgtctttcttggttcttccatctctttacttgcgcaaagtactctcagcagtgtttgaagattccttgttgacagattttcttatactattctttaccgaggctttattttatggaggagttgcaatttttgtcttcttgattgataaagtctggagacctttgcagcaagtagcaccaaagagttacatttggtcaaaatccagatttttccgtatttcctcagtaacaacaatggttctgagcttgataatacctcttttaacaatgggcatggtatggccctggactggaccagcagcatcagcgactcttgccccttatttggttggactggttgtacagtttgcatttgaacagtatgcacggcatcggaaatcaccttcttggccagtgattcctattatcttcaaggctacaccaactgaacagggcagctcagctggtgacggcactcacattttctgtcagaggaacagagacaacaaatcaaaccctagccatcatgaactcattaggagcattactgactgtccttcaaattcttggcgttatctgtgtttggtccctctcaagctttctgatgaggtttcttccctcttcagacattcctgatccctgactcctagacgttttggtagaacttttggagcgtgggcatagcttcccattgtaaattggttacacggaaccagtttcacatgtttgcaatgtttagcatttctttagggcatcttgatgcaatcttcggctgagtaattggaagagaaactgacgctggaatcaaataaacagcaaattaaaaggtccgatgcattgagtgtttccatgctgcccttgtggatcaaattctgagcttgcaaagggatcggttttgtaagaaggtatgcgagatttagtcagatttatggggtgtttggtttgaggaatcacttcatacaaaatgtggtggtgcatcatgggttcattcctcaaatttggtgggatgatcctatttctcatattagtactaactaactataaggaatgaggtgatgatggatcaactcattccattctacaaaccaaacaaaaaaagtgaggagtgagaagatgaaggactagccaattcctcaatccaaacaacttattaatgttccacaaggctcttgcagaacgcaatacatttcacaagttgatggcagtcatgtactgttgtatatcatcgccaattggtcggaccctgctgagtgctgatgctaggatacgtggagctggatccagatgattcaaattcaaacttctctatgttacctttggaaaacatatttcatgtatgctactgaattcagtttcccgttaagggcctttctggattgaaggatttttttagg

SEQ ID NO: 36798 - DNA, 2221 bp, Zea Mays
cgtgtagtcgtgttcttgtgcggccggtgctcccggtgctccccatcacaccaccaaacggaccaggcgaggcgtcctccaggccctagctctgtggtgtgcgcctctgcgatactgcgactgcggggcgccggtgcccgtcccatcggccgccgaactgtgcgccccggttgcccactaggccactactgcagtctgcactctgcagataacacagaggaaggcggaagccgatggccgccgtggcaagccccgccctccggctccgcccgagagccgcctctacgtcggcgacctcctcctccgcccctcctcgctgtcgcttcggctccttctctcactcctgtttcaagtgcgctggcatggcttatatatctcagtttgggaggtcatttccagttcagagagtcaatggaagcacgatgcagcatttcggtactctaaaagctcaagtttttagcagcactggcgaccatgatggacgatttcatattaagaggactatatgctttgctgctacggacaagcaggagccggtcgtttcacgttactcagacatgccggttttgcatgaggcagaaagtggtactaaagttacccctgcatctgaaaactcctacttcgctggcagaggtgctggaaaaccaggattcatctcttttcaagaaagcaccttccgaaagtcaactgtggagagcgtgccacatcctggcaaggaagcatctcgattagtttggtttattggccctactattctcgtgtctttcttggttcttccatctctttacttgcgcaaagtactctcagcagtgtttgaagattccttgttgacagattttcttatactattctttaccgaggctttattttatggaggagttgcaatttttgtcttcttgattgataaagtctggagacctttgcagcaagtagcaccaaagagttacatttggtcaaaatccagatttttccgtatttcctcagtaacaacaatggttctgagcttgataatacctcttttaacaatgggcatggtatggccctggactggaccagcagcatcagcgactcttgccccttatttggttggactggttgtacagtttgcatttgaacagtatgcacggcatcggaaatcaccttcttggccagtgattcctattatcttcaagtgtatcaagtaattctggactctattggaagcattttgaagaatctatgggcaacaactaagactgggaaatgtggaagaaaataatccagctacaccaactgaacagggcagctcagctggtgacggcactcacattttctgtcagaggaacagagacaacaaatcaaaccctagccatcatgaactcattaggagcattactgactgtccttcaaattcttggcgttatctgtgtttggtccctctcaagctttctgatgaggtttcttccctcttcagacattcctgatccctgactcctagacgttttggtagaacttttggagcgtgggcatagcttcccattgtaaattggttacacggaaccagtttcacatgtttgcaatgtttagcatttctttagggcatcttgatgcaatcttcggctgagtaattggaagagaaactgacgctggaatcaaataaacagcaaattaaaaggtccgatgcattgagtgtttccatgctgcccttgtggatcaaattctgagcttgcaaagggatcggttttgtaagaaggtatgcgagatttagtcagatttatggggtgtttggtttgaggaatcacttcatacaaaatgtggtggtgcatcatgggttcattcctcaaatttggtgggatgatcctatttctcatattagtactaactaactataaggaatgaggtgatgatggatcaactcattccattctacaaaccaaacaaaaaaagtgaggagtgagaagatgaaggactagccaattcctcaatccaaacaacttattaatgttccacaaggctcttgcagaacgcaatacatttcacaagttgatggcagtcatgtactgttgtatatcatcgccaattggtcggaccctgctgagtgctgatgctaggatacgtggagctggatccagatgattcaaattcaaacttctctatgttacctttggaaaacatatttcatgtatgctactgaattcagtttcccgttaagggcctttctggattgaaggatttttttagg

SEQ ID NO: 36799 - DNA, 1195 bp, Zea Mays
cgtgtagtcgtgttcttgtgcggccggtgctcccggtgctccccatcacaccaccaaacggaccaggcgaggcgtcctccaggccctagctctgtggtgtgcgcctctgcgatactgcgactgcggggcgccggtgcccgtcccatcggccgccgaactgtgcgccccggttgcccactaggccactactgcagtctgcactctgcagataacacagaggaaggcggaagccgatggccgccgtggcaagccccgccctccggctccgcccgagagccgcctctacgtcggcgacctcctcctccgcccctcctcgctgtcgcttcggctccttctctcactcctgtttcaagtttgggaggtcatttccagttcagagagtcaatggaagcacgatgcagcatttcggtactctaaaagctcaagtttttagcagcactggcgaccatgatggacgatttcatattaagaggactatatgctttgctgctacggacaagcaggagccggtcgtttcacgttactcagacatgccggttttgcatgaggcagaaagtggtactaaagttacccctgcatctgaaaactcctacttcgctggcagaggtgctggaaaaccaggattcatctcttttcaagaaagcaccttccgaaagtcaactgtggagagcgtgccacatcctggcaaggaagcatctcgattagtttggtttattggccctactattctcgtgtctttcttggttcttccatctctttacttgcgcaaagtactctcagcagtgtttgaagattccttgttgacagattttcttatactattctttaccgaggctttattttatggaggagttgcaatttttgtcttcttgattgataaagtctggagacctttgcagcaagtagcaccaaagagttacatttggtcaaaatccagatttttccgtatttcctcagtaacaacaatggttctgagcttgataatacctcttttaacaatgggcatggtatggccctggactggaccagcagcatcagcgactcttgccccttatttggttggactggttgtacagtttgcatttgaacagtatgcacggcatcggaaatcaccttcttggccagtgattcctattatcttcaagtttgtgatctgatcaatcgtacctgatatttgggagctgggacttgggat

SEQ ID NO: 36800 - DNA, 1792 bp, Zea Mays
tgcagatccagatccggtgggcggcgaggacgagatcgccccctaccaccatggcgggcgccgtgtcggcgctcttcctgctggacattaagggccgcgtcctcgtctggcgcgactatcgtggtgatgtctccgcgctccaggccgagcgcttcttcaccaagctcctcgacaaggagggcgactcggaagtccactcgcctgtggtctacgacgacgccggcgtcacgtacatgttcatccagcacaacaatgtcttcctcctcaccgctgctcgccagaactgcaacgcggccagcatcctcctcttcctccaccgtgtcgtagatgtgtttaagcactacttcgaggaactggaagaggagtcgctcagagataacttcgtcgttgtgtatgagttgctggatgagatgatggatttcgggtacccacaatacacggaggcgaagatcctaagtgagttcatcaagacagatgcgtacaggatggaggtcacacagcgtccacccatggccgtgacaaatgctgtgtcatggaggagcgaggggatccgttacaagaagaatgaagtcttcttggatgtagtagagagtgttaacattctagttaacagcaatgggcagattgtgagatcagatgtggttggggcactgaagatgcgaacatatttgagtggaatgcctgagtgcaaactcggcttgaatgatagggttcttttggaggctcaaggcagagcaactaaaggaaaagcgatagaccttgatgatatcaaatttcatcagtgtgtacgtttagctagattcgagaatgatagaactatatcgttcatacctcctgatggatcttttgatctaatgacatacaggcttagcactcaggtaaaacctcttatctgggtcgaagcacagattgagaaacattctagaagccgtatagaactcatggtgaaggcaaggagtcagttcaaggaaagaagcacagcaacaaatgttgaaattgaagtgcctgttccttcagatgccacaaacccaaatataagaacttcaatgggttctgctgcatatgctcctgagagagatgcaatggtctggaaagtaaaatcattccctggtggcaaggaatacatgtgcagagcagaatttagtcttcctagcataacagcggaagaaggggccccagaaaagaaggcaccaatacgagtgaaatttgagataccatatttcaccgtatcaggtccgttatctgaagataattgaaaagagtggttaccaggcactcccctgggttagatatatcacgatggctggcgaatatgagctgagacttatatgagttttctcttttctggctgatggaagacatttatgaagctgcaagatacatatttgctcgagacagcaaccgtatgacatttgaatgttagcctggacgtcttctgccgaccacacaaggttttccccctgggggcttgttcatcttgttaggctcaccttaccttggttattgtacgttacccatcaagtatagtttttgaaaaaaagagaggataattttaattttcatctctcttgtattattattgatttatttttgtgggtaccaaacttggatttgtttcatctgatcgagttcacaaaaacactgccattactgggtgatggttctgaactgcaggttgaaacaattgtgccctttactgtaaatgtcgtcgtcttgtatccaggcaaaagaaaggaaacctaccgagacctattatgacatcaataatttcaacttttttttgtttcaatta

SEQ ID NO: 36801 - DNA, 2114 bp, Zea Mays
tatacatactttaatagagtaaatacttatcagttatcggatcacggatacccatttctagtccccatcagaaaaaagctgaaacaagactcggcttccacctgtcaatcaaaaaaaaaaaactccacattggacagcatccaggccccactgtccaggcacccggatccagccctctctcccttctccacttccgtttccggattcttgcgtttccaagtccgatacaaaccagcgccgcgccgcgcgagcacgtcgggcgacgttgcggcaggcgagatccgagaacactcctccctcgcgcccccgcacccgcatggccgccgctggccgcagatagggaggcgcaggcgggggcgtgcagatccagatccggtgggcggcgaggacgagatcgccccctaccaccatggcgggcgccgtgtcggcgctcttcctgctggacattaagggccgcgtcctcgtctggcgcgactatcgtggtgatgtctccgcgctccaggccgagcgcttcttcaccaagctcctcgacaaggagggcgactcggaagtccactcgcctgtggtctacgacgacgccggcgtcacgtacatgttcatccagcacaacaatgtcttcctcctcaccgctgctcgccagaactgcaacgcggccagcatcctcctcttcctccaccgtgtcgtagatgtgtttaagcactacttcgaggaactggaagaggagtcgctcagagataacttcgtcgttgtggtaagcaaatttcaagtacttctgtttgatgtgcggttactgggacttgacggaatggggcgcccattttgtgcttacagtatgagttgctggatgagatgatggatttcgggtacccacaatacacggaggcgaagatcctaagtgagttcatcaagacagatgcgtacaggatggaggtcacacagcgtccacccatggccgtgacaaatgctgtgtcatggaggagcgaggggatccgttacaagaagaatgaagtcttcttggatgtagtagagagtgttaacattctagttaacagcaatgggcagattgtgagatcagatgtggttggggcactgaagatgcgaacatatttgagtggaatgcctgagtgcaaactcggcttgaatgatagggttcttttggaggctcaaggcagagcaactaaaggaaaagcgatagaccttgatgatatcaaatttcatcagtgtgtacgtttagctagattcgagaatgatagaactatatcgttcatacctcctgatggatcttttgatctaatgacatacaggcttagcactcaggtaaaacctcttatctgggtcgaagcacagattgagaaacattctagaagccgtatagaactcatggtgaaggcaaggagtcagttcaaggaaagaagcacagcaacaaatgttgaaattgaagtgcctgttccttcagatgccacaaacccaaatataagaacttcaatgggttctgctgcatatgctcctgagagagatgcaatggtctggaaagtaaaatcattccctggtggcaaggaatacatgtgcagagcagaatttagtcttcctagcataacagcggaagaaggggccccagaaaagaaggcaccaatacgagtgaaatttgagataccatatttcaccgtatcaggtattcagacatttatgaagctgcaagatacatatttgctcgagacagcaaccgtatgacatttgaatgttagcctggacgtcttctgccgaccacacaaggttttccccctgggggcttgttcatcttgttaggctcaccttaccttggttattgtacgttacccatcaagtatagtttttgaaaaaaagagaggataattttaattttcatctctcttgtattattattgatttatttttgtgggtaccaaacttggatttgtttcatctgatcgagttcacaaaaacactgccattactgggtgatggttctgaactgcaggttgaaacaattgtgccctttactgtaaatgtcgtcgtcttgtatccaggcaaaagaaaggaaacctaccgagacctattatgacatcaataatttcaacttttttttgtttcaatta

SEQ ID NO: 36802 - DNA, 1443 bp, Zea Mays
agggaagataggagtccgggtgaacctaacaaaattgaaccgattccccctccctccgcctctaaacatatcgacaattcctcctccctcctcccatcgcttgcccctcgctcccctccctctccgcgccgccccctctcgaatcgaaatccctctccgccatgccgaagggcgccaagaagcgcgccaagctcaagaagcagcagcagcagggccaccccgacgatgccggcaacaccaacgccagcaacggcaactgtaacggctgcgatgacaacaacagcgcctcgagcggccgcgacggcgaccaccacctgcggatcccacccaaagtttctcgtgtggatgcgaacgaggactccatggagagctctgaggagatggtcaccccccgagctgccgcgtcggagccggatgaggaggagactaaggccactgcggccgaggtgcccgtggagcgcaccgtcgacgcggacgtcgccggttctggggaggtcatagtggacgcgtttccgccggaaaccgttggacaggaacgtgagggcaaagtggatgaggcagaggtggaggtgcacgccgtggtggcgcaggaaccggaggtaaaagatgtgaaggagttggccaaggtgcattcggtgcttgaatctgagccgagggttgatgaagggcgtgatgaagtggtggtggtcgacgaaacacctgtagtgcctgaggtacaggaaccagaggtgaaaggcgttgatgctaccgttgtgttgaaggaacaagagaagaatagtggcaatgtggtggccaaggactctgctgaggtttcgcgctctcaggaggctgctggtgtgcatattacagaggtggagcggggacctgcagtggcagtgattgctccagggcagcgggcaatatggtggaatttctgcggcctttttgatgcctttactggttcagggagatagatgaagggttggaacttgaagccaagaagacaaatgtggtgacgttcagtttaaagctgatgagcagttgtaactagactttttgtttgcatagtcacatgaatgtatgatgaagcagcaggatttcggataacatcgcgctgatgtttacttcctccctgtgtctctgcatgtgtgcaaagttacacaccccccctggtcgtggactcatggttaatatccttaatttccttagtatccccaacgcctagtgccctttgtctagtgtcgtctaggtactgcctggttttgtagcataagagttgaggtgggtcgaccgtaaagaaaattttgttgtttctgcctttatacttattttttctggggtgtcgtctgctatgccccttcctctcatggttgtcacttgtaagatatttattcaaacaatttgagatggttctttgaaaagcctcaattcgagattgctgagtgtcagccaggtttgtcataa

SEQ ID NO: 36803 - DNA, 1070 bp, Zea Mays
ggtgaacctaacaaaattgaaccgattccccctccctccgcctctaaacatatcgacaattcctcctccctcctcccatcgcttgcccctcgctcccctccctctccgcgccgccccctctcgaatcgaaatccctctccgccatgccgaagggcgccaagaagcgcgccaagctcaagaagcagcagcagcagggccaccccgacgatgccggcaacaccaacgccagcaacggcaactgtaacggctgcgatgacaacaacagcgcctcgagcggccgcgacggcgaccaccacctgcggatcccacccaaagtttctcgtgtggatgcgaacgaggactccatggagagctctgaggagatggtcaccccccgagctgccgcgtcggagccggatgaggaggagactaaggccactgcggccgaggtgcccgtggagcgcaccgtcgacgcggacgtcgccggttctggggaggtcatagtggacgcgtttccgccggaaaccgttggacaggaacgtgagggcaaagtggatgaggcagaggtggaggtgcacgccgtggtggcgcaggaaccggaggtaaaagatgtggtggtggccgaggaatccgtggttcaggagccagtgtctgacgcaccggtggcagaggcttcagaggtgaaggagttggccaaggtgcattcggtgcttgaatctgagccgagggttgatgaagggcgtgatgaagtggtggtggtcgacgaaacacctgtagtgcctgaggtacaggaaccagaggtgaaaggcgttgatgctaccgttgtgttgaaggaacaagagaagaatagtggcaatgtggtggccaaggactctgctgaggtttcgcgctctcaggaggctgctggtgtgcatattacagaggtggagcggggacctgcagtggcagtgattgctccagggcagcgggcaatatggtggaatttctgcggcctttttgatgcctttactggttcagggagatagatgaagcataatgtgtatctttgtcaatagaagggccaaggacaaatactcaagtcaacactcaca

SEQ ID NO: 36804 - DNA, 1267 bp, Zea Mays
ccaacggttaggatagccccccgatcaggggcgcggttagacagttaggattaaccctaccccggttactgttaatcggctagtgtagaggacacatcttaacagggtgcacgcatgtgacatgtcagcatgtgcgtccggggggaggataaactactttgcctactggccactgagagcgtgggttgagtgagtaaagggagaagaaaaaaaatctcagctgcgttcagacgccgccgagtaagagacactgactgtcaggggtcgccttggcgtgccaaactgctgcctcgtcgttcgtccacccgcgcgcaccggcgctggcgttagtgcttacgccgccccggccccggctacctctctgaaaagtcgccagataccaagaatggggagaacaaacccgtgctgtttttacaagagtaaaatatacgcagaagaagaaaaggtcctgacagggacgacaacatccagcctcagcaaccagtattcagccacgagcgaaagcgtcggccgtcgccggggagcgagcaaaatcgcagacccggactcggttaataataattcagccacgagcgagctcgcgcgcgcttggatcttttttgagtcggtagcgcttttggacctgtttttattttaggcaacgaaatgtgcgcacatgcccaatttgcgtaaccgaacgcatgtgccagatccgtcacgccgaacgtacgtacgtacgttccccggacggctcagttcagcctgcctaacgggccataaattagggaaacggggactacggaatagatattaatcgaactgagccggacagaacgtgccagtgatttaaagcagaggagatccagctatccaagcgaaggaaaaccacgctcgtctcgacgtggcagcctaacaaaccactccgtatatatatcaaaggaggcgctgatatcatgtgtgctgtgtctctcgtctcagcgtcacatcacatcgcgcgtgaggcatcaggggccggcgacggcgaggtggccatccgtccgtcacgaaaaaggggaaggctgctgcaacgcatcggatctccccaccgaagatcgaggatctcggcgttgacatcctagtcgatccagtgatgtccactccagacatgcaatgcaatgcagcctggagcgagcagcggagcacgagcatgtcgcgatagcatagcattcgatcaggcagcaacggcaatgcaaaccgcacggcgccaacggacctgcctacctttgctaacgtcgtaaccaaggacgct

SEQ ID NO: 36805 - DNA, 3141 bp, Zea Mays
gaatgggtcgcaagtcgcaacccacgctggctctctcccggctccgaactgctaagccccccgccggatcgggttgcgggtcgccatccccgacccagatccaccacagctcgccgccggtcgccgccgccgcagagtgggtgatagtgtacgtggtaacatgctggagccaacagcaatggaagtggtcgttgctggctcagtgagcaatgcagtggtgcctgcgcctgtggttcacaacccacgggcacgcaagctgcggtctgcagtttggcaggacttcacgaaggagcgtcgtgccgatggtaactgtgtggctgtctgtaaccactgcaagaagcagctcacggcaactagccggtcaggcacaacgcacctccgcaaccatctcgcaatctgcaccaccacctccacacggcgtgctggtaagcgccggaagcttgttgtgcgccgtattctccacaacaaatcctccatcgatgggcgctcgggtgagggtcacgcctcaggtgaggacaatgataatgagggcacacactttgatcaagaactcagccgccgagaccttgtgcacatgattgtccagcatggctaccggttttcgattgtggatgatgtgggcttccaaaagtttgttaagaacctccagcctcagtttaggatggtgtcgtatgaaacagtgagggctgatagcatggaaatatatgaaggtgagaaacttaagctacatgatgttctctttaagatcccctgcagggttagcatatcagttgacatgtggcggtcaaatacacagatggaatacatgtgcttgacttgccactacattgatcatgccaatgatgagtggaaagtcaggaaaaaaattctcaactttgtgcatatggaggcaccttttacacttgatcagatggttaatatcattgtagagaagttgcatagttggggtattgacagaaagctagctgctgttgtgctagacaactgcagcagcggtgaaattgttgctagagagcttcacagagttttccaggctcggaggcttctattgaatggggatttgttccaagtacgctcttgtgcacatattctaaatctcactgtccaagaaagctgggaacgggcatctgatataactgatagagttcgcaagatgattaactatgtcaagtttgaaaggttccaaaagtttcaggatattgcaaaggtattgcgtatggatcaaaagctgctagttattgattctcctgataactggccgtctacgtacttaatgtttgactctgcatgctactatcaagatgtgtttgtgcgcctgacagaacaggaaggtcattatgatgtttttctgtctgctaatgactgggctgatgtgaaagccctcactgaaatactggacgtagtctatcatgctatggagaagtttcctgtagaaaacccaactgcaaacctctatttcaatgagatgtgtgagatccacgtgcttttgaaaacctggtgcaagagtccatctactgttgttgccaaagttgctggccagatgctttctaagtttgaaggttactgggatctcactaggcctgtaatggcatttgcatctattcttgatccccgttacaagatgaagtccctcgaatacttttttcggctcatttattctgatgagcaatttacagcaaagacaatgatagatgtcatccagaatacctttcacaatctgtataatgattataaacatcagtcatcagactcatggaagaatccatctgttctctgttactctagaaacagtaattcttgcatgggctctgtgtacagcaatggggatgattctaagaccttttcgcgtatcacattatctgatgctcgacggggacttgatcagtatatacaagagacctcatcagggcaatccttgaagtctgacttggagatgtatctcgaggaagcagtttttcgtcaaaaagaaggaaatcaggataattttgacattctgggatggtggaagtcctttgccgccaagtatcctgtactttcacaaatggctcgtgatattttagctatccctgtatctatcatccctttggacagtgaagcccgtacactaaatgagtatctcagtactatggatccttcaacggttcagggattagtgtgtgcacaagattggttacgggatgacccagaagttgttgctggttcaggtggtcatggagatgatggagtaccgcgtggtgacgaacttattgtggtgccaaaataggtgaacacgttggaggctctgcgcttctttcagtttatttccaatataaatttatcttatcccctgttgagcatgagcatgcatgagatattctagcgagaaaaacgttgacacaaaaggctttttacaagaaaagttgaaagaagctggttatgcatacttctttgatgtttgtctgtatgcatggttaataaaagttaaaaagcacaaatcgtgcatttaagatgttaaataatatacgatagctttaaggatcttcagcacttgttagagtgatacttaccttatgtcttaagcagagaatagtactagcaacctggaagtagtatgcattggcagttcaagaaaatgataagttttgccatggagattatatataaactaagttcaatggctgtaatagtatttgtaatgatagaactgtcagtttgtactggatggccattattgatgaaggggacttgcaaaagtgcaaattaccaaaggttttattaggtgtttgaatttggagagagaaaatggtatcagaagatatagcactgttttcttttacctgaagactgtttcggcctttaagaagacgacctagaagatcttatcctgggtccgtgtagacggacatggccaagtccagagacgccaagtcctgagagcaaagaatggcacagaatacacagcgacgcgtacggagcagcccatttggtacgtttgtctgtgctaattatcacatgtgtaatagctgttaataaatcctaccaagggctatatggactaccaaacctacatacatactctataacaaaagaagactttgttcaccgttccttttcgattggctttaatccgtaccggtttctactacttgtacagtgtttttg

SEQ ID NO: 36806 - DNA, 2866 bp, Zea Mays
atccgatccaacccaaaccgctcaacggggctggttccgttttccacacagctcacccgccgcagcggcagcgcccaaagccccaaccgcaaaccacccgtaccagtagtacagtaccgcacgtccgcaccgcacagtcggccagtcgccttcgcctggatcgcatctcggccgtccattagcgtaggcgcggacccgaaacccgccgcaacaaaactaacgactcccgcacgcccgaatgggtcgcaagtcgcaacccacgctggctctctcccggctccgaactgctaagccccccgccggatcgggttgcgggtcgccatccccgacccagatccaccacagctcgccgccggtcgccgccgccgcagagtgggtgatagtgtacgtggtaacatgctggagccaacagcaatggaagtggtcgttgctggctcagtgagcaatgcagtggtgcctgcgcctgtggttcacaacccacgggcacgcaagctgcggtctgcagtttggcaggacttcacgaaggagcgtcgtgccgatggtaactgtgtggctgtctgtaaccactgcaagaagcagctcacggcaactagccggtcaggcacaacgcacctccgcaaccatctcgcaatctgcaccaccacctccacacggcgtgctggtaagcgccggaagcttgttgtgcgccgtattctccacaacaaatcctccatcgatgggcgctcgggtgagggtcacgcctcaggtgaggacaatgataatgagggcacacactttgatcaagaactcagccgccgagaccttgtgcacatgattgtccagcatggctaccggttttcgattgtggatgatgtgggcttccaaaagtttgttaagaacctccagcctcagtttaggatggtgtcgtatgaaacagtgagggctgatagcatggaaatatatgaaggtgagaaacttaagctacatgatgttctctttaagatcccctgcagggttagcatatcagttgacatgtggcggtcaaatacacagatggaatacatgtgcttgacttgccactacattgatcatgccaatgatgagtggaaagtcaggaaaaaaattctcaactttgtgcatatggaggcaccttttacacttgatcagatggttaatatcattgtagagaagttgcatagttggggtattgacagaaagctagctgctgttgtgctagacaactgcagcagcggtgaaattgttgctagagagcttcacagagttttccaggctcggaggcttctattgaatggggatttgttccaagtacgctcttgtgcacatattctaaatctcactgtccaagaaagctgggaacgggcatctgatataactgatagagttcgcaagatgattaactatgtcaagtttgaaaggttccaaaagtttcaggatattgcaaaggtattgcgtatggatcaaaagctgctagttattgattctcctgataactggccgtctacgtacttaatgtttgactctgcatgctactatcaagatgtgtttgtgcgcctgacagaacaggaaggtcattatgatgtttttctgtctgctaatgactgggctgatgtgaaagccctcactgaaatactggacgtagtctatcatgctatggagaagtttcctgtagaaaacccaactgcaaacctctatttcaatgagatgtgtgagatccacgtgcttttgaaaacctggtgcaagagtccatctactgttgttgccaaagttgctggccagatgctttctaagtttgaaggttactgggatctcactaggcctgtaatggcatttgcatctattcttgatccccgttacaagatgaagtccctcgaatacttttttcggctcatttattctgatgagcaatttacagcaaagacaatgatagatgtcatccagaatacctttcacaatctgtataatgattataaacatcagtcatcagactcatggaagaatccatctgttctctgttactctagaaacagtaattcttgcatgggctctgtgtacagcaatggggatgattctaagaccttttcgcgtatcacattatctgatgctcgacggggacttgatcagtatatacaagagacctcatcagggcaatccttgaagtctgacttggagatgtatctcgaggaagcagtttttcgtcaaaaagaaggaaatcaggataattttgacattctgggatggtggaagtcctttgccgccaagtatcctgtactttcacaaatggctcgtgatattttagctatccctgtatctatcatccctttggacagtgaagcccgtacactaaatgagtatctcagtactatggatccttcaacggttcagggattagtgtgtgcacaagattggttacgggatgacccagaagttgttgctggttcaggtggtcatggagatgatggagtaccgcgtggtgacgaacttattgtggtgccaaaatagagagaaaatggtatcagaagatatagcactgttttcttttacctgaagactgtttcggcctttaagaagacgacctagaagatcttatcctgggtccgtgtagacggacatggccaagtccagagacgccaagtcctgagagcaaagaatggcacagaatacacagcgacgcgtacggagcagcccatttggtacgtttgtctgtgctaattatcacatgtgtaatagctgttaataaatcctaccaagggctatatggactaccaaacctacatacatactctataacaaaagaagactttgttcaccgttccttttcgattggctttaatccgtaccggtttctactacttgtacagtgtttttg

SEQ ID NO: 36807 - DNA, 2368 bp, Zea Mays
gaatgggtcgcaagtcgcaacccacgctggctctctcccggctccgaactgctaagccccccgccggatcgggttgcgggtcgccatccccgacccagatccaccacagctcgccgccggtcgccgccgccgcagagtgggtgatagtgtacgtggtaacatgctggagccaacagcaatggaagtggtcgttgctggctcagtgagcaatgcagtggtgcctgcgcctgtggttcacaacccacgggcacgcaagctgcggtctgcagtttggcaggacttcacgaaggagcgtcgtgccgatggtaactgtgtggctgtctgtaaccactgcaagaagcagctcacggcaactagccggtcaggcacaacgcacctccgcaaccatctcgcaatctgcaccaccacctccacacggcgtgctggtaagcgccggaagcttgttgtgcgccgtattctccacaacaaatcctccatcgatgggcgctcgggtgagggtcacgcctcaggtgaggacaatgataatgagggcacacactttgatcaagaactcagccgccgagaccttgtgcacatgattgtccagcatggctaccggttttcgattgtggatgatgtgggcttccaaaagtttgttaagaacctccagcctcagtttaggatggtgtcgtatgaaacagtgagggctgatagcatggaaatatatgaaggtgagaaacttaagctacatgatgttctctttaagatcccctgcagggttagcatatcagttgacatgtggcggtcaaatacacagatggaatacatgtgcttgacttgccactacattgatcatgccaatgatgagtggaaagtcaggaaaaaaattctcaactttgtgcatatggaggcaccttttacacttgatcagatggttaatatcattgtagagaagttgcatagttggggtattgacagaaagctagctgctgttgtgctagacaactgcagcagcggtgaaattgttgctagagagcttcacagagttttccaggctcggaggcttctattgaatggggatttgttccaagtacgctcttgtgcacatattctaaatctcactgtccaagaaagctgggaacgggcatctgatataactgatagagttcgcaagatgattaactatgtcaagtttgaaaggttccaaaagtttcaggatattgcaaaggtattgcgtatggatcaaaagctgctagttattgattctcctgataactggccgtctacgtacttaatgtttgactctgcatgctactatcaagatgtgtttgtgcgcctgacagaacaggaaggtcattatgatgtttttctgtctgctaatgactgggctgatgtgaaagccctcactgaaatactggacgtagtctatcatgctatggagaagtttcctgtagaaaacccaactgcaaacctctatttcaatgagatgtgtgagatccacgtgcttttgaaaacctggtgcaagagtccatctactgttgttgccaaagttgctggccagatgctttctaagtttgaaggttactgggatctcactaggcctgtaatggcatttgcatctattcttgatccccgttacaagatgaagtccctcgaatacttttttcggctcatttattctgatgagcaatttacagcaaagacaatgatagatgtcatccagaatacctttcacaatctgtataatgattataaacatcagtcatcagactcatggaagaatccatctgttctctgttactctagaaacagtaattcttgcatgggctctgtgtacagcaatggggatgattctaagaccttttcgcgtatcacattatctgatgctcgacggggacttgatcagtatatacaagagacctcatcagggcaatccttgaagtctgacttggagatgtatctcgaggaagcagtttttcgtcaaaaagaaggaaatcaggataattttgacattctgggatggtggaagtcctttgccgccaagtatcctgtactttcacaaatggctcgtgatattttagctatccctgtatctatcatccctttggacagtgaagcccgtacactaaatgagtatctcagtactatggatccttcaacggttcagggattagtgtgtgcacaagattggttacgggatgacccagaagttgttgctggttcaggtggtcatggagatgatggagtaccgcgtggtgacgaacttattgtggtgccaaaatagaacccgctgaggcatctgcggaccctcccccgaagggggacgacgaaattagacaaatggtcgaagccatcatggacgaagttgtcaatcagctactaaacgaag

SEQ ID NO: 36808 - DNA, 2771 bp, Zea Mays
gagccgagctggctcgttatccacccctacatggggacagtaagagattgtattgagggtgaaacaaggagataatccaacatttggattcttgatgcctgatcatcatctccacatctacttccgctaccttgttgatcatcctcaactgctgaaagatgacgctgatgctgttggcacaaataaaggtagtactgagagggagcatgcttcatctggtggggctttatcattgcttgggaccacatatgactcaggagatgaggatgaaggcacactcccacgtagttcggaaagcatgaatcctagaaatagcatgacatctgaggccctgatgtgcagggccatgtaaaacctgcatcaattatgcctgacaaagaagaactaggcaaagatcagactgctcctcttcatgcagttaagagtaaaacaatattgatgaagaagaatctgattcttactggccacatcattgttgttcagcgtgaaaaggttaatgacacaattacaacataaattacttccaaatcacataccaattcaggcttaactgaaacaaaagaaatgatccttgaaccaccatctttcatgaaatgcacgatgtagaaaataattgagtttattctgacaaacgggaaggagtttgaagaaaaactgattgagcaagacagaacaactgggaggtttccatttcttatgtcttctaatccatgtcactcgtattatctaaagtttctccaggaaaccgaagagtccaagtcacatggtagaagtcctaaccacaaggacaaaagagattcttgtgaccggaggaacagaagaaatcctgagagtgacgacagaagctctcttgagtgcgctgacaacggttctcgtgagtgtgccgactgaagatgatcaatggagcgcaaaaacagcagttatggcatggtatccaatatccattgcttctgatagaagctcagctgggccatcagagaagcagctgtatgacaagcaagggaacagtagattccatctggttgtggggttaaaactatctccagcagcttatctatccccatacatatatttaaactctattttgcgaacagtgcaaaacaatgtttttgggtaaactataaatagactgctgcaaacggtctaagaaggaacctattcggaaagtcaatgtaaatgaagcggctgctatagtaatggtaatggtggctacttgtggactgggtgctgcaaatgactcacttaacaccatgaaaggaaccaaggacaatgttcgcacccattttagtcatgatccttcttccagctttggatatttctcatcttaacaggatcaagatgcactgtccgaacgcatttcaaatggtgaggctgatgcttcacttacaggtagtggacacaaccccaaagggaacgttttggaattataaattattgatgatgattggattgcaaacactattgcaaaagctgctgctgcagtagcctccaaagaggcagattcttcagaagcttccatgacaaaggagcagaagctgaaagctgagaggcttcgccgtgcaaagatgtttgctgcaatcattaagagtggagacaagaagatgaatgatttagctgtgtttgctgcaatcattaagagtggagacaagaagatgaatgatttagctgcatcatcggatccaactagtgaagctgccaaggcaattcctgatatgaatgtgtctggacttgatcagcaatctgtggctaaggaacgtgaaggtagttctgatccgtttgaacatgagggaccaaacttgacaaatcataataaagactctgatgatgaaccaaacagagtgcggaagtatagaaagaaacatcgagaatcccatgaggaaaaagatgaatcggaggatatctataagcactcgaggaagaggcatcacccagagcattcaagaggccctagcaaggatgttcacaaacataagcacaagagcctcaaggtcgcacagaagtgtccgcgtctggatcaggtgccaagtttgaatcagacaagctgctcgatgacattgcacaatcaactcaggtaacaactgaagtgccgagtgaactgagagcaaaaatcagagcgatgttgctcgagagactgtagtattcaacgttatgtccttaggcctctgatctgtagccaactgctctgtcgatttctgtatttgcttcgaacgctccaactgtgcccattttacttgaaatcagtgacctgcacgccaagttcgttggcctgctccacatgttgaagtttctgctgcacgcataggtttgaacgtcttgaactcttgatgaatcagtggtccgcctgcaggctgcagcgtcatatttctacgggatatttctagcggatttctgcactgatggaataattaatgtggtcttcatgtggaggacagcatctctgttttgtggtgttgaggacagcagcatcaacagtcttttgactgttgtaggacagcaggcagcagcagtctttttgactgtactttagcatctagagtacaacacatgtgtgctgcagtagcatctaaaggataacatatttgtgctgcagtgtgtagtgtggtatgtagtgtagtccctagagctataaataacccttctaaaggtatgttattttgagtagtgtgtgagtaataaatcaaaaattgcttcaactcgtagtgtcatccgagtaagaattccattgcttacaaagacaactattttgttctattatagtgattttagtgtat

SEQ ID NO: 36809 - DNA, 2736 bp, Zea Mays
ttgagaccggctaatcgaaagaaaaaaaaaaacagccgccacggatctcctccgctgagtcattttgtagccgaaaccctagcgctccgccgaggcgccgagcaccaggctccagcctcgcctaagaaaaagccgaggccgagacaaactacttgtactaactcagctgctatgccatggatctggagatcgttgggcggtgtgccttactgttcgacgatgacgcgacaacggaggtcgtcaactccggcggttccttgtcccctgggcggccatcggcgcagcagacctcctcctcgaccgccacgacatccgccacctccttgaccgcgtgccccctcccccgcgtcgcgcctactcagtggccctcctctccacgccctcccccgacggcgtctctgagagtctgagaccgagcccgatcgcgagcgctatctggacgtcccggctggcgacggtgaatacgagggttctggagatgcagccccctcagatgaactaaattattcggacttgtgttatcctcctccattttatgtgccagaaagcttgttgaataagctgagttaatccagcaatacttgtccaaggtgcatatgttcttctaaggattaaatgtctgtttcagatggttggagacttggagcagagatgaagttcctactagtgatgcacattgtttccctgcaatgtatcttgatgtaaggaatataggcagtccaagtcacatggtagaagtcctaaccacaaggacaaaagagattcttgtgaccggaggaacagaagaaatcctgagagtgacgacagaagctctcttgagtgcgctgacaacggttctcgtgagtgtgccgactgaagatgatcaatggagcgcaaaaacagcagttatggcatggtatccaatatccattgcttctgatagaagctcagctgggccatcagagaagcagctgtatgacaagcaagggaacagtagattccatctggttgtggggttaaaactatctccagcagcttatctatccccatacatatatttaaactctattttgcgaacagtgcaaaacaatgtttttgggtaaactataaatagactgctgcaaacggtctaagaaggaacctattcggaaagtcaatgtaaatgaagcggctgctatagtaatggtaatggtggctacttgtggactgggtgctgcaaatgactcacttaacaccatgaaaggaaccaaggacaatgttcgcacccattttagtcatgatccttcttccagctttggatatttctcatcttaacaggatcaagatgcactgtccgaacgcatttcaaatggtgaggctgatgcttcacttacaggtagtggacacaaccccaaagggaacgttttggaattataaattattgatgatgattggattgcaaacactattgcaaaagctgctgctgcagtagcctccaaagaggcagattcttcagaagcttccatgacaaaggagcagaagctgaaagctgagaggcttcgccgtgcaaagatgtttgctgcaatcattaagagtggagacaagaagatgaatgatttagctgtgtttgctgcaatcattaagagtggagacaagaagatgaatgatttagctgcatcatcggatccaactagtgaagctgccaaggcaattcctgatatgaatgtgtctggacttgatcagcaatctgtggctaaggaacgtgaaggtagttctgatccgtttgaacatgagggaccaaacttgacaaatcataataaagactctgatgatgaaccaaacagagtgcggaagtatagaaagaaacatcgagaatcccatgaggaaaaagatgaatcggaggatatctataagcactcgaggaagaggcatcacccagagcattcaagaggccctagcaaggatgttcacaaacataagcacaagagcctcaaggtcgcacagaagtgtccgcgtctggatcaggtgccaagtttgaatcagacaagctgctcgatgacattgcacaatcaactcaggtaacaactgaagtgccgagtgaactgagagcaaaaatcagagcgatgttgctcgagagactgtagtattcaacgttatgtccttaggcctctgatctgtagccaactgctctgtcgatttctgtatttgcttcgaacgctccaactgtgcccattttacttgaaatcagtgacctgcacgccaagttcgttggcctgctccacatgttgaagtttctgctgcacgcataggtttgaacgtcttgaactcttgatgaatcagtggtccgcctgcaggctgcagcgtcatatttctacgggatatttctagcggatttctgcactgatggaataattaatgtggtcttcatgtggaggacagcatctctgttttgtggtgttgaggacagcagcatcaacagtcttttgactgttgtaggacagcaggcagcagcagtctttttgactgtactttagcatctagagtacaacacatgtgtgctgcagtagcatctaaaggataacatatttgtgctgcagtgtgtagtgtggtatgtagtgtagtccctagagctataaataacccttctaaaggtatgttattttgagtagtgtgtgagtaataaatcaaaaattgcttcaactcgtagtgtcatccgagtaagaattccattgcttacaaagacaactattttgttctattatagtgattttagtgtat

SEQ ID NO: 36810 - DNA, 2825 bp, Zea Mays
gtgatttagaggatgttgttggagagaaagtagatatagaagacggaatcttttaaagaagactgtaaaggacgaatatagatgatgtatatagagaatattgctgaagacattcttacgacggatgaaaaatgctatatataggatagcgaacactttagcgtatgttgttgagaccggctaatcgaaagaaaaaaaaaaacagccgccacggatctcctccgctgagtcattttgtagccgaaaccctagcgctccgccgaggcgccgagcaccaggctccagcctcgcctaagaaaaagccgaggccgagacaaactacttgtactaactcagctgctatgccatggatctggagatcgttgggcggtgtgccttactgttcgacgatgacgcgacaacggaggtcgtcaactccggcggttccttgtcccctgggcggccatcggcgcagcagacctcctcctcgaccgccacgacatccgccacctccttgaccgcgtgccccctcccccgcgtcgcgcctactcagtggccctcctctccacgccctcccccgacggcgtctctgagagtctgagaccgagcccgatcgcgagcgctatctggacgtcccggctggcgacggtgaatacgagggttctggagatgcagccccctcagatgaactaaattattcggacttgtgttatcctcctccattttatgtgccagaaagcttgttgaataagctgatggttggagacttggagcagagatgaagttcctactagtgatgcacattgtttccctgcaatgtatcttgattccaagtcacatggtagaagtcctaaccacaaggacaaaagagattcttgtgaccggaggaacagaagaaatcctgagagtgacgacagaagctctcttgagtgcgctgacaacggttctcgtgagtgtgccgactgaagatgatcaatggagcgcaaaaacagcagttatggcatggtatccaatatccattgcttctgatagaagctcagctgggccatcagagaagcagctgtatgacaagcaagggaacagtagattccatctggttgtggggttaaaactatctccagcagcttatctatccccatacatatatttaaactctattttgcgaacagtgcaaaacaatgtttttgggtaaactataaatagactgctgcaaacggtctaagaaggaacctattcggaaagtcaatgtaaatgaagcggctgctatagtaatggtaatggtggctacttgtggactgggtgctgcaaatgactcacttaacaccatgaaaggaaccaaggacaatgttcgcacccattttagtcatgatccttcttccagctttggatatttctcatcttaacaggatcaagatgcactgtccgaacgcatttcaaatggtgaggctgatgcttcacttacaggtagtggacacaaccccaaagggaacgttttggaattataaattattgatgatgattggattgcaaacactattgcaaaagctgctgctgcagtagcctccaaagaggcagattcttcagaagcttccatgacaaaggagcagaagctgaaagctgagaggcttcgccgtgcaaagatgtttgctgcaatcattaagagtggagacaagaagatgaatgatttagctgtgtttgctgcaatcattaagagtggagacaagaagatgaatgatttagctgcatcatcggatccaactagtgaagctgccaaggcaattcctgatatgaatgtgtctggacttgatcagcaatctgtggctaaggaacgtgaaggtagttctgatccgtttgaacatgagggaccaaacttgacaaatcataataaagactctgatgatgaaccaaacagagtgcggaagtatagaaagaaacatcgagaatcccatgaggaaaaagatgaatcggaggatatctataagcactcgaggaagaggcatcacccagagcattcaagaggccctagcaaggatgttcacaaacataagcacaagagcctcaaggtcgcacagaagtgtccgcgtctggatcaggtgccaagtttgaatcagacaagctgctcgatgacattgcacaatcaactcaggtaacaactgaagtgccgagtgaactgagagcaaaaatcagagcgatgttgctcgagagactgtagtattcaacgttatgtccttaggcctctgatctgtagccaactgctctgtcgatttctgtatttgcttcgaacgctccaactgtgcccattttacttgaaatcagtgacctgcacgccaagttcgttggcctgctccacatgttgaagtttctgctgcacgcataggtttgaacgtcttgaactcttgatgaatcagtggtccgcctgcaggctgcagcgtcatatttctacgggatatttctagcggatttctgcactgatggaataattaatgtggtcttcatgtggaggacagcatctctgttttgtggtgttgaggacagcagcatcaacagtcttttgactgttgtaggacagcaggcagcagcagtctttttgactgtactttagcatctagagtacaacacatgtgtgctgcagtagcatctaaaggataacatatttgtgctgcagtgtgtagtgtggtatgtagtgtagtccctagagctataaataacccttctaaaggtatgttattttgagtagtgtgtgagtaataaatcaaaaattgcttcaactcgtagtgtcatccgagtaagaattccattgcttacaaagacaactattttgttctattatagtgattttagtgtat

SEQ ID NO: 36811 - DNA, 2639 bp, Zea Mays
ttgttgtcatcatcagtgattcagcagttctgaacttcgtctacctaggcattgcaacagcggttgtttcctttcttcaggtgtcatgttggacaatgacgggagaaaggcaggcaacgcgcattcgatctctgtacctcaaatctgtcctgagacaagagatagcattcttcgatgtagaaatgacaaccgggcaaatagtttcaaggatgtctggtgataccgtgctagttcaggatgccattggtgagaaggttggcaagttccaacagcttgtggcaaccttcatcggcggtttcgtgatagcattcgtgaaaggatggcttctatctcttgtcatgctggcatgcatccctccagttgtcatcgctggcggaatcgtctcaaaaatgcttgctaaaatatctaccaagggccaagcatcgtacagtgacgcaggcaatattgttgagcagacacttggggctataaaaacagttgtctccttcaacggggagaagcaggctattgcactgtacaataaactcatacacaagtcatacaaagctgctgttgaagaagggatcaccaatggttttggcatgggttctgttttctgcatttttttctcgagctacggtttggccatatggtatggcggaaagttggttcttagtaaaggttactctggaggagatgtcatcaacatcttgtttgctataatgaccggggcaatgtctttaggtaacgcaacaccctgcatggcagcctttgcagaaggacaatccgcggcatacagactgttcacaacgatcaagaggaaaccagagattgacccagacgaccaaaccgcggcactacaatggccatagttggggagagtgggagtggcaagtcaactgtgataagcctcgtggagagattctatgatccacaggctggtgaggttttgattgatggggttaacattaagagtttgcagcttgattggataagagggaagattggtttggttaaccaagagccgttgctctttatgacatctatcaaagataatataacatacgggaaagaggacgcgacgattgaagagatcaaaagggcagctgagcttgctaatgcagcaaatttcatcgataagttgcccaatggctatgacacgatggttggtcagcgtggtgctcagctatcagggggacaaaagcaaaggatcgctatcgcaagagcgatcatcaaaaaccccagaattctcttgttagacgaggctactagcgcactggacgtggagtcggagcggattgttcaggaagcgttgaataggatcatgctggacaggacaacacttgtggttgcacatcgcctgagtactgtgagaaatgctgattgcatatcagttgttcagcaagggaaaatagttgaacaaggtccccacgatgagctggtaatgaaccctgacggtgcttattctcaactcattcgtctccaagaaagcaaagaagaagaggaacagaaaccagagcggcacgtgtctgattcaaggtctaaaagtagaagcctctcactgaaacggtcgataagcagaggttccatggggaacagtagccagcattttttgaccctccccattggcatgcctggctcagttgaattgctggaaggcaacgatgagaattgggaggaggacgagaaagagcaggctcgtgacggtgaccgtgaggccccaaagaaagctccgatgggacggctagccagcctaaacaagccagaggtaccgatacttgtgttagggtcgctagccgctggagtccatggagtgctcttcccgttgtttggcctgatgatctccaacgccatcaagacgttctacgagccgccgcaccagctgaaaaaggacgcgagcttctggggcttgatgtgtgttgtgcttggcatcgtgtcgatactgtcaataccggtggagtatttcttgtttggggtagccggcgggaagcttatcgagcgcatccgtgccctgtcgtttcggagcatcgtgcaccaagaggttgcctggttcgatgatcccaaaaattccagtggagcacttggcgcaaggctgtcggttgatgctctgaatgtgcgacgtctagtgggtgataacttggccttggcagttcaggtcacctcgacgctgatcgcgggattcgtcattgcttttgtggcagattggaagctcacgttgattatcctgtgtgtgatgccactgtcgggtgtgcaaggttatgcacaagtgaagttcttgaagggtttcagccaagacgccaagatactgtacgaagacgcaagccaagtggccaccgacgcagtcagcagtatcaggaccgtagcttctttctgtgctgagaaaagagtgacgacgatttacgatgacaaatgtgaagcctcgaagaaacaaggggtcagaacagggatggttggaggcctcggtttcggcttctcgttcttgatgctgtaccttacatatggactttgtttctatgttggagcgcagttcgttcgtcacaacaagtctacttttggggacgttttcaaggttagaaaaaatgcatcttatcaccagcgttgctctctctctctctctctctctctctctctctctctctctctctctctctctctctcct

SEQ ID NO: 36812 - DNA, 3282 bp, Zea Mays
ggcgacgccgggaagaaggtgccgttcacggggctgttccggtacgccgacggcacggacgtgctgctcatgctcctcggcacggtgggggcgctggccaacggcgtctcgcagcccgtcatgacggtcatcttcggccaggtcatcaacgccttcggcgacgccaccatcgacgacgtcctcaaccgcgttaaccaggcagttctgaacttcgtctacctaggcattgcaacagcggttgtttcctttcttcgtaagtactctctctaagaagactctgttaactttttcaatcttcacattcgcttgcaatctgcaccacaaactggcatggatgccgctgatggttggccatcgttagtataaaataatcttccgtacaatggttaatggtgagataagataagcttaagaaaaagaagctcgcctcatcatataccagcttgcgccaacactagttgacatagcgcagagttcaactttgactttagttctgtacaaaaagcttgtgttcaatatagtggttaggacgacagatccaccatgttttgaatgtccatggacagtatcacatgaaggaagaaacgtacaataaagacattgcttcgttaacaaactgacttagaaaaacttgaaacaggattctacatgcataagccatgtggtaactatatcagtgtagaactgtagataagtgtagccatacttgctgtttatgcagaggtgtcatgttggacaatgacgggagaaaggcaggcaacgcgcattcgatctctgtacctcaaatctgtcctgagacaagagatagcattcttcgatgtagaaatgacaaccgggcaaatagtttcaaggatgtctggtgataccgtgctagttcaggatgccattggtgagaaggttggcaagttccaacagcttgtggcaaccttcatcggcggtttcgtgatagcattcgtgaaaggatggcttctatctcttgtcatgctggcatgcatccctccagttgtcatcgctggcggaatcgtctcaaaaatgcttgctaaaatatctaccaagggccaagcatcgtacagtgacgcaggcaatattgttgagcagacacttggggctataaaaacagttgtctccttcaacggggagaagcaggctattgcactgtacaataaactcatacacaagtcatacaaagctgctgttgaagaagggatcaccaatggttttggcatgggttctgttttctgcatttttttctcgagctacggtttggccatatggtatggcggaaagttggttcttagtaaaggttactctggaggagatgtcatcaacatcttgtttgctataatgaccggggcaatgtctttaggtaacgcaacaccctgcatggcagcctttgcagaaggacaatccgcggcatacagactgttcacaacgatcaagaggaaaccagagattgacccagacgaccaaaccgcggcactacaatggccatagttggggagagtgggagtggcaagtcaactgtgataagcctcgtggagagattctatgatccacaggctggtgaggttttgattgatggggttaacattaagagtttgcagcttgattggataagagggaagattggtttggttaaccaagagccgttgctctttatgacatctatcaaagataatataacatacgggaaagaggacgcgacgattgaagagatcaaaagggcagctgagcttgctaatgcagcaaatttcatcgataagttgcccaatggctatgacacgatggttggtcagcgtggtgctcagctatcagggggacaaaagcaaaggatcgctatcgcaagagcgatcatcaaaaaccccagaattctcttgttagacgaggctactagcgcactggacgtggagtcggagcggattgttcaggaagcgttgaataggatcatgctggacaggacaacacttgtggttgcacatcgcctgagtactgtgagaaatgctgattgcatatcagttgttcagcaagggaaaatagttgaacaaggtccccacgatgagctggtaatgaaccctgacggtgcttattctcaactcattcgtctccaagaaagcaaagaagaagaggaacagaaaccagagcggcacgtgtctgattcaaggtctaaaagtagaagcctctcactgaaacggtcgataagcagaggttccatggggaacagtagccagcattttttgaccctccccattggcatgcctggctcagttgaattgctggaaggcaacgatgagaattgggaggaggacgagaaagagcaggctcgtgacggtgaccgtgaggccccaaagaaagctccgatgggacggctagccagcctaaacaagccagaggtaccgatacttgtgttagggtcgctagccgctggagtccatggagtgctcttcccgttgtttggcctgatgatctccaacgccatcaagacgttctacgagccgccgcaccagctgaaaaaggacgcgagcttctggggcttgatgtgtgttgtgcttggcatcgtgtcgatactgtcaataccggtggagtatttcttgtttggggtagccggcgggaagcttatcgagcgcatccgtgccctgtcgtttcggagcatcgtgcaccaagaggttgcctggttcgatgatcccaaaaattccagtggagcacttggcgcaaggctgtcggttgatgctctgaatgtgcgacgtctagtgggtgataacttggccttggcagttcaggtcacctcgacgctgatcgcgggattcgtcattgcttttgtggcagattggaagctcacgttgattatcctgtgtgtgatgccactgtcgggtgtgcaaggttatgcacaagtgaagttcttgaagggtttcagccaagacgccaagatactgtacgaagacgcaagccaagtggccaccgacgcagtcagcagtatcaggaccgtagcttctttctgtgctgagaaaagagtgacgacgatttacgatgacaaatgtgaagcctcgaagaaacaaggggtcagaacagggatggttggaggcctcggtttcggcttctcgttcttgatgctgtaccttacatatggactttgtttctatgttggagcgcagttcgttcgtcacaacaagtctacttttggggacgttttcaaggttagaaaaaatgcatcttatcaccagcgttgctctctctctctctctctctctctctctctctctctctctctctctctctctctctcct

SEQ ID NO: 36813 - DNA, 2924 bp, Zea Mays
gtacacacccacaaagtcgcaactcgcgagcaatggacgcagcgggaggcgccaaagggagggatggcgtggacaagaaggaagtggggagcgggagcgggaacggcggcggcgacgccgggaagaaggtgccgttcacggggctgttccggtacgccgacggcacggacgtgctgctcatgctcctcggcacggtgggggcgctggccaacggcgtctcgcagcccgtcatgacggtcatcttcggccaggtcatcaacgccttcggcgacgccaccatcgacgacgtcctcaaccgcgttaaccaggcagttctgaacttcgtctacctaggcattgcaacagcggttgtttcctttcttcaggtgtcatgttggacaatgacgggagaaaggcaggcaacgcgcattcgatctctgtacctcaaatctgtcctgagacaagagatagcattcttcgatgtagaaatgacaaccgggcaaatagtttcaaggatgtctggtgataccgtgctagttcaggatgccattggtgagaaggttggcaagttccaacagcttgtggcaaccttcatcggcggtttcgtgatagcattcgtgaaaggatggcttctatctcttgtcatgctggcatgcatccctccagttgtcatcgctggcggaatcgtctcaaaaatgcttgctaaaatatctaccaagggccaagcatcgtacagtgacgcaggcaatattgttgagcagacacttggggctataaaaacagttgtctccttcaacggggagaagcaggctattgcactgtacaataaactcatacacaagtcatacaaagctgctgttgaagaagggatcaccaatggttttggcatgggttctgttttctgcatttttttctcgagctacggtttggccatatggtatggcggaaagttggttcttagtaaaggttactctggaggagatgtcatcaacatcttgtttgctataatgaccggggcaatgtctttaggtaacgcaacaccctgcatggcagcctttgcagaaggacaatccgcggcatacagactgttcacaacgatcaagaggaaaccagagattgacccagacgaccaaaccgcggcactacaatggccatagttggggagagtgggagtggcaagtcaactgtgataagcctcgtggagagattctatgatccacaggctggtgaggttttgattgatggggttaacattaagagtttgcagcttgattggataagagggaagattggtttggttaaccaagagccgttgctctttatgacatctatcaaagataatataacatacgggaaagaggacgcgacgattgaagagatcaaaagggcagctgagcttgctaatgcagcaaatttcatcgataagttgcccaatggctatgacacgatggttggtcagcgtggtgctcagctatcagggggacaaaagcaaaggatcgctatcgcaagagcgatcatcaaaaaccccagaattctcttgttagacgaggctactagcgcactggacgtggagtcggagcggattgttcaggaagcgttgaataggatcatgctggacaggacaacacttgtggttgcacatcgcctgagtactgtgagaaatgctgattgcatatcagttgttcagcaagggaaaatagttgaacaaggtccccacgatgagctggtaatgaaccctgacggtgcttattctcaactcattcgtctccaagaaagcaaagaagaagaggaacagaaaccagagcggcacgtgtctgattcaaggtctaaaagtagaagcctctcactgaaacggtcgataagcagaggttccatggggaacagtagccagcattttttgaccctccccattggcatgcctggctcagttgaattgctggaaggcaacgatgagaattgggaggaggacgagaaagagcaggctcgtgacggtgaccgtgaggccccaaagaaagctccgatgggacggctagccagcctaaacaagccagaggtaccgatacttgtgttagggtcgctagccgctggagtccatggagtgctcttcccgttgtttggcctgatgatctccaacgccatcaagacgttctacgagccgccgcaccagctgaaaaaggacgcgagcttctggggcttgatgtgtgttgtgcttggcatcgtgtcgatactgtcaataccggtggagtatttcttgtttggggtagccggcgggaagcttatcgagcgcatccgtgccctgtcgtttcggagcatcgtgcaccaagaggttgcctggttcgatgatcccaaaaattccagtggagcacttggcgcaaggctgtcggttgatgctctgaatgtgcgacgtctagtgggtgataacttggccttggcagttcaggtcacctcgacgctgatcgcgggattcgtcattgcttttgtggcagattggaagctcacgttgattatcctgtgtgtgatgccactgtcgggtgtgcaaggttatgcacaagtgaagttcttgaagggtttcagccaagacgccaagatactgtacgaagacgcaagccaagtggccaccgacgcagtcagcagtatcaggaccgtagcttctttctgtgctgagaaaagagtgacgacgatttacgatgacaaatgtgaagcctcgaagaaacaaggggtcagaacagggatggttggaggcctcggtttcggcttctcgttcttgatgctgtaccttacatatggactttgtttctatgttggagcgcagttcgttcgtcacaacaagtctacttttggggacgttttcaaggttagaaaaaatgcatcttatcaccagcgttgctctctctctctctctctctctctctctctctctctctctctctctctctctctctcct

SEQ ID NO: 36814 - DNA, 561 bp, Zea Mays
gtactctctccctcccccgtcgttcctccctggctcacccgcgtcctcacagcgaggtcttccaccggcgcccaggccgccaggcgcgaccgcccaggccgccagcgccaggcccgaccgctggccgctgctgcctgctggcttggctgccgcacgcggcacgcccgccgccggcccgtaaaacctcggcaggaaagttggtggctcaagcgcccacacgcctcgttaggatctgcagggagaacatgtgcatcataccagcgtcagcgactcagcgtgccggtctgtgcctgtgcctgtggactgctgcaggaaagctggggtcctacttttatctactacgttgattatgagagatggaaagagaaaggtcctaatcactagcgacgtgtttcatgacactttacaagttctgcacgttactagctcgatcaacaagctctatgttgagttgttgacattactgttgatgggcgaagccagacaagaatattgttggtgtcatcaccgttagagaatgtaatcatctacactacaaagcaatacattatattgttttta

SEQ ID NO: 36815 - DNA, 602 bp, Zea Mays
cagacgtccagtaaagcgtactctctccctcccccgtcgttcctccctggctcacccgcgtcctcacagcgaggtcttccaccggcgcccaggccgccaggcgcgaccgcccaggccgccagcgccaggcccgaccgctggccgctgctgcctgctggcttggctgccgcacgcggcacgcccgccgccggcccgtaaaacctcggcaggaaagttggtggctcaagcgcccacacgcctcgttaggatctgcagggagaacatgtgcatcataccagcgtcagcgactcagcgtgccggtctgtgcctgtgcctgtggactgctgcaggaaagctgggggttaaacaaggatcactgcacatcaacaattctaccagctaaaaggatttatcaatccgactatagcccttcagccataatactgcccgttgtataacttttgtgcaaatgcttccattaatctcgaaatatgtcctacatatattagcatatgttagtgttttgtaacttgagatagtgcatgaatatatagttagagaatgtttgtttaggattataatctatccatattatataacctaacttattttcaattaacaat

SEQ ID NO: 36816 - DNA, 1477 bp, Zea Mays
cttgacgagaaatcatggcataagcaataagcatagcagacaatcgatcttgcgatatgcacaattgtacttcagcagtatcaactaaaatcacgataagccacaatgtgaacagtttttcttggtgcagtactagcccctcttcaatctccagtaagcaaatctctatactaaaacaatgttcgtgtctagatagtggtatcactgcctttcagttttactggtttgttcagggccgttacagttatttgatccagaactgccatcagccccttgagattcattgtgctcgttactggtggatgtgctagtttcagtcttgggatccacctgctcaccaccattggtagacgtttctgaagaaccattcactccactggaagaatctcctcgggagttctctgcttcaaggatctatcagatgagttatccctgtcatcaccagatccaataacagatgatgttgttgcacttccatgttccaatctagtttcaatatggatagcctcactgatgccatgctcagatgaatctgaggtagtggatgttgcatcgccttggttttcactggcatcaagcctgcttatctgtgtttcatagtacaaatggatccatcccctcgctcggttattcggattttataatttcttgacaaaaggcttacttctttccaacttccacctccatttacaaacgagaggagactcatgttcgtcttcctgatatcctacatacctactcctctttttcttcttcttacttttacatatcttggtccatttaatcatacggtattatttactttttgtacggccctccaccttgccaaaagaaggatcttttgattttatccaaggtatatctacacatttgtcttgagaagcaaatagacgaacatatgatacacaggagcattatttaaaggcacaaattaaactgtggtgcaatcgaggaacctcagatctaacgagcgaggacgatattcaagcggcaatccgacctgaatttcaaattactatcaatcttcatgctatatattatccgtctgattggttgatcgcatcatctcgtctacgtcactgcatatatttggactacataaagtaaataataccgtatgattaaatcttcatgaacggtatgtgcaagattattgtatttctagaatttgtatcgactcatgaatttttgggctacatatttcttcaatgtttaaattataacttgtttcttgtgtcatattaaatatcaattatattttttgtttggtttaaattttttttatgttagtcttaatttagtagccccctcttagattaatcctggatctgccactgcctccatcacagccgccctccccttcgccccttgctttctcctcaacgccctcccgttcgccccttgcacccccacacgcagcaagatgaggctgcgcggcaggggcgacgacatcgaagacgacgaggatgagtatgag

SEQ ID NO: 36817 - DNA, 1234 bp, Zea Mays
cggcacgcccgccgccggcccgtaaaacctcggcaggaaagttggtggctcaagcgcccacacgcctcgttaggatctgcagggagaacatgtgcatcataccagcgtcagcgactcagcgtgccggtctgtgcctgtgcctgtggactgctgcaggaaagctgggaggatctatcagatgagttatccctgtcatcaccagatccaataacagatgatgttgttgcacttccatgttccaatctagtttcaatatggatagcctcactgatgccatgctcagatgaatctgaggtagtggatgttgcatcgccttggttttcactggcatcaagcctgcttatctgtgtttcatagtacaaatggatccatcccctcgctcggttattcggattttataatttcttgacaaaaggcttacttctttccaacttccacctccatttacaaacgagaggagactcatgttcgtcttcctgatatcctacatacctactcctctttttcttcttcttacttttacatatcttggtccatttaatcatacggtattatttactttttgtacggccctccaccttgccaaaagaaggatcttttgattttatccaaggtatatctacacatttgtcttgagaagcaaatagacgaacatatgatacacaggagcattatttaaaggcacaaattaaactgtggtgcaatcgaggaacctcagatctaacgagcgaggacgatattcaagcggcaatccgacctgaatttcaaattactatcaatcttcatgctatatattatccgtctgattggttgatcgcatcatctcgtctacgtcactgcatatatttggactacataaagtaaataataccgtatgattaaatcttcatgaacggtatgtgcaagattattgtatttctagaatttgtatcgactcatgaatttttgggctacatatttcttcaatgtttaaattataacttgtttcttgtgtcatattaaatatcaattatattttttgtttggtttaaattttttttatgttagtcttaatttagtagccccctcttagattaatcctggatctgccactgcctccatcacagccgccctccccttcgccccttgctttctcctcaacgccctcccgttcgccccttgcacccccacacgcagcaagatgaggctgcgcggcaggggcgacgacatcgaagacgacgaggatgagtatgag

SEQ ID NO: 36818 - DNA, 643 bp, Zea Mays
cctgctacaaccgataatgcaagtacccaagttgacaatggcttaccagtagttggatcttgcaagttggtcccagtgccatattccgcaggactactccgcctaacaactagagggaatgcggggtaaccttcttctctggatggaagcatttcgatttgttgctgtgctgagatcgcattgtcggctatggatatacagtacaggtcgcacttactgaaagcttctgaagccgaaaaatcttgaccggatgagcttggttgccgaccatatccaggtcatccctctgcgtgcatttgcatagagaaggctgcaggcctgcagcctagatatttcacgagcacttcataattttcaatgccatccaatgcttcaagctttctgacatgagtgtgcagatgatgaaaaactccaagatgggtctctgtacctactatacaacaagaagaatccatgtactaaatgagaatgcgagattgttaatttgttattatatgctccttgataatttttttctggttctattttgtttcctgaaccttgcataccgcatgtattatgttactagaaatagaacgtctatcagcacagcagacagcagctccctttcactggatttgatgtcgcctaagactgtctacag

SEQ ID NO: 36819 - DNA, 1458 bp, Zea Mays
cgacgagggtgcgctgcttgctgggagcctgggagtgtgcaggagatggccttcgccgtcacgctcacgccgcttcgggcaactgctgtccttgccggatggaggcggcgcccaggggtgactcctccgcggttcgccgtagtcctggcgacgtctaccggagtcggcggcgaacggaccccgccgacgttcaggcgcctaagggaggagctcctccagctccacgccgaagccgacctcacccaatccaaaggtaatttcgatgaagcaaaacatgttaattgagtatgccttgcgtccagagacatctaatggtgaagactctgatgacaagataagggttttctccagtacagtcaatgttggaaccaatggagctgggagtagcgattcacacccaaaatcagttgaaaaggaatcttttgagttgagaaatgaggcacatgcaattgcaagcatggctgacgacgctgagcaaagtgcacttcagatgtctgatagcttctcatttttgaacaatagtgacccagcaaactacataaagaatcattcagcatacgatgaccttatagagcatattaatttgcagatgaaatcattggaatatgaaattgaacagttcatcaattcccaatcagttgaagaggtgggcagtgagaagcagagaagtgacaagtggcaaaggttatctgacatacagatgcttataaaggaaactagagaaaagattgcgaggattttgggtatgatagtagaagagactgaatctgggacttaagatgatagcaaactacaaaacagtgaattagtgtcatccatccaccatctttttcgtgggtacccaagttgacaatggcttaccagtagttggatcttgcaagttggtcccagtgccatattccgcaggactactccgcctaacaactagagggaatgcggggtaaccttcttctctggatggaagcatttcgatttgttgctgtgctgagatcgcattgtcggctatggatatacagtacaggtcgcacttactgaaagcttctgaagccgaaaaatcttgaccggatgagcttggttgccgaccatatccaggtcatccctctgcgtgcatttgcatagagaaggctgcaggcctgcagcctagatatttcacgagcacttcataattttcaatgccatccaatgcttcaagctttctgacatgagtgtgcagatgatgaaaaactccaagatgggtctctgtacctactatacaacaagaagaatccatgtactaaatgagaatgcgagattgttaatttgttattatatgctccttgataatttttttctggttctattttgtttcctgaaccttgcataccgcatgtattatgttactagaaatagaacgtctatcagcacagcagacagcagctccctttcactggatttgatgtcgcctaagactgtctacag

SEQ ID NO: 36820 - DNA, 2149 bp, Zea Mays
cgacgagggtgcgctgcttgctgggagcctgggagtgtgcaggagatggccttcgccgtcacgctcacgccgcttcgggcaactgctgtccttgccggatggaggcggcgcccaggggtgactcctccgcggttcgccgtagtcctggcgacgtctaccggagtcggcggcgaacggaccccgccgacgttcaggcgcctaagggaggagctcctccagctccacgccgaagccgacctcacccaatccaaagcaaatagcgagagggtaagacttgtgcggttgactgaggcggctgagaatcttaagaagcgagctgcaaccagtgtccgaatgggcaaagagagcgaggctgtggatttacttgtgcagaagaagaaattgaccaaagccctagagaacattaaagagcgcattgaggtgcttgacatgctttcggcaaagattagtgaggtgaatggcatggttttttatcttgtaaaatgtgactaatttatttttctagaatgttgtgtattcgttagcttcattccagttactaaattactgaacaagccattgtttgcatttgtgtaagataatttgttgctcccttttgaacttttgctgcagcacagaattggtattttggtcagctcttgctgtccatctatagtactgtagaggtatgtgaataggccatccttctagtggcatacatcagccatgtagtagtagttgggtgctgagctaagtcatgtagtagtgtaccatagaggcgctagatttgtatatatactagccgattactaggcgatgcaatagagcaaggcagttcatttgctgcacattcagacttgtgctatgtgtgtgctctgttctcaagtgttcttcttctacctctaaccgtgagttgtgagagtgagtttgtgagctgattgctcacctctgcaggtgcctgggttgccaacaatttgtatgttacactcactgttcatgcagtgattcttctgatcacaatctgaaattgacaagtatttgcttcaactatggataagtgcagtactcgggaacttattgttgtgaatttctgttcttaaatcttatggtatatgcaaccctgaatgaccaattttgttggattcaggtaatttcgatgaagcaaaacatgttaattgagtatgccttgcgtccagagacatctaatggtgaagactctgatgacaagataagggttttctccagtacagtcaatgttggaaccaatggagctgggagtagcgattcacacccaaaatcagttgaaaaggaatcttttgagttgagaaatgaggcacatgcaattgcaagcatggctgacgacgctgagcaaaatgaaatcattggaatatgaaattgaacagttcatcaattcccaatcagttgaagaggtgggcagtgagaagcagagaagtgacaagtggcaaaggttatctgacatacagatgcttataaaggaaactagagaaaagattgcgaggattttgggtatgatagtagaagagactgaatctgggacttaagatgatagcaaactacaaaacagtgaattagtgtcatccatccaccatctttttcgtgggtaggtacccaagttgacaatggcttaccagtagttggatcttgcaagttggtcccagtgccatattccgcaggactactccgcctaacaactagagggaatgcgggtacaggtcgcacttactgaaagcttctgaagccgaaaaatcttgaccggatgagcttggttgccgaccatatccaggtcatccctctgcgtgcatttgcatagagaaggctgcaggcctgcagcctagatatttcacgagcacttcataattttcaatgccatccaatgcttcaagctttctgacatgagtgtgcagatgatgaaaaactccaagatgggtctctgtacctactatacaacaagaagaatccatgtactaaatgagaatgcgagattgttaatttgttattatatgctccttgataatttttttctggttctattttgtttcctgaaccttgcataccgcatgtattatgttactagaaatagaacgtctatcagcacagcagacagcagctccctttcactggatttgatgtcgcctaagactgtctacag

SEQ ID NO: 36821 - DNA, 1395 bp, Zea Mays
ggcctctgccgacgagggtgcgctgcttgctgggagcctgggagtgtgcaggagatggccttcgccgtcacgctcacgccgcttcgggcaactgctgtccttgccggatggaggcggcgcccaggggtgactcctccgcggttcgccgtagtcctggcgacgtctaccggagtcggcggcgaacggaccccgccgacgttcaggcgcctaagggaggagctcctccagctccacgccgaagccgacctcacccaatccaaaggtaatttcgatgaagcaaaacatgttaattgagtatgccttgcgtccagagacatctaatggtgaagactctgatgacaagataagggttttctccagtacagtcaatgttggaaccaatggagctgggagtagcgattcacacccaaaatcagttgaaaaggaatcttttgagttgagaaatgaggcacatgcaattgcaagcatggctgacgacgctgagcaaagtgcacttcagatgtctgatagcttctcatttttgaacaatagtgacccagcaaactacataaagaatcattcagcatacgatgaccttatagagcatattaatttgcagatgaaatcattggaatatgaaattgaacagttcatcaattcccaatcagttgaagaggtgggcagtgagaagcagagaagtgacaagtggcaaaggttatctgacatacagatgcttataaaggaaactagagaaaagattgcgaggattttgggtatgatagtagaagagactgaatctgggacttaagatgatagcaaactacaaaacagtgaattagtgtcatccatccaccatctttttcgtgggtaggtacccaagttgacaatggcttaccagtagttggatcttgcaagttggtcccagtgccatattccgcaggactactccgcctaacaactagagggaatgcgggtacaggtcgcacttactgaaagcttctgaagccgaaaaatcttgaccggatgagcttggttgccgaccatatccaggtcatccctctgcgtgcatttgcatagagaaggctgcaggcctgcagcctagatatttcacgagcacttcataattttcaatgccatccaatgcttcaagctttctgacatgagtgtgcagatgatgaaaaactccaagatgggtctctgtacctactatacaacaagaagaatccatgtactaaatgagaatgcgagattgttaatttgttattatatgctccttgataatttttttctggttctattttgtttcctgaaccttgcataccgcatgtattatgttactagaaatagaacgtctatcagcacagcagacagcagctccctttcactggatttgatgtcgcctaagactgtctacag

SEQ ID NO: 36822 - DNA, 1486 bp, Zea Mays
aggcctctgccgacgagggtgcgctgcttgctgggagcctgggagtgtgcaggagatggccttcgccgtcacgctcacgccgcttcgggcaactgctgtccttgccggatggaggcggcgcccaggggtgactcctccgcggttcgccgtagtcctggcgacgtctaccggagtcggcggcgaacggaccccgccgacgttcaggcgcctaagggaggagctcctccagctccacgccgaagccgacctcacccaatccaaagcaaatagcgagagggtaagacttgtgcggttgactgaggcggctgagaatcttaagaagcgagctgcaaccagtgtccgaatgggcaaagagagcgaggctgtggatttacttgtgcagaagaagaaattgaccaaagccctagagaacattaaagagcgcattgaggtgcttgacatgctttcggcaaagattagtgaggtaatttcgatgaagcaaaacatgttaattgagtatgccttgcgtccagagacatctaatggtgaagactctgatgacaagataagggttttctccagtacagtcaatgttggaaccaatggagctgggagtagcgattcacacccaaaatcagttgaaaaggaatcttttgagttgagaaatgaggcacatgcaattgcaagcatggctgacgacgctgagcaaaatgaaatcattggaatatgaaattgaacagttcatcaattcccaatcagttgaagaggtgggcagtgagaagcagagaagtgacaagtggcaaaggttatctgacatacagatgcttataaaggaaactagagaaaagattgcgaggattttgggtatgatagtagaagagactgaatctgggacttaagatgatagcaaactacaaaacagtgaattagtgtcatccatccaccatctttttcgtgggtaggtacccaagttgacaatggcttaccagtagttggatcttgcaagttggtcccagtgccatattccgcaggactactccgcctaacaactagagggaatgcgggtacaggtcgcacttactgaaagcttctgaagccgaaaaatcttgaccggatgagcttggttgccgaccatatccaggtcatccctctgcgtgcatttgcatagagaaggctgcaggcctgcagcctagatatttcacgagcacttcataattttcaatgccatccaatgcttcaagctttctgacatgagtgtgcagatgatgaaaaactccaagatgggtctctgtacctactatacaacaagaagaatccatgtactaaatgagaatgcgagattgttaatttgttattatatgctccttgataatttttttctggttctattttgtttcctgaaccttgcataccgcatgtattatgttactagaaatagaacgtctatcagcacagcagacagcagctccctttcactggatttgatgtcgcctaagactgtctacag

SEQ ID NO: 36823 - DNA, 1609 bp, Zea Mays
cggcgcggcccggtccaccgcggcgggaggagtagagtaggcctctgccgacgagggtgcgctgcttgctgggagcctgggagtgtgcaggagatggccttcgccgtcacgctcacgccgcttcgggcaactgctgtccttgccggatggaggcggcgcccaggggtgactcctccgcggttcgccgtagtcctggcgacgtctaccggagtcggcggcgaacggaccccgccgacgttcaggcgcctaagggaggagctcctccagctccacgccgaagccgacctcacccaatccaaagcaaatagcgagagggtaagacttgtgcggttgactgaggcggctgagaatcttaagaagcgagctgcaaccagtgtccgaatgggcaaagagagcgaggctgtggatttacttgtgcagaagaagaaattgaccaaagccctagagaacattaaagagcgcattgaggtgcttgacatgctttcggcaaagattagtgaggtaatttcgatgaagcaaaacatgttaattgagtatgccttgcgtccagagacatctaatggtgaagactctgatgacaagataagggttttctccagtacagtcaatgttggaaccaatggagctgggagtagcgattcacacccaaaatcagttgaaaaggaatcttttgagttgagaaatgaggcacatgcaattgcaagcatggctgacgacgctgagcaaagtgcacttcagatatgaaatcattggaatatgaaattgaacagttcatcaattcccaatcagttgaagaggtgggcagtgagaagcagagaagtgacaagtggcaaaggttatctgacatacagatgcttataaaggaaactagagaaaagattgcgaggattttgggtatgatagtagaagagactgaatctgggacttaagatgatagcaaactacaaaacagtgaattagtgtcatccatccaccatctttttcgtgggtacccaagttgacaatggcttaccagtagttggatcttgcaagttggtcccagtgccatattccgcaggactactccgcctaacaactagagggaatgcggggtaaccttcttctctggatggaagcatttcgatttgttgctgtgctgagatcgcattgtcggctatggatatacagtacaggtcgcacttactgaaagcttctgaagccgaaaaatcttgaccggatgagcttggttgccgaccatatccaggtcatccctctgcgtgcatttgcatagagaaggctgcaggcctgcagcctagatatttcacgagcacttcataattttcaatgccatccaatgcttcaagctttctgacatgagtgtgcagatgatgaaaaactccaagatgggtctctgtacctactatacaacaagaagaatccatgtactaaatgagaatgcgagattgttaatttgttattatatgctccttgataatttttttctggttctattttgtttcctgaaccttgcataccgcatgtattatgttactagaaatagaacgtctatcagcacagcagacagcagctccctttcactggatttgatgtcgcctaagactgtctacag

SEQ ID NO: 36824 - DNA, 1553 bp, Zea Mays
ctgcgtgcactgcatccggcgcggcccggtccaccgcggcgggaggagtagagtaggcctctgccgacgagggtgcgctgcttgctgggagcctgggagtgtgcaggagatggccttcgccgtcacgctcacgccgcttcgggcaactgctgtccttgccggatggaggcggcgcccaggggtgactcctccgcggttcgccgtagtcctggcgacgtctaccggagtcggcggcgaacggaccccgccgacgttcaggcgcctaagggaggagctcctccagctccacgccgaagccgacctcacccaatccaaagcaaatagcgagagggtaagacttgtgcggttgactgaggcggctgagaatcttaagaagcgagctgcaaccagtgtccgaatgggcaaagagagcgaggctgtggatttacttgtgcagaagaagaaattgaccaaagccctagagaacattaaagagcgcattgaggtgcttgacatgctttcggcaaagattagtgaggtaatttcgatgaagcaaaacatgttaattgagtatgccttgcgtccagagacatctaatggtgaagactctgatgacaagataagggttttctccagtacagtcaatgttggaaccaatggagctgggagtagcgattcacacccaaaatcagttgaaaaggaatcttttgagttgagaaatgaggcacatgcaattgcaagcatggctgacgacgctgagcaaagtgcacttcagatatgaaatcattggaatatgaaattgaacagttcatcaattcccaatcagttgaagaggtgggcagtgagaagcagagaagtgacaagtggcaaaggttatctgacatacagatgcttataaaggaaactagagaaaagattgcgaggattttgggtatgatagtagaagagactgaatctgggacttaagatgatagcaaactacaaaacagtgaattagtgtcatccatccaccatctttttcgtgggtaggtacccaagttgacaatggcttaccagtagttggatcttgcaagttggtcccagtgccatattccgcaggactactccgcctaacaactagagggaatgcgggtacaggtcgcacttactgaaagcttctgaagccgaaaaatcttgaccggatgagcttggttgccgaccatatccaggtcatccctctgcgtgcatttgcatagagaaggctgcaggcctgcagcctagatatttcacgagcacttcataattttcaatgccatccaatgcttcaagctttctgacatgagtgtgcagatgatgaaaaactccaagatgggtctctgtacctactatacaacaagaagaatccatgtactaaatgagaatgcgagattgttaatttgttattatatgctccttgataatttttttctggttctattttgtttcctgaaccttgcataccgcatgtattatgttactagaaatagaacgtctatcagcacagcagacagcagctccctttcactggatttgatgtcgcctaagactgtctacag

SEQ ID NO: 36825 - DNA, 1042 bp, Zea Mays
ctgcatccggcgcggcccggtccaccgcggcgggaggagtagagtaggcctctgccgacgagggtgcgctgcttgctgggagcctgggagtgtgcaggagatggccttcgccgtcacgctcacgccgcttcgggcaactgctgtccttgccggatggaggcggcgcccaggggtgactcctccgcggttcgccgtagtcctggcgacgtctaccggagtcggcggcgaacggaccccgccgacgttcaggcgcctaagggaggagctcctccagctccacgccgaagccgacctcacccaatccaaagcaaatagcgagagggtaagacttgtgcggttgactgaggcggctgagaatcttaagaagcgagctgcaaccagtgtccgaatgggcaaagagagcgaggctgtggatttacttgtgcagaagaagaaattgaccaaagccctagagaacattaaagagcgcattgaggtgcttgacatgctttcggcaaagattagtgaggtaatttcgatgaagcaaaacatgttaattgagtatgccttgcgtccagagacatctaatggtgaagactctgatgacaagataagggttttctccagtacagtcaatgttggaaccaatggagctgggagtagcgattcacacccaaaatcagttgaaaaggaatcttttgagttgagaaatgaggcacatgcaattgcaagcatggctgacgacgctgagcaaagtgcacttcagatatgaaatcattggaatatgaaattgaacagttcatcaattcccaatcagttgaagaggtgggcagtgagaagcagagaagtgacaagtggcaaaggttatctgacatacagatgcttataaaggaaactagagaaaagattgcgaggattttgggtatgatagtagaagagactgaatctgggacttaagatgatagcaaactacaaaacagtgaattagtgtcatccatccaccatctttttcgtgggtctccaacaagtggctcgttgtccattttcttcttgaggatccatt

SEQ ID NO: 36826 - DNA, 5206 bp, Zea Mays
aagggtctttcatgtctacaacataaaaactcgacctgcagggataagacaaccctcgagtattgtattaagaaaaatactttctcacacctcccccgaacctctacccttcccatacatagcggcatcgaagcccatgtgagaacgaccgcaaccgatgccgggccttaggcctgtgctttagcgtgggacagacgaccacctaaccaacttaagaaaaaagccttatgtacaacactaaaaaacttgacttctcatgttaaggtagggaagtacatacagcttttgacaaccttcgtcggtggctttatcatcggattcattagaggctggatgctggcccttgttatgctcgcgtgcatacctccaagcattttatcctttgcaacagtctcccggttgcgagctcaaatatctcgaaagaggcaagaatcatatgaagatgcagggaatattgtcgagcaaaccattggagcaataagaacagtgggtgattctaacattttctaaatacaaattaatgctgacaatagtttttttttgcaactattcaatatcaataacatctcaaaacaggttgtatctttcaatggagagaagaaagcaattgcaatgtacaacaatcacataaaaaaggcatacaaggctacaatcatggaagggatcatcactggtcttggagtaggctccatattttttgttgtcttcagcagttactctctagctttctggtatggtgccaagttaatcatcagcaaaggatatactggagggcaggtcatcaatatcgtatttgcaatcttagttggctcaatgtgagttttgtaactgtgaactacatatgaaataaatggtagtagaaaagtactcttagactctttgattgaaactgaatcggtattcgataatttttttctcgaacacgcaggagagctgcataaaattatattaagagaggaaaggtccaaaatggaccgaaatacaattattcgataaaaattaacctaaccatttttagattttgacattaaggtttgattatttgggaacagggctataggtactgcatcaccatctatttctgcaattgcagaagggcagtctgcagcacaaagattgtttgagattatcaacagaaaaccaaatattgacattaacgacacttccggaatagtattagaagatatcgagggagatgttgagctcaaggatgtgttctttaggtaccctgcaaggcctgagcagttgatacttgatggcctgtgcctgcaagtacctagtggtactacaatggctatagttggggagagcggaagtggtaaatccacagtgattagtatggtggagagattttatgacccacaggctggtgaagtgttggtagatggagtcaacatcaaaagtctgcaactccaatggttaagaggaaagataagtcttgtcagccaagaaccattgctttttatgacctccatcaaggataacataacctatggtaaagcggatgctacaattgaagagatcaagagagcagctgagcttgcaaatgcagcaaccttcattgaaaagctgcctgacgcatatgagacaacggtaggtcagcatggttctcagctttctggggggcaaaagcaaaggattgccatcgcaagagcaatcctcaaaaatcccaaaattcttcttttggacgaagccacaagtgctttagatgtagagtctgaaagggtagttcaagaagcactaaataggataatggtagggagaactacactcattgttgctcaccgcttgagcaccatcaggagcgcagactgcatagcagtagttcatcaagggaaagtagttgaacgaggtgtccatgacaagctaattaaggaccctgatggagcttattctcagcttattaggttacaacaggcacatgctacagaaaggcatgaggttccagatactgacgtgtcaggttcaatctataaaagtagaagtttacctttggaacaatcaacaggcagagattctcccaggaacaaaggacatcattccttcacaaaaaccactgggctgtctaaagaattgaacaggcaagattttacagacagacaggaagaccaggaacatggtaatagcaaggctcctaagaaagcaccaattggacgactattcaaacttaataagccagaagcaccagttctcctattagctgctatagttgcctttgtgcatggtcttctgttcccctcgttcagtataatgatgtctggtggtataagaactttctactatccaccacaccaacttcgaaaagattctcggttttgggcactgacgtgccttctgtttgcagtcattgccctgatttcaatccaactggaatactttctgtttggggttgctggtgggaaacttatacaacgtgtccgctctttgtctttccagagcatagtacatcaagaagttgcttggtttgatgagccttcaaattctagtggggcccttggcgcgagactctatattgatgctttgaacatccgacgccttgtcggagataacttggccatactagtgcagtgtatagtaacaatagcggctggtttttccatagcatttgcttctgactggaaactcacgctgatcgtcatatgtgtgattcccgtaatgggctcacaaaattatattcaagtgaaattcttgaaagggttcagtgaagatgctaaggtgatgtatgaagatgcaagtcaagtcgtaaccgaggcaattggtagtattcaaacagtagcatctttctgtgcagagaagagggtaattacatcatacatccaaaaatgccaagcttcaatgaaacatggcattagaagtggaatggttggaggccttggtttcagtttatcaaacttaattatgtatctcacatatgctctttgtttctatgttggtgcactgttcgtacacgaaggaaaaacaacttttaaagacgtttttagggtctattttgctctgattttcacagcttttggagtttcccaaacaagtgcaacggcaacagattcaacaaaagcccaggaatccacaatttcaatactaactattatagacaggagatctaaaatcaactcgactagtgatgaaggcgtgattatagaaaaagttgatggcaacatagatttcaggcatgtaagcttcaaatacccatcccgcccagacgtccaagtgctcagcaactttactttggccattccagcaagaaaggtactgcttgcttgatgcttgtcatcgttaattcataagttgtttgactggaggtggagggggtagttagttattcattgatcattgggagaaacaggggatgggaacttgggtggttgatcttgctaggttagtaccaagttagaccatgctagacacttcacaaaagcgttatggcaattcttgggcagcttaaataatagaaaattatcagatattggctacaaatacagtaactgtttgctacttttctcaggtaatcagtgctcattgctcaattcatcttaccttaacataagtttcagaaaagttgtgtacaggtggtacgaaattcattcagccttctgcaaaattttaagttcaaactccattttcagaaggagtagaaaaggcagacaatatgagatgaaagtaacaaaaaaaagatttactatgaattaagggtttttcccatgctatttttatctctttagaaagctcaattgcccgcaatacctgctttatactctaattgaaagtaagagctcatgtcatttgtgttcaaaaaggctggatagggtcaatcaaaatgagcctgaaaaagaatcaaaattagttcttgttttcacattttcctttatgttttgtactgatgaacttaaaactaaatttcatatgcagactgttgcacttgttggagagagtggtagtggtaagtcaacaataatttctttgctcgagagattctacgatccagattctggtacaatctcactggatggaacagaacttaaaaaactaaagctgagttggttaagagaccaaacgggcttagtgagccaagaacctgtacttttcaacaacacaattcgcacaaacatagcatatggaaaacaaggagaagtaagagaggatgagatcgttgctgcggccaaggcagcaaatgctcatgagttcatatctagcttgcctcagggatatagcactattgtcggcgagaggggaacacagctctctggaggacaaaaacaacgggttgctattgcaagggccatcttgaaggacccaaaaatacttctactcgacgaggcaacaagtgctctggatgctgaaggagagcacattgttcaagatgcactggaccaagtgatggttagcaggaccaccattgttgtggcgcaccgactgtccacaattaaaggggcagatatgatcgtagtcatgaaagatggtgaagttgctgagaaggggaagcatgaataccttgtgggaaagggtggagtttatgcatcgctggtagaactacactccaagtcagcataaggatatatgggaacttcgatggattatttggtattacaaggagagcatttgcagtaggaggtagtcatgcaacgaaaacaaatccatgtgaaacttgtcaattcatacttctggtttgttattatagggcagtgagtcttatcctaaactccatgccgacaaagatagcattggcatcaccgtatttcatatgctgcagtgcacttgattatcaataaattaatggtaaaaaggagaacaaatcaacctaatcactgagctgttattatttagtcgacgagcagaagcatttctgcgattccagagcacaagactacatgacaaatacactacaactttgcacgcattggaaagggcgagttcggatcaaatgcagctacccgtcagcgaattggttcaaaccaaaaagttcaggcgtatccagaacttaaaccggcgtacctttcgtgcgccgaggtcccctttggtcgtcatgatccaaccgacgctagcctagacttgacgttacgacggtaacggtgcccactggcgcggccaccatatctggctgctcgcttcctttccgctccccaccagcgaagacacgccgccgccgttccatagctacgccgccgcgccgcgtgcttttcccattctaccgtccgaaaacaaaatcaac

SEQ ID NO: 36827 - DNA, 6286 bp, Zea Mays
atggctgggggagcgagacacggtagcgaggacgatgccgagacgacgacgacgaacgagggacgccgcagcagcgaccacgcagccggggccacgaccaactattcggagcacaagcagctggtgccgttccttgacatgctcaagtatgccgaccgcacggacgccgcgcttatggcggtcggcacggtggccgcggtggccaacggcatgacggagccgctcatgaccgtcgtcttcgcggccgtcatcgagtgcttcggcgccggagacgacgccaccatcctccaccgggtcagcaaggtgaaggcttgcgggcactcgcgcttgaagaactccgaaacttggagcctttgtatatacaatccagacatgctaataattcttccggtgaagttatcatgtactacatctacctgggaattggaactgcagtttcttcctttctccgtgtcatgctggacggtggctggagaaaggcagtcaacacggttgcggtcattataccttgaagctgtgctgaggcaagacattgcattctttgacgtggagatgacaactgcagaagcagcctcaagaatgtctgcggacactgtactcatccaagacgccctcggtgagaaggtaacagttcattattgttttgacaaaagaaacaaaagtatgcctagtttccattaaagggtctttcatgtctacaacataaaaactcgacctgcagggataagacaaccctcgagtattgtattaagaaaaatactttctcacacctcccccgaacctctacccttcccatacatagcggcatcgaagcccatgtgagaacgaccgcaaccgatgccgggccttaggcctgtgctttagcgtgggacagacgaccacctaaccaacttaagaaaaaagccttatgtacaacactaaaaaacttgacttctcatgttaaggtagggaagtacatacagcttttgacaaccttcgtcggtggctttatcatcggattcattagaggctggatgctggcccttgttatgctcgcgtgcatacctccaagcattttatcctttgcaacagtctcccggttgcgagctcaaatatctcgaaagaggcaagaatcatatgaagatgcagggaatattgtcgagcaaaccattggagcaataagaacagtgggtgattctaacattttctaaatacaaattaatgctgacaatagtttttttttgcaactattcaatatcaataacatctcaaaacaggttgtatctttcaatggagagaagaaagcaattgcaatgtacaacaatcacataaaaaaggcatacaaggctacaatcatggaagggatcatcactggtcttggagtaggctccatattttttgttgtcttcagcagttactctctagctttctggtatggtgccaagttaatcatcagcaaaggatatactggagggcaggtcatcaatatcgtatttgcaatcttagttggctcaatgtgagttttgtaactgtgaactacatatgaaataaatggtagtagaaaagtactcttagactctttgattgaaactgaatcggtattcgataatttttttctcgaacacgcaggagagctgcataaaattatattaagagaggaaaggtccaaaatggaccgaaatacaattattcgataaaaattaacctaaccatttttagattttgacattaaggtttgattatttgggaacagggctataggtactgcatcaccatctatttctgcaattgcagaagggcagtctgcagcacaaagattgtttgagattatcaacagaaaaccaaatattgacattaacgacacttccggaatagtattagaagatatcgagggagatgttgagctcaaggatgtgttctttaggtaccctgcaaggcctgagcagttgatacttgatggcctgtgcctgcaagtacctagtggtactacaatggctatagttggggagagcggaagtggtaaatccacagtgattagtatggtggagagattttatgacccacaggctggtgaagtgttggtagatggagtcaacatcaaaagtctgcaactccaatggttaagaggaaagataagtcttgtcagccaagaaccattgctttttatgacctccatcaaggataacataacctatggtaaagcggatgctacaattgaagagatcaagagagcagctgagcttgcaaatgcagcaaccttcattgaaaagctgcctgacgcatatgagacaacggtaggtcagcatggttctcagctttctggggggcaaaagcaaaggattgccatcgcaagagcaatcctcaaaaatcccaaaattcttcttttggacgaagccacaagtgctttagatgtagagtctgaaagggtagttcaagaagcactaaataggataatggtagggagaactacactcattgttgctcaccgcttgagcaccatcaggagcgcagactgcatagcagtagttcatcaagggaaagtagttgaacgaggtgtccatgacaagctaattaaggaccctgatggagcttattctcagcttattaggttacaacaggcacatgctacagaaaggcatgaggttccagatactgacgtgtcaggttcaatctataaaagtagaagtttacctttggaacaatcaacaggcagagattctcccaggaacaaaggacatcattccttcacaaaaaccactgggctgtctaaagaattgaacaggcaagattttacagacagacaggaagaccaggaacatggtaatagcaaggctcctaagaaagcaccaattggacgactattcaaacttaataagccagaagcaccagttctcctattagctgctatagttgcctttgtgcatggtcttctgttcccctcgttcagtataatgatgtctggtggtataagaactttctactatccaccacaccaacttcgaaaagattctcggttttgggcactgacgtgccttctgtttgcagtcattgccctgatttcaatccaactggaatactttctgtttggggttgctggtgggaaacttatacaacgtgtccgctctttgtctttccagagcatagtacatcaagaagttgcttggtttgatgagccttcaaattctaggttttgctacttaaacatttttatcccaaatttcttacatttttctacaactgtttggacattattttagtatttttactgtttcattttgaagtggggcccttggcgcgagactctatattgatgctttgaacatccgacgccttgtcggagataacttggccatactagtgcagtgtatagtaacaatagcggctggtttttccatagcatttgcttctgactggaaactcacgctgatcgtcatatgtgtgattcccgtaatgggctcacaaaattatattcaagtgaaattcttgaaagggttcagtgaagatgctaaggtgaaaatattgaatttcctgcagtgaatgtaatcgtatttatgtttaaaaaagcaaaacatacctgatacttttcaaaacagatgaatatgtgcaatctttttagacaatatgcagtttttcatataatattaataactgtagatatattttgaagtttacaatcaacaaaaaaattagtaagatttaatgtcttatcaaaggtttcacctaacaactaaatgcaacaggtgatgtatgaagatgcaagtcaagtcgtaaccgaggcaattggtagtattcaaacagtagcatctttctgtgcagagaagagggtaattacatcatacatccaaaaatgccaagcttcaatgaaacatggcattagaagtggaatggttggaggccttggtttcagtttatcaaacttaattatgtatctcacatatgctctttgtttctatgttggtgcactgttcgtacacgaaggaaaaacaacttttaaagacgtttttagggtaagagatacgcatttgggatcatttaaacaatgacattttgttcagcaactgactaaatttaggcaactggcaggtctattttgctctgattttcacagcttttggagtttcccaaacaagtgcaacggcaacagattcaacaaaagcccaggaatccacaatttcaatactaactattatagacaggagatctaaaatcaactcgactagtgatgaaggcgtgattatagaaaaagttgatggcaacatagatttcaggcatgtaagcttcaaatacccatcccgcccagacgtccaagtgctcagcaactttactttggccattccagcaagaaaggtactgcttgcttgatgcttgtcatcgttaattcataagttgtttgactggaggtggagggggtagttagttattcattgatcattgggagaaacaggggatgggaacttgggtggttgatcttgctaggttagtaccaagttagaccatgctagacacttcacaaaagcgttatggcaattcttgggcagcttaaataatagaaaattatcagatattggctacaaatacagtaactgtttgctacttttctcaggtaatcagtgctcattgctcaattcatcttaccttaacataagtttcagaaaagttgtgtacaggtggtacgaaattcattcagccttctgcaaaattttaagttcaaactccattttcagaaggagtagaaaaggcagacaatatgagatgaaagtaacaaaaaaaagatttactatgaattaagggtttttcccatgctatttttatctctttagaaagctcaattgcccgcaatacctgctttatactctaattgaaagtaagagctcatgtcatttgtgttcaaaaaggctggatagggtcaatcaaaatgagcctgaaaaagaatcaaaattagttcttgttttcacattttcctttatgttttgtactgatgaacttaaaactaaatttcatatgcagactgttgcacttgttggagagagtggtagtggtaagtcaacaataatttctttgctcgagagattctacgatccagattctggtacaatctcactggatggaacagaacttaaaaaactaaagctgagttggttaagagaccaaacgggcttagtgagccaagaacctgtacttttcaacaacacaattcgcacaaacatagcatatggaaaacaaggagaagtaagagaggatgagatcgttgctgcggccaaggcagcaaatgctcatgagttcatatctagcttgcctcagggatatagcactattgtcggcgagaggggaacacagctctctggaggacaaaaacaacgggttgctattgcaagggccatcttgaaggacccaaaaatacttctactcgacgaggcaacaagtgctctggatgctgaaggagagcacattgttcaagatgcactggaccaagtgatggttagcaggaccaccattgttgtggcgcaccgactgtccacaattaaaggggcagatatgatcgtagtcatgaaagatggtgaagttgctgagaaggggaagcatgaataccttgtgggaaagggtggagtttatgcatcgctggtagaactacactccaagtcagcataaggatatatgggaacttcgatggattatttggtattacaaggagagcatttgcagtaggaggtagtcatgcaacgaaaacaaatccatgtgaaacttgtcaattcatacttctggtttgttattatagggcagtgagtcttatcctaaactccatgccgacaaagatagcattggcatcaccgtatttcatatgctgcagtgcacttgattatcaataaattaatggtaaaaaggagaacaaatcaacctaatcactgagctgttattatttagtcgacgagcagaagcatttctgcgattccagagcacaagactacatgacaaatacactacaactttgcacgcattggaaagggcgagttcggatcaaatgcagctacccgtcagcgaattggttcaaaccaaaaagttcaggcgtatccagaacttaaaccggcgtacctttcgtgcgccgaggtcccctttggtcgtcatgatccaaccgacgctagcctagacttgacgttacgacggtaacggtgcccactggcgcggccaccatatctggctgctcgcttcctttccgctccccaccagcgaagacacgccgccgccgttccatagctacgccgccgcgccgcgtgcttttcccattctaccgtccgaaaacaaaatcaac

SEQ ID NO: 36828 - DNA, 5224 bp, Zea Mays
catggctgggggagcgagacacggtagcgaggacgatgccgagacgacgacgacgaacgagggacgccgcagcagcgaccacgcagccggggccacgaccaactattcggagcacaagcagctggtgccgttccttgacatgctcaagtatgccgaccgcacggacgccgcgcttatggcggtcggcacggtggccgcggtggccaacggcatgacggagccgctcatgaccgtcgtcttcgcggccgtcatcgagtgcttcggcgccggagacgacgccaccatcctccaccgggtcagcaaggtgaaggcttgcgggcactcgcgcttgaagaactccgaaacttggagcctttgtatatacaatccagacatgctaataattcttccggtgaagttatcatgtactacatctacctgggaattggaactgcagtttcttcctttctccgtgtcatgctggacggtggctggagaaaggcagtcaacacggttgcggtcattataccttgaagctgtgctgaggcaagacattgcattctttgacgtggagatgacaactgcagaagcagcctcaagaatgtctgcggacactgtactcatccaagacgccctcggtgagaaggtaacagttcattattgttttgacaaaagaaacaaaagtatgcctagtttccattaaagggtctttcatgtctacaacataaaaactcgacctgcagggataagacaaccctcgagtattgtattaagaaaaatactttctcacacctcccccgaacctctacccttcccatacatagcggcatcgaagcccatgtgagaacgaccgcaaccgatgccgggccttaggcctgtgctttagcgtgggacagacgaccacctaaccaacttaagaaaaaagccttatgtacaacactaaaaaacttgacttctcatgttaaggtagggaagtacatacagcttttgacaaccttcgtcggtggctttatcatcggattcattagaggctggatgctggcccttgttatgctcgcgtgcatacctccaagcattttatcctttgcaacagtctcccggttgcgagctcaaatatctcgaaagaggcaagaatcatatgaagatgcagggaatattgtcgagcaaaccattggagcaataagaacagttgtatctttcaatggagagaagaaagcaattgcaatgtacaacaatcacataaaaaaggcatacaaggctacaatcatggaagggatcatcactggtcttggagtaggctccatattttttgttgtcttcagcagttactctctagctttctggtatggtgccaagttaatcatcagcaaaggatatactggagggcaggtcatcaatatcgtatttgcaatcttagttggctcaatggctataggtactgcatcaccatctatttctgcaattgcagaagggcagtctgcagcacaaagattgtttgagattatcaacagaaaaccaaatattgacattaacgacacttccggaatagtattagaagatatcgagggagatgttgagctcaaggatgtgttctttaggtaccctgcaaggcctgagcagttgatacttgatggcctgtgcctgcaagtacctagtggtactacaatggctatagttggggagagcggaagtggtaaatccacagtgattagtatggtggagagattttatgacccacaggctggtgaagtgttggtagatggagtcaacatcaaaagtctgcaactccaatggttaagaggaaagataagtcttgtcagccaagaaccattgctttttatgacctccatcaaggataacataacctatggtaaagcggatgctacaattgaagagatcaagagagcagctgagcttgcaaatgcagcaaccttcattgaaaagctgcctgacgcatatgagacaacggtaggtcagcatggttctcagctttctggggggcaaaagcaaaggattgccatcgcaagagcaatcctcaaaaatcccaaaattcttcttttggacgaagccacaagtgctttagatgtagagtctgaaagggtagttcaagaagcactaaataggataatggtagggagaactacactcattgttgctcaccgcttgagcaccatcaggagcgcagactgcatagcagtagttcatcaagggaaagtagttgaacgaggtgtccatgacaagctaattaaggaccctgatggagcttattctcagcttattaggttacaacaggcacatgctacagaaaggcatgaggttccagatactgacgtgtcaggttcaatctataaaagtagaagtttacctttggaacaatcaacaggcagagattctcccaggaacaaaggacatcattccttcacaaaaaccactgggctgtctaaagaattgaacaggcaagattttacagacagacaggaagaccaggaacatggtaatagcaaggctcctaagaaagcaccaattggacgactattcaaacttaataagccagaagcaccagttctcctattagctgctatagttgcctttgtgcatggtcttctgttcccctcgttcagtataatgatgtctggtggtataagaactttctactatccaccacaccaacttcgaaaagattctcggttttgggcactgacgtgccttctgtttgcagtcattgccctgatttcaatccaactggaatactttctgtttggggttgctggtgggaaacttatacaacgtgtccgctctttgtctttccagagcatagtacatcaagaagttgcttggtttgatgagccttcaaattctaggttttgctacttaaacatttttatcccaaatttcttacatttttctacaactgtttggacattattttagtatttttactgtttcattttgaagtggggcccttggcgcgagactctatattgatgctttgaacatccgacgccttgtcggagataacttggccatactagtgcagtgtatagtaacaatagcggctggtttttccatagcatttgcttctgactggaaactcacgctgatcgtcatatgtgtgattcccgtaatgggctcacaaaattatattcaagtgaaattcttgaaagggttcagtgaagatgctaaggtgaaaatattgaatttcctgcagtgaatgtaatcgtatttatgtttaaaaaagcaaaacatacctgatacttttcaaaacagatgaatatgtgcaatctttttagacaatatgcagtttttcatataatattaataactgtagatatattttgaagtttacaatcaacaaaaaaattagtaagatttaatgtcttatcaaaggtttcacctaacaactaaatgcaacaggtgatgtatgaagatgcaagtcaagtcgtaaccgaggcaattggtagtattcaaacagtagcatctttctgtgcagagaagagggtaattacatcatacatccaaaaatgccaagcttcaatgaaacatggcattagaagtggaatggttggaggccttggtttcagtttatcaaacttaattatgtatctcacatatgctctttgtttctatgttggtgcactgttcgtacacgaaggaaaaacaacttttaaagacgtttttagggtctattttgctctgattttcacagcttttggagtttcccaaacaagtgcaacggcaacagattcaacaaaagcccaggaatccacaatttcaatactaactattatagacaggagatctaaaatcaactcgactagtgatgaaggcgtgattatagaaaaagttgatggcaacatagatttcaggcatgtaagcttcaaatacccatcccgcccagacgtccaagtgctcagcaactttactttggccattccagcaagaaagactgttgcacttgttggagagagtggtagtggtaagtcaacaataatttctttgctcgagagattctacgatccagattctggtacaatctcactggatggaacagaacttaaaaaactaaagctgagttggttaagagaccaaacgggcttagtgagccaagaacctgtacttttcaacaacacaattcgcacaaacatagcatatggaaaacaaggagaagtaagagaggatgagatcgttgctgcggccaaggcagcaaatgctcatgagttcatatctagcttgcctcagggatatagcactattgtcggcgagaggggaacacagctctctggaggacaaaaacaacgggttgctattgcaagggccatcttgaaggacccaaaaatacttctactcgacgaggcaacaagtgctctggatgctgaaggagagcacattgttcaagatgcactggaccaagtgatggttagcaggaccaccattgttgtggcgcaccgactgtccacaattaaaggggcagatatgatcgtagtcatgaaagatggtgaagttgctgagaaggggaagcatgaataccttgtgggaaagggtggagtttatgcatcgctggtagaactacactccaagtcagcataaggatatatgggaacttcgatggattatttggtattacaaggagagcatttgcagtaggaggtagtcatgcaacgaaaacaaatccatgtgaaacttgtcaattcatacttctggtttgttattatagggcagtgagtcttatcctaaactccatgccgacaaagatagcattggcatcaccgtatttcatatgctgcagtgcacttgattatcaataaattaatggtaaaaaggagaacaaatcaacctaatcactgagctgttattatttagtcgacgagcagaagcatttctgcgattccagagcacaagactacatgacaaatacactacaactttgcacgcattggaaagggcgagttcggatcaaatgcagctacccgtcagcgaattggttcaaaccaaaaagttcaggcgtatccagaacttaaaccggcgtacctttcgtgcgccgaggtcccctttggtcgtcatgatccaaccgacgctagcctagacttgacgttacgacggtaacggtgcccactggcgcggccaccatatctggctgctcgcttcctttccgctccccaccagcgaagacacgccgccgccgttccatagctacgccgccgcgccgcgtgcttttcccattctaccgtccgaaaacaaaatcaac

SEQ ID NO: 36829 - DNA, 4500 bp, Zea Mays
agaagggattcatggctgggggagcgagacacggtagcgaggacgatgccgagacgacgacgacgaacgagggacgccgcagcagcgaccacgcagccggggccacgaccaactattcggagcacaagcagctggtgccgttccttgacatgctcaagtatgccgaccgcacggacgccgcgcttatggcggtcggcacggtggccgcggtggccaacggcatgacggagccgctcatgaccgtcgtcttcgcggccgtcatcgagtgcttcggcgccggagacgacgccaccatcctccaccgggtcagcaaggttatcatgtactacatctacctgggaattggaactgcagtttcttcctttctccaggtgtcatgctggacggtggctggagaaaggcagtcaacacggttgcggtcattataccttgaagctgtgctgaggcaagacattgcattctttgacgtggagatgacaactgcagaagcagcctcaagaatgtctgcggacactgtactcatccaagacgccctcggtgagaaggtagggaagtacatacagcttttgacaaccttcgtcggtggctttatcatcggattcattagaggctggatgctggcccttgttatgctcgcgtgcatacctccaagcattttatcctttgcaacagtctcccggttgcgagctcaaatatctcgaaagaggcaagaatcatatgaagatgcagggaatattgtcgagcaaaccattggagcaataagaacagttgtatctttcaatggagagaagaaagcaattgcaatgtacaacaatcacataaaaaaggcatacaaggctacaatcatggaagggatcatcactggtcttggagtaggctccatattttttgttgtcttcagcagttactctctagctttctggtatggtgccaagttaatcatcagcaaaggatatactggagggcaggtcatcaatatcgtatttgcaatcttagttggctcaatggctataggtactgcatcaccatctatttctgcaattgcagaagggcagtctgcagcacaaagattgtttgagattatcaacagaaaaccaaatattgacattaacgacacttccggaatagtattagaagatatcgagggagatgttgagctcaaggatgtgttctttaggtaccctgcaaggcctgagcagttgatacttgatggcctgtgcctgcaagtacctagtggtactacaatggctatagttggggagagcggaagtggtaaatccacagtgattagtatggtggagagattttatgacccacaggctggtgaagtgttggtagatggagtcaacatcaaaagtctgcaactccaatggttaagaggaaagataagtcttgtcagccaagaaccattgctttttatgacctccatcaaggataacataacctatggtaaagcggatgctacaattgaagagatcaagagagcagctgagcttgcaaatgcagcaaccttcattgaaaagctgcctgacgcatatgagacaacggtaggtcagcatggttctcagctttctggggggcaaaagcaaaggattgccatcgcaagagcaatcctcaaaaatcccaaaattcttcttttggacgaagccacaagtgctttagatgtagagtctgaaagggtagttcaagaagcactaaataggataatggtagggagaactacactcattgttgctcaccgcttgagcaccatcaggagcgcagactgcatagcagtagttcatcaagggaaagtagttgaacgaggtgtccatgacaagctaattaaggaccctgatggagcttattctcagcttattaggttacaacaggcacatgctacagaaaggcatgaggttccagatactgacgtgtcaggttcaatctataaaagtagaagtttacctttggaacaatcaacaggcagagattctcccaggaacaaaggacatcattccttcacaaaaaccactgggctgtctaaagaattgaacaggcaagattttacagacagacaggaagaccaggaacatggtaatagcaaggctcctaagaaagcaccaattggacgactattcaaacttaataagccagaagcaccagttctcctattagctgctatagttgcctttgtgcatggtcttctgttcccctcgttcagtataatgatgtctggtggtataagaactttctactatccaccacaccaacttcgaaaagattctcggttttgggcactgacgtgccttctgtttgcagtcattgccctgatttcaatccaactggaatactttctgtttggggttgctggtgggaaacttatacaacgtgtccgctctttgtctttccagagcatagtacatcaagaagttgcttggtttgatgagccttcaaattctagtggggcccttggcgcgagactctatattgatgctttgaacatccgacgccttgtcggagataacttggccatactagtgcagtgtatagtaacaatagcggctggtttttccatagcatttgcttctgactggaaactcacgctgatcgtcatatgtgtgattcccgtaatgggctcacaaaattatattcaagtgaaattcttgaaagggttcagtgaagatgctaaggtgatgtatgaagatgcaagtcaagtcgtaaccgaggcaattggtagtattcaaacagtagcatctttctgtgcagagaagagggtaattacatcatacatccaaaaatgccaagcttcaatgaaacatggcattagaagtggaatggttggaggccttggtttcagtttatcaaacttaattatgtatctcacatatgctctttgtttctatgttggtgcactgttcgtacacgaaggaaaaacaacttttaaagacgtttttagggtctattttgctctgattttcacagcttttggagtttcccaaacaagtgcaacggcaacagattcaacaaaagcccaggaatccacaatttcaatactaactattatagacaggagatctaaaatcaactcgactagtgatgaaggcgtgattatagaaaaagttgatggcaacatagatttcaggcatgtaagcttcaaatacccatcccgcccagacgtccaagtgctcagcaactttactttggccattccagcaagaaagactgttgcacttgttggagagagtggtagtggtaagtcaacaataatttctttgctcgagagattctacgatccagattctggtacaatctcactggatggaacagaacttaaaaaactaaagctgagttggttaagagaccaaacgggcttagtgagccaagaacctgtacttttcaacaacacaattcgcacaaacatagcatatggaaaacaaggagaagtaagagaggatgagatcgttgctgcggccaaggcagcaaatgctcatgagttcatatctagcttgcctcagggatatagcactattgtcggcgagaggggaacacagctctctggaggacaaaaacaacgggttgctattgcaagggccatcttgaaggacccaaaaatacttctactcgacgaggcaacaagtgctctggatgctgaaggagagcacattgttcaagatgcactggaccaagtgatggttagcaggaccaccattgttgtggcgcaccgactgtccacaattaaaggggcagatatgatcgtagtcatgaaagatggtgaagttgctgagaaggggaagcatgaataccttgtgggaaagggtggagtttatgcatcgctggtagaactacactccaagtcagcataaggatatatgggaacttcgatggattatttggtattacaaggagagcatttgcagtaggaggtagtcatgcaacgaaaacaaatccatgtgaaacttgtcaattcatacttctggtttgttattatagggcagtgagtcttatcctaaactccatgccgacaaagatagcattggcatcaccgtatttcatatgctgcagtgcacttgattatcaataaattaatggtaaaaaggagaacaaatcaacctaatcactgagctgttattatttagtcgacgagcagaagcatttctgcgattccagagcacaagactacatgacaaatacactacaactttgcacgcattggaaagggcgagttcggatcaaatgcagctacccgtcagcgaattggttcaaaccaaaaagttcaggcgtatccagaacttaaaccggcgtacctttcgtgcgccgaggtcccctttggtcgtcatgatccaaccgacgctagcctagacttgacgttacgacggtaacggtgcccactggcgcggccaccatatctggctgctcgcttcctttccgctccccaccagcgaagacacgccgccgccgttccatagctacgccgccgcgccgcgtgcttttcccattctaccgtccgaaaacaaaatcaac

SEQ ID NO: 36830 - DNA, 5631 bp, Zea Mays
agaagggattcatggctgggggagcgagacacggtagcgaggacgatgccgagacgacgacgacgaacgagggacgccgcagcagcgaccacgcagccggggccacgaccaactattcggagcacaagcagctggtgccgttccttgacatgctcaagtatgccgaccgcacggacgccgcgcttatggcggtcggcacggtggccgcggtggccaacggcatgacggagccgctcatgaccgtcgtcttcgcggccgtcatcgagtgcttcggcgccggagacgacgccaccatcctccaccgggtcagcaaggttatcatgtactacatctacctgggaattggaactgcagtttcttcctttctccaggtgtcatgctggacggtggctggagaaaggcagtcaacacggttgcggtcattataccttgaagctgtgctgaggcaagacattgcattctttgacgtggagatgacaactgcagaagcagcctcaagaatgtctgcggacactgtactcatccaagacgccctcggtgagaaggtagggaagtacatacagcttttgacaaccttcgtcggtggctttatcatcggattcattagaggctggatgctggcccttgttatgctcgcgtgcatacctccaagcattttatcctttgcaacagtctcccggttgcgagctcaaatatctcgaaagaggcaagaatcatatgaagatgcagggaatattgtcgagcaaaccattggagcaataagaacagtgggtgattctaacattttctaaatacaaattaatgctgacaatagtttttttttgcaactattcaatatcaataacatctcaaaacaggttgtatctttcaatggagagaagaaagcaattgcaatgtacaacaatcacataaaaaaggcatacaaggctacaatcatggaagggatcatcactggtcttggagtaggctccatattttttgttgtcttcagcagttactctctagctttctggtatggtgccaagttaatcatcagcaaaggatatactggagggcaggtcatcaatatcgtatttgcaatcttagttggctcaatggctataggtactgcatcaccatctatttctgcaattgcagaagggcagtctgcagcacaaagattgtttgagattatcaacagaaaaccaaatattgacattaacgacacttccggaatagtattagaagatatcgagggagatgttgagctcaaggatgtgttctttaggtaccctgcaaggcctgagcagttgatacttgatggcctgtgcctgcaagtacctagtggtactacaatggctatagttggggagagcggaagtggtaaatccacagtgattagtatggtggagagattttatgacccacaggctggtgaagtgttggtagatggagtcaacatcaaaagtctgcaactccaatggttaagaggaaagataagtcttgtcagccaagaaccattgctttttatgacctccatcaaggataacataacctatggtaaagcggatgctacaattgaagagatcaagagagcagctgagcttgcaaatgcagcaaccttcattgaaaagctgcctgacgtactttcagaaacactacttatttatgtatcttacttaagtttctgccaactaatatcttgtcttccacctcatacaggcatatgagacaacggtaggtcagcatggttctcagctttctggggggcaaaagcaaaggattgccatcgcaagagcaatcctcaaaaatcccaaaattcttcttttggacgaagccacaagtgctttagatgtagagtctgaaagggtagttcaagaagcactaaataggataatggtagggagaactacactcattgttgctcaccgcttgagcaccatcaggagcgcagactgcatagcagtagttcatcaagggaaagtagttgaacgaggtaagtgactcttcgacaccaattacacctttttaattcttagaagcaatcaatcagtgtgaaaaaagtcaaaaacagaggtagttcaattcagttttttggaacaaattaaccaattgacatgtcacacaggtgtccatgacaagctaattaaggaccctgatggagcttattctcagcttattaggttacaacaggcacatgctacagaaaggcatgaggttccagatactgacgtgtcaggttcaatctataaaagtagaagtttacctttggaacaatcaacaggcagagattctcccaggaacaaaggacatcattccttcacaaaaaccactgggctgtctaaagaattgaacaggcaagattttacagacagacaggaagaccaggaacatggtaatagcaaggctcctaagaaagcaccaattggacgactattcaaacttaataagccagaagcaccagttctcctattagctgctatagttgcctttgtgcatggtcttctgttcccctcgttcagtataatgatgtctggtggtataagaactttctactatccaccacaccaacttcgaaaagattctcggttttgggcactgacgtgccttctgtttgcagtcattgccctgatttcaatccaactggaatactttctgtttggggttgctggtgggaaacttatacaacgtgtccgctctttgtctttccagagcatagtacatcaagaagttgcttggtttgatgagccttcaaattctaggttttgctacttaaacatttttatcccaaatttcttacatttttctacaactgtttggacattattttagtatttttactgtttcattttgaagtggggcccttggcgcgagactctatattgatgctttgaacatccgacgccttgtcggagataacttggccatactagtgcagtgtatagtaacaatagcggctggtttttccatagcatttgcttctgactggaaactcacgctgatcgtcatatgtgtgattcccgtaatgggctcacaaaattatattcaagtgaaattcttgaaagggttcagtgaagatgctaaggtgatgtatgaagatgcaagtcaagtcgtaaccgaggcaattggtagtattcaaacagtagcatctttctgtgcagagaagagggtaattacatcatacatccaaaaatgccaagcttcaatgaaacatggcattagaagtggaatggttggaggccttggtttcagtttatcaaacttaattatgtatctcacatatgctctttgtttctatgttggtgcactgttcgtacacgaaggaaaaacaacttttaaagacgtttttagggtaagagatacgcatttgggatcatttaaacaatgacattttgttcagcaactgactaaatttaggcaactggcaggtctattttgctctgattttcacagcttttggagtttcccaaacaagtgcaacggcaacagattcaacaaaagcccaggaatccacaatttcaatactaactattatagacaggagatctaaaatcaactcgactagtgatgaaggcgtgattatagaaaaagttgatggcaacatagatttcaggcatgtaagcttcaaatacccatcccgcccagacgtccaagtgctcagcaactttactttggccattccagcaagaaaggtactgcttgcttgatgcttgtcatcgttaattcataagttgtttgactggaggtggagggggtagttagttattcattgatcattgggagaaacaggggatgggaacttgggtggttgatcttgctaggttagtaccaagttagaccatgctagacacttcacaaaagcgttatggcaattcttgggcagcttaaataatagaaaattatcagatattggctacaaatacagtaactgtttgctacttttctcaggtaatcagtgctcattgctcaattcatcttaccttaacataagtttcagaaaagttgtgtacaggtggtacgaaattcattcagccttctgcaaaattttaagttcaaactccattttcagaaggagtagaaaaggcagacaatatgagatgaaagtaacaaaaaaaagatttactatgaattaagggtttttcccatgctatttttatctctttagaaagctcaattgcccgcaatacctgctttatactctaattgaaagtaagagctcatgtcatttgtgttcaaaaaggctggatagggtcaatcaaaatgagcctgaaaaagaatcaaaattagttcttgttttcacattttcctttatgttttgtactgatgaacttaaaactaaatttcatatgcagactgttgcacttgttggagagagtggtagtggtaagtcaacaataatttctttgctcgagagattctacgatccagattctggtacaatctcactggatggaacagaacttaaaaaactaaagctgagttggttaagagaccaaacgggcttagtgagccaagaacctgtacttttcaacaacacaattcgcacaaacatagcatatggaaaacaaggagaagtaagagaggatgagatcgttgctgcggccaaggcagcaaatgctcatgagttcatatctagcttgcctcagggatatagcactattgtcggcgagaggggaacacagctctctggaggacaaaaacaacgggttgctattgcaagggccatcttgaaggacccaaaaatacttctactcgacgaggcaacaagtgctctggatgctgaaggagagcacattgttcaagatgcactggaccaagtgatggttagcaggaccaccattgttgtggcgcaccgactgtccacaattaaaggggcagatatgatcgtagtcatgaaagatggtgaagttgctgagaaggggaagcatgaataccttgtgggaaagggtggagtttatgcatcgctggtagaactacactccaagtcagcataaggatatatgggaacttcgatggattatttggtattacaaggagagcatttgcagtaggaggtagtcatgcaacgaaaacaaatccatgtgaaacttgtcaattcatacttctggtttgttattatagggcagtgagtcttatcctaaactccatgccgacaaagatagcattggcatcaccgtatttcatatgctgcagtgcacttgattatcaataaattaatggtaaaaaggagaacaaatcaacctaatcactgagctgttattatttagtcgacgagcagaagcatttctgcgattccagagcacaagactacatgacaaatacactacaactttgcacgcattggaaagggcgagttcggatcaaatgcagctacccgtcagcgaattggttcaaaccaaaaagttcaggcgtatccagaacttaaaccggcgtacctttcgtgcgccgaggtcccctttggtcgtcatgatccaaccgacgctagcctagacttgacgttacgacggtaacggtgcccactggcgcggccaccatatctggctgctcgcttcctttccgctccccaccagcgaagacacgccgccgccgttccatagctacgccgccgcgccgcgtgcttttcccattctaccgtccgaaaacaaaatcaac

SEQ ID NO: 36831 - DNA, 4545 bp, Zea Mays
caagcaccagtagtgcaaacaaacagctaggatccagccatagagagagaagggattcatggctgggggagcgagacacggtagcgaggacgatgccgagacgacgacgacgaacgagggacgccgcagcagcgaccacgcagccggggccacgaccaactattcggagcacaagcagctggtgccgttccttgacatgctcaagtatgccgaccgcacggacgccgcgcttatggcggtcggcacggtggccgcggtggccaacggcatgacggagccgctcatgaccgtcgtcttcgcggccgtcatcgagtgcttcggcgccggagacgacgccaccatcctccaccgggtcagcaaggttatcatgtactacatctacctgggaattggaactgcagtttcttcctttctccgtgtcatgctggacggtggctggagaaaggcagtcaacacggttgcggtcattataccttgaagctgtgctgaggcaagacattgcattctttgacgtggagatgacaactgcagaagcagcctcaagaatgtctgcggacactgtactcatccaagacgccctcggtgagaaggtagggaagtacatacagcttttgacaaccttcgtcggtggctttatcatcggattcattagaggctggatgctggcccttgttatgctcgcgtgcatacctccaagcattttatcctttgcaacagtctcccggttgcgagctcaaatatctcgaaagaggcaagaatcatatgaagatgcagggaatattgtcgagcaaaccattggagcaataagaacagttgtatctttcaatggagagaagaaagcaattgcaatgtacaacaatcacataaaaaaggcatacaaggctacaatcatggaagggatcatcactggtcttggagtaggctccatattttttgttgtcttcagcagttactctctagctttctggtatggtgccaagttaatcatcagcaaaggatatactggagggcaggtcatcaatatcgtatttgcaatcttagttggctcaatggctataggtactgcatcaccatctatttctgcaattgcagaagggcagtctgcagcacaaagattgtttgagattatcaacagaaaaccaaatattgacattaacgacacttccggaatagtattagaagatatcgagggagatgttgagctcaaggatgtgttctttaggtaccctgcaaggcctgagcagttgatacttgatggcctgtgcctgcaagtacctagtggtactacaatggctatagttggggagagcggaagtggtaaatccacagtgattagtatggtggagagattttatgacccacaggctggtgaagtgttggtagatggagtcaacatcaaaagtctgcaactccaatggttaagaggaaagataagtcttgtcagccaagaaccattgctttttatgacctccatcaaggataacataacctatggtaaagcggatgctacaattgaagagatcaagagagcagctgagcttgcaaatgcagcaaccttcattgaaaagctgcctgacgcatatgagacaacggtaggtcagcatggttctcagctttctggggggcaaaagcaaaggattgccatcgcaagagcaatcctcaaaaatcccaaaattcttcttttggacgaagccacaagtgctttagatgtagagtctgaaagggtagttcaagaagcactaaataggataatggtagggagaactacactcattgttgctcaccgcttgagcaccatcaggagcgcagactgcatagcagtagttcatcaagggaaagtagttgaacgaggtgtccatgacaagctaattaaggaccctgatggagcttattctcagcttattaggttacaacaggcacatgctacagaaaggcatgaggttccagatactgacgtgtcaggttcaatctataaaagtagaagtttacctttggaacaatcaacaggcagagattctcccaggaacaaaggacatcattccttcacaaaaaccactgggctgtctaaagaattgaacaggcaagattttacagacagacaggaagaccaggaacatggtaatagcaaggctcctaagaaagcaccaattggacgactattcaaacttaataagccagaagcaccagttctcctattagctgctatagttgcctttgtgcatggtcttctgttcccctcgttcagtataatgatgtctggtggtataagaactttctactatccaccacaccaacttcgaaaagattctcggttttgggcactgacgtgccttctgtttgcagtcattgccctgatttcaatccaactggaatactttctgtttggggttgctggtgggaaacttatacaacgtgtccgctctttgtctttccagagcatagtacatcaagaagttgcttggtttgatgagccttcaaattctagtggggcccttggcgcgagactctatattgatgctttgaacatccgacgccttgtcggagataacttggccatactagtgcagtgtatagtaacaatagcggctggtttttccatagcatttgcttctgactggaaactcacgctgatcgtcatatgtgtgattcccgtaatgggctcacaaaattatattcaagtgaaattcttgaaagggttcagtgaagatgctaaggtgatgtatgaagatgcaagtcaagtcgtaaccgaggcaattggtagtattcaaacagtagcatctttctgtgcagagaagagggtaattacatcatacatccaaaaatgccaagcttcaatgaaacatggcattagaagtggaatggttggaggccttggtttcagtttatcaaacttaattatgtatctcacatatgctctttgtttctatgttggtgcactgttcgtacacgaaggaaaaacaacttttaaagacgtttttagggtctattttgctctgattttcacagcttttggagtttcccaaacaagtgcaacggcaacagattcaacaaaagcccaggaatccacaatttcaatactaactattatagacaggagatctaaaatcaactcgactagtgatgaaggcgtgattatagaaaaagttgatggcaacatagatttcaggcatgtaagcttcaaatacccatcccgcccagacgtccaagtgctcagcaactttactttggccattccagcaagaaagactgttgcacttgttggagagagtggtagtggtaagtcaacaataatttctttgctcgagagattctacgatccagattctggtacaatctcactggatggaacagaacttaaaaaactaaagctgagttggttaagagaccaaacgggcttagtgagccaagaacctgtacttttcaacaacacaattcgcacaaacatagcatatggaaaacaaggagaagtaagagaggatgagatcgttgctgcggccaaggcagcaaatgctcatgagttcatatctagcttgcctcagggatatagcactattgtcggcgagaggggaacacagctctctggaggacaaaaacaacgggttgctattgcaagggccatcttgaaggacccaaaaatacttctactcgacgaggcaacaagtgctctggatgctgaaggagagcacattgttcaagatgcactggaccaagtgatggttagcaggaccaccattgttgtggcgcaccgactgtccacaattaaaggggcagatatgatcgtagtcatgaaagatggtgaagttgctgagaaggggaagcatgaataccttgtgggaaagggtggagtttatgcatcgctggtagaactacactccaagtcagcataaggatatatgggaacttcgatggattatttggtattacaaggagagcatttgcagtaggaggtagtcatgcaacgaaaacaaatccatgtgaaacttgtcaattcatacttctggtttgttattatagggcagtgagtcttatcctaaactccatgccgacaaagatagcattggcatcaccgtatttcatatgctgcagtgcacttgattatcaataaattaatggtaaaaaggagaacaaatcaacctaatcactgagctgttattatttagtcgacgagcagaagcatttctgcgattccagagcacaagactacatgacaaatacactacaactttgcacgcattggaaagggcgagttcggatcaaatgcagctacccgtcagcgaattggttcaaaccaaaaagttcaggcgtatccagaacttaaaccggcgtacctttcgtgcgccgaggtcccctttggtcgtcatgatccaaccgacgctagcctagacttgacgttacgacggtaacggtgcccactggcgcggccaccatatctggctgctcgcttcctttccgctccccaccagcgaagacacgccgccgccgttccatagctacgccgccgcgccgcgtgcttttcccattctaccgtccgaaaacaaaatcaac

SEQ ID NO: 36832 - DNA, 1994 bp, Zea Mays
gtttgagataactgtcgagcacatggcgtgcagggagcctagaccgcctagacgtgcatgagaggaaggcgcagaagagctactgggaggagcactctggggagctcaacctcgaggccattatgctcgactcccgtgccgccgaactcgacaaggaggagcgccccgaggttctgtctttacttccttcatatgaagggaaatctatactggagctgggagctggaataggtcgctttactggtgaactggctaaaacatctgggcatgtttttgcagtggatttcgttgaaagtgtgattaaaaagaatggaagtataaatgatcactatggcaacacgtcctttatgtgtgctgatgttacatccacggacctgatgattgaagcaaactccattgatctgatattttcaaactggttgctgatgtatctttcagatgaggagattgacaagttggtagaaagaatggtaaaatggttgaaggtcggtggttatatcttctttagggaatcttgcttccatcaaactggagatacagaaaggaaatttaacccaacacactatcgagaaccaaggttttataccaaggtatttaaagaatgccaaacctttaatcaggatggcacttccttcaaactttctttgattacattcaaatgcattggagcttatgtaaacatcaagaaagatcaaaaccagatatgttggctatggaaaaaagtaaactcatcagaagatgggggatttcaaagttttttggacaatgtgcagtacaaagccactggaatactacgctatgaacgtatctttggagatggctacgtgagtactggtggagctgagactacaaaagaatttgtggagaaactgaatcttaagcctgggcagaaggtgcttgatgttggatgtggaattgggggaggtgacttttatatggctgagaagtatggtacacatgttgttggtattgacctttccattaacatgattatgtttgcccttgagcgttccattggatgtaagtgcttagttgagtttgaagttgctgattgcaccacaaagacatacccagaccacatgtttgatgtcatctacagtcgtgacactatccttcatatacaagataaaccctccttgtttaaaagtttcttcaaatggctgaaacccgggggaaaggttctaatcagtgattactgcaagagtcctggaaaaccatcagaagagtttgcaacatacattaagcagaggggttatgatctccatgatgtggaggcttatggacagatgctcaagaatgctggtttcagtcatgtcattgctgaagaccgaactgaccagttcctcagtgttttacagaaggagctagacaaatttgagaagaacaaagatgatttcctgtctgagtttgcccaggaggattatgacgatatcgtgaatggatggaaggcaaaactgcagaggagctctgctggtgagcagaggtgggggctgttcgtcgccaccaagtgatgcgcgtgcgtgtggctttattacaaataacatttggagctctgctggtgagcagaggtgggggctgttcgtcgccaccaagtgatgcgcgtgcgtgtggctttattacaaataaatttgaagctctgctggtgagcagaggtgggctgttcgtcgccaccaagtgatgcgcgtgcgtgtggctttattacaaataaatttgcttctgcaattcaccgatgggattcgcttcataacgtgattttacataactgaactcagagagcctatcctattgctttgtgttttgggacaatgagactgatataacttttacggtcctgttaaatatagagtgtgctgtactgatgctcctcatggctgtggctacatggttgacacgtgacatgagatttgttattttcatatttttttagaaaaatattttgcatctcaacttttgaccaatgtgcatcagatgcattgaatctgtgcatcatttta

SEQ ID NO: 36833 - DNA, 2070 bp, Zea Mays
aaacatcgccatgattcggtggttctgaatgcatctcctgtaaccaccgggcccggagcttctcccaagcccgcgtcgccgtcgagggctgttaacctggcaacactctcaccaaccaacaaacaaacgcgcggggtcgctgtaatggccgccgccgccgccgctgtgaatgaccgcctagacgtgcatgagaggaaggcgcagaagagctactgggaggagcactctggggagctcaacctcgaggccattatgctcgactcccgtgccgccgaactcgacaaggaggagcgccccgaggttctgtctttacttccttcatatgaagggaaatctatactggagctgggagctggaataggtcgctttactggtgaactggctaaaacatctgggcatgtttttgcagtggatttcgttgaaagtgtgattaaaaagaatggaagtataaatgatcactatggcaacacgtcctttatgtgtgctgatgttacatccacggacctgatgattgaagcaaactccattgatctgatattttcaaactggttgctgatgtatctttcagatgaggagattgacaagttggtagaaagaatggtaaaatggttgaaggtcggtggttatatcttctttagggaatcttgcttccatcaaactggagatacagaaaggaaatttaacccaacacactatcgagaaccaaggttttataccaaggtatttaaagaatgccaaacctttaatcaggatggcacttccttcaaactttctttgattacattcaaatgcattggagcttatgtaaacatcaagaaagatcaaaaccagatatgttggctatggaaaaaagtaaactcatcagaagatgggggatttcaaagttttttggacaatgtgcagtacaaagccactggaatactacgctatgaacgtatctttggagatggctacgtgagtactggtggagctgagactacaaaagaatttgtggagaaactgaatcttaagcctgggcagaaggtgcttgatgttggatgtggaattgggggaggtgacttttatatggctgagaagtatggtacacatgttgttggtattgacctttccattaacatgattatgtttgcccttgagcgttccattggatgtaagtgcttagttgagtttgaagttgctgattgcaccacaaagacatacccagaccacatgtttgatgtcatctacagtcgtgacactatccttcatatacaagataaaccctccttgtttaaaagtttcttcaaatggctgaaacccgggggaaaggttctaatcagtgattactgcaagagtcctggaaaaccatcagaagagtttgcaacatacattaagcagaggggttatgatctccatgatgtggaggcttatggacagttcctcagtgttttacagaaggagctagacaaatttgagaagaacaaagatgatttcctgtctgagtttgcccaggaggattatgacgatatcgtgaatggatggaaggcaaaactgcagaggagctctgctggtgagcagaggtgggggctgttcgtcgccaccaagtgatgcgcgtgcgtgtggctttattacaaataacatttggagctctgctggtgagcagaggtgggggctgttcgtcgccaccaagtgatgcgcgtgcgtgtggctttattacaaataaatttgaagctctgctggtgagcagaggtgggctgttcgtcgccaccaagtgatgcgcgtgcgtgtggctttattacaaataaatttgcttctgcaattcaccgatgggattcgcttcataacgtgattttacataactgaactcagagagcctatcctattgctttgtgttttgggacaatgagactgatataacttttacggtcctgttaaatatagagtgtgctgtactgatgctcctcatggctgtggctacatggttgacacgtgacatgagatttgttattttcatatttttttagaaaaatattttgcatctcaacttttgaccaatgtgcatcagatgcattgaatctgtgcatcatttta

SEQ ID NO: 36834 - DNA, 1966 bp, Zea Mays
aaacatcgccatgattcggtggttctgaatgcatctcctgtaaccaccgggcccggagcttctcccaagcccgcgtcgccgtcgagggctgttaacctggcaacactctcaccaaccaacaaacaaacgcgcggggtcgctgtaatggccgccgccgccgccgctgtgaatgaccgcctagacgtgcatgagaggaaggcgcagaagagctactgggaggagcactctggggagctcaacctcgaggccattatgctcgactcccgtgccgccgaactcgacaaggaggagcgccccgaggttctgtctttacttccttcatatgaagggaaatctatactggagctgggagctggaataggtcgctttactggtgaactggctaaaacatctgggcatgtttttgcagtggatttcgttgaaagtgtgattaaaaagaatggaagtataaatgatcactatggcaacacgtcctttatgtgtgctgatgttacatccacggacctgatgattgaagcaaactccattgatctgatattttcaaactggttgctgatgtatctttcagatgaggagattgacaagttggtagaaagaatggtaaaatggttgaaggtcggtggttatatcttctttagggaatcttgcttccatcaaactggagatacagaaaggaaatttaacccaacacactatcgagaaccaaggttttataccaaggtatttaaagaatgccaaacctttaatcaggatggcacttccttcaaactttctttgattacattcaaatgcattggagcttatgtaaacatcaagaaagatcaaaaccagatatgttggctatggaaaaaagtaaactcatcagaagatgggggatttcaaagttttttggacaatgtgcagtacaaagccactggaatactacgctatgaacgtatctttggagatggctacgtgagtactggtggagctgagactacaaaagaatttgtggagaaactgaatcttaagcctgggcagaaggtgcttgatgttggatgtggaattgggggaggtgacttttatatggctgagaagtatggtacacatgttgttggataaaccctccttgtttaaaagtttcttcaaatggctgaaacccgggggaaaggttctaatcagtgattactgcaagagtcctggaaaaccatcagaagagtttgcaacatacattaagcagaggggttatgatctccatgatgtggaggcttatggacagatgctcaagaatgctggtttcagtcatgtcattgctgaagaccgaactgaccagttcctcagtgttttacagaaggagctagacaaatttgagaagaacaaagatgatttcctgtctgagtttgcccaggaggattatgacgatatcgtgaatggatggaaggcaaaactgcagaggagctctgctggtgagcagaggtgggggctgttcgtcgccaccaagtgatgcgcgtgcgtgtggctttattacaaataacatttggagctctgctggtgagcagaggtgggggctgttcgtcgccaccaagtgatgcgcgtgcgtgtggctttattacaaataaatttgaagctctgctggtgagcagaggtgggctgttcgtcgccaccaagtgatgcgcgtgcgtgtggctttattacaaataaatttgcttctgcaattcaccgatgggattcgcttcataacgtgattttacataactgaactcagagagcctatcctattgctttgtgttttgggacaatgagactgatataacttttacggtcctgttaaatatagagtgtgctgtactgatgctcctcatggctgtggctacatggttgacacgtgacatgagatttgttattttcatatttttttagaaaaatattttgcatctcaacttttgaccaatgtgcatcagatgcattgaatctgtgcatcatttta

SEQ ID NO: 36835 - DNA, 2120 bp, Zea Mays
ctggccttcgcttcgccacggttctcgcctcctcgcattctaaacatcgccatgattcggtggttctgaatgcatctcctgtaaccaccgggcccggagcttctcccaagcccgcgtcgccgtcgagggctgttaacctggcaacactctcaccaaccaacaaacaaacgcgcggggtcgctgtaatggccgccgccgccgccgctgtgaatgggagcctagaccgcctagacgtgcatgagaggaaggcgcagaagagctactgggaggagcactctggggagctcaacctcgaggccattatgctcgactcccgtgccgccgaactcgacaaggaggagcgccccgaggttctgtctttacttccttcatatgaagggaaatctatactggagctgggagctggaataggtcgctttactggtgaactggctaaaacatctgggcatgtttttgcagtggatttcgttgaaagtgtgattaaaaagaatggaagtataaatgatcactatggcaacacgtcctttatgtgtgctgatgttacatccacggacctgatgattgaagcaaactccattgatctgatattttcaaactggttgctgatgtatctttcagatgaggagattgacaagttggtagaaagaatggtaaaatggttgaaggtcggtggttatatcttctttagggaatcttgcttccatcaaactggagatacagaaaggaaatttaacccaacacactatcgagaaccaaggttttataccaaggtatttaaagaatgccaaacctttaatcaggatggcacttccttcaaactttctttgattacattcaaatgcattggagcttatgtaaacatcaagaaagatcaaaaccagatatgttggctatggaaaaaagtaaactcatcagaagatgggggatttcaaagttttttggacaatgtgcagtacaaagccactggaatactacgctatgaacgtatctttggagatggctacgtgagtactggtggagctgagactacaaaagaatttgtggagaaactgaatcttaagcctgggcagaaggtgcttgatgttggatgtggaattgggggaggtgacttttatatggctgagaagtatggtacacatgttgttggtattgacctttccattaacatgattatgtttgcccttgagcgttccattggatgtaagtgcttagttgagtttgaagttgctgattgcaccacaaagacatacccagaccacatgtttgatgtcatctacagtcgtgacactatccttcatatacaagataaaccctccttgtttaaaagtttcttcaaatggctgaaacccgggggaaaggttctaatcagtgattactgcaagagtcctggaaaaccatcagaagagtttgcaacatacattaagcagaggggttatgatctccatgatgtggaggcttatggacagttcctcagtgttttacagaaggagctagacaaatttgagaagaacaaagatgatttcctgtctgagtttgcccaggaggattatgacgatatcgtgaatggatggaaggcaaaactgcagaggagctctgctggtgagcagaggtgggggctgttcgtcgccaccaagtgatgcgcgtgcgtgtggctttattacaaataacatttggagctctgctggtgagcagaggtgggggctgttcgtcgccaccaagtgatgcgcgtgcgtgtggctttattacaaataaatttgaagctctgctggtgagcagaggtgggctgttcgtcgccaccaagtgatgcgcgtgcgtgtggctttattacaaataaatttgcttctgcaattcaccgatgggattcgcttcataacgtgattttacataactgaactcagagagcctatcctattgctttgtgttttgggacaatgagactgatataacttttacggtcctgttaaatatagagtgtgctgtactgatgctcctcatggctgtggctacatggttgacacgtgacatgagatttgttattttcatatttttttagaaaaatattttgcatctcaacttttgaccaatgtgcatcagatgcattgaatctgtgcatcatttta

SEQ ID NO: 36836 - DNA, 2093 bp, Zea Mays
ctggccttcgcttcgccacggttctcgcctcctcgcattctaaacatcgccatgattcggtggttctgaatgcatctcctgtaaccaccgggcccggagcttctcccaagcccgcgtcgccgtcgagggctgttaacctggcaacactctcaccaaccaacaaacaaacgcgcggggtcgctgtaatggccgccgccgccgccgctgtgaatgaccgcctagacgtgcatgagaggaaggcgcagaagagctactgggaggagcactctggggagctcaacctcgaggccattatgctcgactcccgtgccgccgaactcgacaaggaggagcgccccgaggttctgtctttacttccttcatatgaagggaaatctatactggagctgggagctggaataggtcgctttactggtgaactggctaaaacatctgggcatgtttttgcagtggatttcgttgaaagtgtgattaaaaagaatggaagtataaatgatcactatggcaacacgtcctttatgtgtgctgatgttacatccacggacctgatgattgaagcaaactccattgatctgatattttcaaactggttgctgatgtatctttcagatgaggagattgacaagttggtagaaagaatggtaaaatggttgaaggtcggtggttatatcttctttagggaatcttgcttccatcaaactggagatacagaaaggaaatttaacccaacacactatcgagaaccaaggttttataccaaggtatttaaagaatgccaaacctttaatcaggatggcacttccttcaaactttctttgattacattcaaatgcattggagcttatgtaaacatcaagaaagatcaaaaccagatatgttggctatggaaaaaagtaaactcatcagaagatgggggatttcaaagttttttggacaatgtgcagtacaaagccactggaatactacgctatgaacgtatctttggagatggctacgtgagtactggtggagctgagactacaaaagaatttgtggagaaactgaatcttaagcctgggcagaaggtgcttgatgttggatgtggaattgggggaggtgacttttatatggctgagaagtatggtacacatgttgttggtattgacctttccattaacatgattatgtttgcccttgagcgttccattggatgtaagtgcttagttgagtttgaagttgctgattgcaccacaaagacatacccagaccacatgtttgatgtcatctacagtcgtgacactatccttcatatacaagataaaccctccttgtttaaaagtttcttcaaatggctgaaacccgggggaaaggttctaatcagtgattactgcaagagtcctggaaaaccatcagaagagtttgcaacatacattaagcagaggggttatgatctccatgatgtggaggcttatggacagaaggagctagacaaatttgagaagaacaaagatgatttcctgtctgagtttgcccaggaggattatgacgatatcgtgaatggatggaaggcaaaactgcagaggagctctgctggtgagcagaggtgggggctgttcgtcgccaccaagtgatgcgcgtgcgtgtggctttattacaaataacatttggagctctgctggtgagcagaggtgggggctgttcgtcgccaccaagtgatgcgcgtgcgtgtggctttattacaaataaatttgaagctctgctggtgagcagaggtgggctgttcgtcgccaccaagtgatgcgcgtgcgtgtggctttattacaaataaatttgcttctgcaattcaccgatgggattcgcttcataacgtgattttacataactgaactcagagagcctatcctattgctttgtgttttgggacaatgagactgatataacttttacggtcctgttaaatatagagtgtgctgtactgatgctcctcatggctgtggctacatggttgacacgtgacatgagatttgttattttcatatttttttagaaaaatattttgcatctcaacttttgaccaatgtgcatcagatgcattgaatctgtgcatcatttta

SEQ ID NO: 36837 - DNA, 2045 bp, Zea Mays
tggcaaatatcaaaatctctcccattccactgcccctaccacagttccactggccttcgcttcgccacggttctcgcctcctcgcattctaaacatcgccatgattcggtggttctgaatgcatctcctgtaaccaccgggcccggagcttctcccaagcccgcgtcgccgtcgagggctgttaacctggcaacactctcaccaaccaacaaacaaacgcgcggggtcgctgtaatggccgccgccgccgccgctgtgaatgggagcctagaccgcctagacgtgcatgagaggaaggcgcagaagagctactgggaggagcactctggggagctcaacctcgaggccattatgctcgactcccgtgccgccgaactcgacaaggaggagcgccccgaggttctgtctttacttccttcatatgaagggaaatctatactggagctgggagctggaataggtcgctttactggtgaactggctaaaacatctgggcatgtttttgcagtggatttcgttgaaagtgtgattaaaaagaatggaagtataaatgatcactatggcaacacgtcctttatgtgtgctgatgttacatccacggacctgatgattgaagcaaactccattgatctgatattttcaaactggttgctgatgtatctttcagatgaggagattgacaagttggtagaaagaatggtaaaatggttgaaggtcggtggttatatcttctttagggaatcttgcttccatcaaactggagatacagaaaggaaatttaacccaacacactatcgagaaccaaggttttataccaaggtatttaaagaatgccaaacctttaatcaggatggcacttccttcaaactttctttgattacattcaaatgcattggagcttatgtaaacatcaagaaagatcaaaaccagatatgttggctatggaaaaaagtaaactcatcagaagatgggggatttcaaagttttttggacaatgtgcagtacaaagccactggaatactacgctatgaacgtatctttggagatggctacgtgagtactggtggagctgagactacaaaagaatttgtggagaaactgaatcttaagcctgggcagaaggtgcttgatgttggatgtggaattgggggaggtgacttttatatggctgagaagataaaccctccttgtttaaaagtttcttcaaatggctgaaacccgggggaaaggttctaatcagtgattactgcaagagtcctggaaaaccatcagaagagtttgcaacatacattaagcagaggggttatgatctccatgatgtggaggcttatggacagatgctcaagaatgctggtttcagtcatgtcattgctgaagaccgaactgaccagttcctcagtgttttacagaaggagctagacaaatttgagaagaacaaagatgatttcctgtctgagtttgcccaggaggattatgacgatatcgtgaatggatggaaggcaaaactgcagaggagctctgctggtgagcagaggtgggggctgttcgtcgccaccaagtgatgcgcgtgcgtgtggctttattacaaataacatttggagctctgctggtgagcagaggtgggggctgttcgtcgccaccaagtgatgcgcgtgcgtgtggctttattacaaataaatttgaagctctgctggtgagcagaggtgggctgttcgtcgccaccaagtgatgcgcgtgcgtgtggctttattacaaataaatttgcttctgcaattcaccgatgggattcgcttcataacgtgattttacataactgaactcagagagcctatcctattgctttgtgttttgggacaatgagactgatataacttttacggtcctgttaaatatagagtgtgctgtactgatgctcctcatggctgtggctacatggttgacacgtgacatgagatttgttattttcatatttttttagaaaaatattttgcatctcaacttttgaccaatgtgcatcagatgcattgaatctgtgcatcatttta

SEQ ID NO: 36838 - DNA, 2279 bp, Zea Mays
gcgcagtgcagcatccactcacagcgggagaggggaccggtcatcacggttgatcgtggcaaatatcaaaatctctcccattccactgcccctaccacagttccactggccttcgcttcgccacggttctcgcctcctcgcattctaaacatcgccatgattcggtggttctgaatgcatctcctgtaaccaccgggcccggagcttctcccaagcccgcgtcgccgtcgagggctgttaacctggcaacactctcaccaaccaacaaacaaacgcgcggggtcgctgtaatggccgccgccgccgccgctgtgaatgggagcctagaccgcctagacgtgcatgagaggaaggcgcagaagagctactgggaggagcactctggggagctcaacctcgaggccattatgctcgactcccgtgccgccgaactcgacaaggaggagcgccccgaggttctgtctttacttccttcatatgaagggaaatctatactggagctgggagctggaataggtcgctttactggtgaactggctaaaacatctgggcatgtttttgcagtggatttcgttgaaagtgtgattaaaaagaatggaagtataaatgatcactatggcaacacgtcctttatgtgtgctgatgttacatccacggacctgatgattgaagcaaactccattgatctgatattttcaaactggttgctgatgtatctttcagatgaggagattgacaagttggtagaaagaatggtaaaatggttgaaggtcggtggttatatcttctttagggaatcttgcttccatcaaactggagatacagaaaggaaatttaacccaacacactatcgagaaccaaggttttataccaaggtatttaaagaatgccaaacctttaatcaggatggcacttccttcaaactttctttgattacattcaaatgcattggagcttatgtaaacatcaagaaagatcaaaaccagatatgttggctatggaaaaaagtaaactcatcagaagatgggggatttcaaagttttttggacaatgtgcagtacaaagccactggaatactacgctatgaacgtatctttggagatggctacgtgagtactggtggagctgagactacaaaagaatttgtggagaaactgaatcttaagcctgggcagaaggtgcttgatgttggatgtggaattgggggaggtgacttttatatggctgagaagtatggtacacatgttgttggtattgacctttccattaacatgattatgtttgcccttgagcgttccattggatgtaagtgcttagttgagtttgaagttgctgattgcaccacaaagacatacccagaccacatgtttgatgtcatctacagtcgtgacactatccttcatatacaagataaaccctccttgtttaaaagtttcttcaaatggctgaaacccgggggaaaggttctaatcagtgattactgcaagagtcctggaaaaccatcagaagagtttgcaacatacattaagcagaggggttatgatctccatgatgtggaggcttatggacagatgctcaagaatgctggtttcagtcatgtcattgctgaagaccgaactgaccagttcctcagtgttttacagaaggagctagacaaatttgagaagaacaaagatgatttcctgtctgagtttgcccaggaggattatgacgatatcgtgaatggatggaaggcaaaactgcagaggagctctgctggtgagcagaggtgggggctgttcgtcgccaccaagtgatgcgcgtgcgtgtggctttattacaaataacatttggagctctgctggtgagcagaggtgggggctgttcgtcgccaccaagtgatgcgcgtgcgtgtggctttattacaaataaatttgaagctctgctggtgagcagaggtgggctgttcgtcgccaccaagtgatgcgcgtgcgtgtggctttattacaaataaatttgcttctgcaattcaccgatgggattcgcttcataacgtgattttacataactgaactcagagagcctatcctattgctttgtgttttgggacaatgagactgatataacttttacggtcctgttaaatatagagtgtgctgtactgatgctcctcatggctgtggctacatggttgacacgtgacatgagatttgttattttcatatttttttagaaaaatattttgcatctcaacttttgaccaatgtgcatcagatgcattgaatctgtgcatcatttta

SEQ ID NO: 36839 - DNA, 2131 bp, Zea Mays
cgcgcccgaaatttcacaacaccaaacccgcaggggggagaagcgcaaagccacgaggagtgcgaggcgagggccgacaccggggacaagcacggcgcggcggcggaggcagcaatggcggcgctgcagagttggcgcaaggcgtacggcgcgcttaaggacaccaccaccgtcagcctcgccaatctcaactccgacttcaagagattgtggcggcgacgtccatcgcgaggccacaggcggacgtcacttactgcatccatgcgcttgcccgacgactcgccaaaaccaggaactggatcgttgccctaaagacacttgtagtgatccataggcttcttcgtgaaggtgaccctgcattccgcgaagagtttctaacatttacacagagagtgcggattttgcagctgtcaaacttcaaggatgattccagcccagttgcttgggattatgcttcatgggttcgcacatacggtttatttttggaagaaaaactagaatgcttcagggttttgaagtatgacattgaagctgcacgtttatcaaagcaaggtcaaggacctgaaaagggccacagtagaactacggaattgaattctcaggacttgctggagcaattgccagcactgcagcaattgttatatcgacttattggctgtcgagcagaaggagctgcaaaaaacaattatctggtgcaatatgctctagcccaggttcttaaagaaagcttcaaaatttattgtgcaataaatgatggaattatcaaccttattgacaagttctttgagatgccaaagcatgaagcactaaaagcccttgacgtttacaagagggctgtccaccaggctgggaacctatctgacttctatgaaagttgtcagggtttagagcttgcaagaaatttccagtttcccactttgagggagccaccacaaacattcctttcaaccatggaggagtatgtgaaggaggctccgcgtatgatgccagttgtagagccactggagcttcctgagcggcttcttctgacatacaaaccagaagaagaagttcatgataccgttccaattgtagcggagaaactgcaagttgttgaagaaattgctccagttccttcttcccaaatagctttgcctcccaagcctgagattgcagatactggtgatttactggggttaggtgattcaacccctactgtgttggcgatagaggagagcagtgctttggccttggccattcttccgacaggtattgataactcaacaacaactacacagcaagatagtggatttgatccaacaggatgggaacttgctcttgttactacaagcagcaatgcgactccactgtctatggagagtaatttgggtggtggatttgacaagctcacattggacagcctatacgatgatggaacctacaggcagatgcagcaacaacagctatacggatcagcccctcccaatccattcatggcaagcgatcccttcgccgtatcaaatcaagtagctcccccaccatcagttcaaatggcggccatggctccacagccccagcatttgcccatgatgattgaaccaaatcccttcggaccaccacagcagcatcacgcgggcgtcgctcctgcagcaaaccccttcctcgacgccgggttcggtgcgttcccggcagtaaatggaatgcatccacagaccaaccccttcggaggcgccgcacaacttctctagtcatatatactttgcaaagtttgcattacaattacatagaagatgtgcaatctgtagatacccacgcaacgatgcaagacaagcaattgacgtctgtggaatcgcttttctccgtcagaccgttaccaatcagggaatcgccatgttgcaccagcctcttctcgcccttccttaggctttggccgcttggcctttcttgtgtagctttctgttttgctgtgtctggttttccatcttccgtggcgagccattgcacccattgtaaagaaatttgtttcatcaggctttgggctgataaaatcatgagtacgtgccaataaggcaataacccatcagcgtttgcatttgtgtaactcctgatgaccgtgcgaatattttcgcaattggtcccaaaccacttttgg

SEQ ID NO: 36840 - DNA, 2197 bp, Zea Mays
cgcgcccgaaatttcacaacaccaaacccgcaggggggagaagcgcaaagccacgaggagtgcgaggcgagggccgacaccggggacaagcacggcgcggcggcggaggcagcaatggcggcgctgcagagttggcgcaaggcgtacggcgcgcttaaggacaccaccaccgtcagcctcgccaatctcaactccgacttcaaggatctggatgtcgcgatcgtgagggccaccaaccacgtggagagcccgcccaaggagcgccacctgcgcaagattgtggcggcgacgtccatcgcgaggccacaggcggacgtcacttactgcatccatgcgcttgcccgacgactcgccaaaaccaggaactggatcgttgccctaaagacacttgtagtgatccataggcttcttcgtgaaggtgaccctgcattccgcgaagagtttctaacatttacacagagagtgcggattttgcagctgtcaaacttcaaggatgattccagcccagttgcttgggattatgcttcatgggttcgcacatacggtttatttttggaagaaaaactagaatgcttcagggttttgaagtatgacattgaagctgcacgtttatcaaagcaaggtcaaggacctgaaaagggccacagtagaactacggaattgaattctcaggacttgctggagcaattgccagcactgcagcaattgttatatcgacttattggctgtcgaaaggagctgcaaaaaacaattatctggtgcaatatgctctagcccaggttcttaaagaaagcttcaaaatttattgtgcaataaatgatggaattatcaaccttattgacaagttctttgagatgccaaagcatgaagcactaaaagcccttgacgtttacaagagggctgtccaccaggctgggaacctatctgacttctatgaaagttgtcagggtttagagcttgcaagaaatttccagtttcccactttgagggagccaccacaaacattcctttcaaccatggaggagtatgtgaaggaggctccgcgtatgatgccagttgtagagccactggagcttcctgagcggcttcttctgacatacaaaccagaagaagaagttcatgataccgttccaattgtagcggagaaactgcaagttgttgaagaaattgctccagttccttcttcccaaatagctttgcctcccaagcctgagattgcagatactggtgatttactggggttaggtgattcaacccctactgtgttggcgatagaggagagcagtgctttggccttggccattcttccgacaggtattgataactcaacaacaactacacagcaagatagtggatttgatccaacaggatgggaacttgctcttgttactacaagcagcaatgcgactccactgtctatggagagtaatttgggtggtggatttgacaagctcacattggacagcctatacgatgatggaacctacaggcagatgcagcaacaacagctatacggatcagcccctcccaatccattcatggcaagcgatcccttcgccgtatcaaatcaagtagctcccccaccatcagttcaaatggcggccatggctccacagccccagcatttgcccatgatgattgaaccaaatcccttcggaccaccacagcagcatcacgcgggcgtcgctcctgcagcaaaccccttcctcgacgccgggttcggtgcgttcccggcagtaaatggaatgcatccacagaccaaccccttcggaggcgccgcacaacttctctagtcatatatactttgcaaagtttgcattacaattacatagaagatgtgcaatctgtagatacccacgcaacgatgcaagacaagcaattgacgtctgtggaatcgcttttctccgtcagaccgttaccaatcagggaatcgccatgttgcaccagcctcttctcgcccttccttaggctttggccgcttggcctttcttgtgtagctttctgttttgctgtgtctggttttccatcttccgtggcgagccattgcacccattgtaaagaaatttgtttcatcaggctttgggctgataaaatcatgagtacgtgccaataaggcaataacccatcagcgtttgcatttgtgtaactcctgatgaccgtgcgaatattttcgcaattggtcccaaaccacttttgg

SEQ ID NO: 36841 - DNA, 2286 bp, Zea Mays
cgtggaaggtgaggaacgcgcttccgtgcgtgcaggagggtccccctatttgttgggggacgggaaggttggcagttctctgtaccgcgcgctcgcgcccgaaatttcacaacaccaaacccgcaggggggagaagcgcaaagccacgaggagtgcgaggcgagggccgacaccggggacaagcacggcgcggcggcggaggcagcaatggcggcgctgcagagttggcgcaaggcgtacggcgcgcttaaggacaccaccaccgtcagcctcgccaatctcaactccgacttcaaggatctggatgtcgcgatcgtgagggccaccaaccacgtggagagcccgcccaaggagcgccacctgcgcaagattgtggcggcgacgtccatcgcgaggccacaggcggacgtcacttactgcatccatgcgcttgcccgacgactcgccaaaaccaggaactggatcgttgccctaaagacacttgtagtgatccataggcttcttcgtgaaggtgaccctgcattccgcgaagagtttctaacatttacacagagagtgcggattttgcagctgtcaaacttcaaggatgattccagcccagttgcttgggattatgcttcatgggttcgcacatacggtttatttttggaagaaaaactagaatgcttcagggttttgaagtatgacattgaagctgcacgtttatcaaagcaaggtcaaggacctgaaaagtagaactacggaattgaattctcaggacttgctggagcaattgccagcactgcagcaattgttatatcgacttattggctgtcgagcagaaggagctgcaaaaaacaattatctggtgcaatatgctctagcccaggttcttaaagaaagcttcaaaatttattgtgcaataaatgatggaattatcaaccttattgacaagttctttgagatgccaaagcatgaagcactaaaagcccttgacgtttacaagagggctgtccaccaggctgggaacctatctgacttctatgaaagttgtcagggtttagagcttgcaagaaatttccagtttcccactttgagggagccaccacaaacattcctttcaaccatggaggagtatgtgaaggaggctccgcgtatgatgccagttgtagagccactggagcttcctgagcggcttcttctgacatacaaaccagaagaagaagttcatgataccgttccaattgtagcggagaaactgcaagttgttgaagaaattgctccagttccttcttcccaaatagctttgcctcccaagcctgagattgcagatactggtgatttactggggttaggtgattcaacccctactgtgttggcgatagaggagagcagtgctttggccttggccattcttccgacaggtattgataactcaacaacaactacacagcaagatagtggatttgatccaacaggatgggaacttgctcttgttactacaagcagcaatgcgactccactgtctatggagagtaatttgggtggtggatttgacaagctcacattggacagcctatacgatgatggaacctacaggcagatgcagcaacaacagctatacggatcagcccctcccaatccattcatggcaagcgatcccttcgccgtatcaaatcaagtagctcccccaccatcagttcaaatggcggccatggctccacagccccagcatttgcccatgatgattgaaccaaatcccttcggaccaccacagcagcatcacgcgggcgtcgctcctgcagcaaaccccttcctcgacgccgggttcggtgcgttcccggcagtaaatggaatgcatccacagaccaaccccttcggaggcgccgcacaacttctctagtcatatatactttgcaaagtttgcattacaattacatagaagatgtgcaatctgtagatacccacgcaacgatgcaagacaagcaattgacgtctgtggaatcgcttttctccgtcagaccgttaccaatcagggaatcgccatgttgcaccagcctcttctcgcccttccttaggctttggccgcttggcctttcttgtgtagctttctgttttgctgtgtctggttttccatcttccgtggcgagccattgcacccattgtaaagaaatttgtttcatcaggctttgggctgataaaatcatgagtacgtgccaataaggcaataacccatcagcgtttgcatttgtgtaactcctgatgaccgtgcgaatattttcgcaattggtcccaaaccacttttgg

SEQ ID NO: 36842 - DNA, 2850 bp, Zea Mays
ggcgtggaaggtgaggaacgcgcttccgtgcgtgcaggagggtccccctatttgttgggggacgggaaggttggcagttctctgtaccgcgcgctcgcgcccgaaatttcacaacaccaaacccgcaggggggagaagcgcaaagccacgaggagtgcgaggcgagggccgacaccggggacaagcacggcgcggcggcggaggcagcaatggcggcgctgcagagttggcgcaaggcgtacggcgcgcttaaggacaccaccaccgtcagcctcgccaatctcaactccgacttcaaggatctggatgtcgcgatcgtgagggccaccaaccacgtggagagcccgcccaaggagcgccacctgcgcaagattgtggcggcgacgtccatcgcgaggccacaggcggacgtcacttactgcatccatgcgcttgcccgacgactcgccaaaaccaggaactggatcgttgccctaaagacacttgtagtgatccataggcttcttcgtgaaggtgaccctgcattccgcgaagagtttctaacatttacacagagagtgcggattttgcagctgtcaaacttcaaggatgattccagcccagttgcttgggattatgcttcatgggttcgcacatacggtttatttttggaagaaaaactagaatgcttcagggttttgaagtatgacattgaagctgcacgtttatcaaagcaaggtcaaggacctgaaaagggccacagtagaactacggaattgaattctcaggacttgctggagcaattgccagcactgcagcaattgttatatcgacttattggctgtcgagcagaaggagctgcaaaaaacaattatctggtgcaatatgctctagcccaggttcttaaagaaagcttcaaaatttattgtgcaataaatgatggaattatcaaccttattgacaagttctttgagatgccaaagcatgaagcactaaaagcccttgacgtttacaagagggctgtccaccaggctgggaacctatctgacttctatgaaagttgtcagggtttagagcttgcaagaaatttccagtttcccactttgagggagccaccacaaacattcctttcaaccatggaggagtatgtgaaggaggctccgcgtatgatgccagttgtagagccactggttatttcctgggctctagtaaaccatttggatttttgcatgacaccttcacattttataacaagtagcagcctcaatgtgtgatacttcatgtgccttgcatgttaaagtagagcatatcataaccatggcgaaactagagcaaattagagggtgatggtagtggggtgtccttaccttgcacatacatgttccacaggggttgtatgtatggtgaaaaattagacaacatcattgctttaacatttatagggggtacatttgagttgagccccctaatctcaatgtagcttgcactgatcacaacttcattcttctttatatctaacgacagcaagctacctgatgtagggaaacagttagcatcaataattgtggcctagtgaacaatttctcttttactttgacatttttgtgataattgtgtcatcagtgtgaatgtcacacactctttttgggagataaatgattaccgtcaagtcaagtttataccagccgatttacttattgtggaatggattcttaaatacggactatccttcttatttcaccaggagcttcctgagcggcttcttctgacatacaaaccagaagaagaagttcatgataccgttccaattgtagcggagaaactgcaagttgttgaagaaattgctccagttccttcttcccaaatagctttgcctcccaagcctgagattgcagatactggtgatttactggggttaggtgattcaacccctactgtgttggcgatagaggagagcagtgctttggccttggccattcttccgacaggtattgataactcaacaacaactacacagcaagatagtggatttgatccaacaggatgggaacttgctcttgttactacaagcagcaatgcgactccactgtctatggagagtaatttgggtggtggatttgacaagctcacattggacagcctatacgatgatggaacctacaggcagatgcagcaacaacagctatacggatcagcccctcccaatccattcatggcaagcgatcccttcgccgtatcaaatcaagtagctcccccaccatcagttcaaatggcggccatggctccacagccccagcatttgcccatgatgattgaaccaaatcccttcggaccaccacagcagcatcacgcgggcgtcgctcctgcagcaaaccccttcctcgacgccgggttcggtgcgttcccggcagtaaatggaatgcatccacagaccaaccccttcggaggcgccgcacaacttctctagtcatatatactttgcaaagtttgcattacaattacatagaagatgtgcaatctgtagatacccacgcaacgatgcaagacaagcaattgacgtctgtggaatcgcttttctccgtcagaccgttaccaatcagggaatcgccatgttgcaccagcctcttctcgcccttccttaggctttggccgcttggcctttcttgtgtagctttctgttttgctgtgtctggttttccatcttccgtggcgagccattgcacccattgtaaagaaatttgtttcatcaggctttgggctgataaaatcatgagtacgtgccaataaggcaataacccatcagcgtttgcatttgtgtaactcctgatgaccgtgcgaatattttcgcaattggtcccaaaccacttttgg

SEQ ID NO: 36843 - DNA, 2437 bp, Zea Mays
gtaagttcaacataggggatatactgatactacgaacagaccaatcagtgttcagaatgatactacgaacagaccaatcagtgttcagaatcgtcatgcttacttactgcatgctcagccggggtggtagccatgcaaagaagttcaaacatgctgccaaataatggatggatattgacaacgattccgtcacctggaatttggaactgaggtatactaataaacaagggttgcgcgatcaatcatcagaacctccattggcgtggaaggggggagaagcgcaaagccacgaggagtgcgaggcgagggccgacaccggggacaagcacggcgcggcggcggaggcagcaatggcggcgctgcagagttggcgcaaggcgtacggcgcgcttaaggacaccaccaccgtcagcctcgccaatctcaactccgacttcaaggatctggatgtcgcgatcgtgagggccaccaaccacgtggagagcccgcccaaggagcgccacctgcgcaagattgtggcggcgacgtccatcgcgaggccacaggcggacgtcacttactgcatccatgcgcttgcccgacgactcgccaaaaccaggaactggatcgttgccctaaagacacttgtagtgatccataggcttcttcgtgaaggtgaccctgcattccgcgaagagtttctaacatttacacagagagtgcggattttgcagctgtcaaacttcaaggatgattccagcccagttgcttgggattatgcttcatgggttcgcacatacggtttatttttggaagaaaaactagaatgcttcagggttttgaagtatgacattgaagctgcacgtttatcaaagcaaggtcaaggacctgaaaagggccacagtagaactacggaattgaattctcaggacttgctggagcaattgccagcactgcagcaattgttatatcgacttattggctgtcgagcagaaggagctgcaaaaaacaattatctggtgcaatatgctctagcccaggttcttaaagaaagcttcaaaatttattgtgcaataaatgatggaattatcaaccttattgacaagttctttgagatgccaaagcatgaagcactaaaagcccttgacgtttacaagagggctgtccaccaggctgggaacctatctgacttctatgaaagttgtcagggtttagagcttgcaagaaatttccagtttcccactttgagggagccaccacaaacattcctttcaaccatggaggagtatgtgaaggaggctccgcgtatgatgccagttgtagagccactggagcttcctgagcggcttcttctgacatacaaaccagaagaagaagttcatgataccgttccaattgtagcggagaaactgcaagttgttgaagaaattgctccagttccttcttcccaaatagctttgcctcccaagcctgagattgcagatactggtgatttactggggttaggtgattcaacccctactgtgttggcgatagaggagagcagtgctttggccttggccattcttccgacaggtattgataactcaacaacaactacacagcaagatagtggatttgatccaacaggatgggaacttgctcttgttactacaagcagcaatgcgactccactgtctatggagagtaatttgggtggtggatttgacaagctcacattggacagcctatacgatgatggaacctacaggcagatgcagcaacaacagctatacggatcagcccctcccaatccattcatggcaagcgatcccttcgccgtatcaaatcaagtagctcccccaccatcagttcaaatggcggccatggctccacagccccagcatttgcccatgatgattgaaccaaatcccttcggaccaccacagcagcatcacgcgggcgtcgctcctgcagcaaaccccttcctcgacgccgggttcggtgcgttcccggcagtaaatggaatgcatccacagaccaaccccttcggaggcgccgcacaacttctctagtcatatatactttgcaaagtttgcattacaattacatagaagatgtgcaatctgtagatacccacgcaacgatgcaagacaagcaattgacgtctgtggaatcgcttttctccgtcagaccgttaccaatcagggaatcgccatgttgcaccagcctcttctcgcccttccttaggctttggccgcttggcctttcttgtgtagctttctgttttgctgtgtctggttttccatcttccgtggcgagccattgcacccattgtaaagaaatttgtttcatcaggctttgggctgataaaatcatgagtacgtgccaataaggcaataacccatcagcgtttgcatttgtgtaactcctgatgaccgtgcgaatattttcgcaattggtcccaaaccacttttgg

SEQ ID NO: 36844 - DNA, 3047 bp, Zea Mays
ctgccctctccgattcacttctagctgcgctcctccatggtgttggtgacttcgtcgccgtgggttccacggctaccgccggagacatgtgccgcgctgcctgttcgtgaatatggcctgagcggctgagccaccgaaacattcggtgggcgggcgattcctgccttccgccaaccacgcccggcgccaccgtctgtttgcttctcacatccaagtacggtggcgcccagctggcggctccgggacgcgccagctaccctcagctaccgaaagggaaatctggcgaagaatcaactgaaaagaattcgcacaacgaagttccagagaccgacgttcgagagacaggcgagacgtgcttgtcaaataccagcgcctctcgcttcccggcttcccgccgagcctttctcttcttccttcctgaagaaatccttctccaacaagctagatgcaggaccaacggaccattcaggacatcatgacgagctgtctcaagagccctgacaattgcaaccagaccacaccatgcctgcctaattccgtacgtagtaagttcaacataggggatatactgatactacgaacagaccaatcagtgttcagaatgatactacgaacagaccaatcagtgttcagaatcgtcatgcttacttactgcatgctcagccggggtggtagccatgcaaagaagttcaaacatgctgccaaataatggatggatattgacaacgattccgtcacctgaacctccattggcgtggaaggtgaggaacgcgcttccgtgcgtgcaggagggtccccctatttgttgggggacgggaaggttggcagttctctgtaccgcgcgctcgcgcccgaaatttcacaacaccaaacccgcaggggggagaagcgcaaagccacgaggagtgcgaggcgagggccgacaccggggacaagcacggcgcggcggcggaggcagcaatggcggcgctgcagagttggcgcaaggcgtacggcgcgcttaaggacaccaccaccgtcagcctcgccaatctcaactccgacttcaaggatctggatgtcgcgatcgtgagggccaccaaccacgtggagagcccgcccaaggagcgccacctgcgcaagattgtggcggcgacgtccatcgcgaggccacaggcggacgtcacttactgcatccatgcgcttgcccgacgactcgccaaaaccaggaactggatcgttgccctaaagacacttgtagtgatccataggcttcttcgtgaaggtgaccctgcattccgcgaagagtttctaacatttacacagagagtgcggattttgcagctgtcaaacttcaaggatgattccagcccagttgcttgggattatgcttcatgggttcgcacatacggtttatttttggaagaaaaactagaatgcttcagggttttgaagtatgacattgaagctgcacgtttatcaaagcaaggtcaaggacctgaaaagggccacagtagaactacggaattgaattctcaggacttgctggagcaattgccagcactgcagcaattgttatatcgacttattggctgtcgagcagaaggagctgcaaaaaacaattatctggtgcaatatgctctagcccaggttcttaaagaaagcttcaaaatttattgtgcaataaatgatggaattatcaaccttattgacaagttctttgagatgccaaagcatgaagcactaaaagcccttgacgtttacaagagggctgtccaccaggctgggaacctatctgacttctatgaaagttgtcagggtttagagcttgcaagaaatttccagtttcccactttgagggagccaccacaaacattcctttcaaccatggaggagtatgtgaaggaggctccgcgtatgatgccagttgtagagccactggagcttcctgagcggcttcttctgacatacaaaccagaagaagaagttcatgataccgttccaattgtagcggagaaactgcaagttgttgaagaaattgctccagttccttcttcccaaatagctttgcctcccaagcctgagattgcagatactggtgatttactggggttaggtgattcaacccctactgtgttggcgatagaggagagcagtgctttggccttggccattcttccgacaggtattgataactcaacaacaactacacagcaagatagtggatttgatccaacaggatgggaacttgctcttgttactacaagcagcaatgcgactccactgtctatggagagtaatttgggtggtggatttgacaagctcacattggacagcctatacgatgatggaacctacaggcagatgcagcaacaacagctatacggatcagcccctcccaatccattcatggcaagcgatcccttcgccgtatcaaatcaagtagctcccccaccatcagttcaaatggcggccatggctccacagccccagcatttgcccatgatgattgaaccaaatcccttcggaccaccacagcagcatcacgcgggcgtcgctcctgcagcaaaccccttcctcgacgccgggttcggtgcgttcccggcagtaaatggaatgcatccacagaccaaccccttcggaggcgccgcacaacttctctagtcatatatactttgcaaagtttgcattacaattacatagaagatgtgcaatctgtagatacccacgcaacgatgcaagacaagcaattgacgtctgtggaatcgcttttctccgtcagaccgttaccaatcagggaatcgccatgttgcaccagcctcttctcgcccttccttaggctttggccgcttggcctttcttgtgtagctttctgttttgctgtgtctggttttccatcttccgtggcgagccattgcacccattgtaaagaaatttgtttcatcaggctttgggctgataaaatcatgagtacgtgccaataaggcaataacccatcagcgtttgcatttgtgtaactcctgatgaccgtgcgaatattttcgcaattggtcccaaaccacttttgg

SEQ ID NO: 36845 - DNA, 815 bp, Zea Mays
tccagatgttccaaaatagtgtatatcaccaccccattaaaatttcagcaagttatccactgtagatcaggccatcaggggtggagctacatgatcttattggggtcagctgacccctataaaattttagcagattctaacacatttactgttggtgtatttgtgtgatgattagtggagctggcccaataactctgatgtctggctttgcccctgcagcagatcagtggcactttaaagaatacaaactcaaatcagaagccatcaaaaccaacatacggatttaaaaatgtccttgaaacatactttgtttgaccaaataatgttatatatcatatcatgaatcatgaaaacttcgaatgtctggatacccccacaggcatgattttttccctctccatcattccaaagctccatccttcaacaaattaaacaaactttgacaccatcgtgtttacctcataccaaatggtatcagcaaagtcaagctaaatccactgagcattcctctagcatattgtgagcttatgcaaaataaacgctagtttgtccatgccgttgctgatatcaagttccaaattagacaaccaagtacctagagacccatcaggatgccagttgtgcaactaacaaaaatcacaacttaggtcaagcccaagctcataaaaatctcacagaaacagtatcaggtacacggatgcagaacgaagcatgtcagatctacgaaggttactaatataacaatttcaacaacgtgaatcactactgaactaaaaacagtcacgagtcccgaaattcatggagataacggacct

SEQ ID NO: 36846 - DNA, 897 bp, Zea Mays
taatggtcatttggatcattacaaactccaatgaaacctaccggaaaatgaaatcaaagaaataaacaaatatgatgcattgacccgatgtaaaatattttccttgattaccaggtcaccgcaggaaattgctaacgacagcgattatgtgtttgctaacactagtagcaaaactcaattaactaatgtacagaagttgttacaacaatggttagactaaatcggtcaaatgcctgctccctataaaaggaatgcagcagctgtaatctgacttaggaaaacagttaagatggggtaatatggactttcctgtaatcatcctccttgcgtcttcttcgtctctgcctgcaagggccagactcccaggaccacgacgacgggactacattttgccacagcagtaaagctactatacaagttggatgacttccgttccgctggagcaaactctccaatctccaggacagacaggatctcacgccatacaatcacctcggtggcttctgtcaacatctctttctccatgcggagtagcttataatcaacccgtcattgcaaaatagtatacatcagaggggcggcaatcttcattgacacagatctgtctgttctgcgtactaatgtctacaaagatctgtatgtgcatcgacctttcttgcatctgatggcttccacagtatattcacatcagagttgcaccaggaagagaggtggttgcatccgctgtttgtaatgtagctgtcacaaatgccatcggtgcctgctgtgtttcactaaaaatacccagaatgttcaaaatctgggcaaggtgttatgcatattccgctgattaacaaaggaagaaagaggtgtccgaagattgggatatttattcaacataaattcaagttgtggtgg

SEQ ID NO: 36847 - DNA, 2299 bp, Zea Mays
gtctccgcctagtcgctcgccatactacctcctcagacaccggcggcggccatgccgcctccgcgtccgacgcaccccccacttccctctcctctgccgcccgggccgcctcccctaagcgcccgtcgtctccctctcccgcccaaccgcccggcccccacgtctctcctcctcgcgccgccctcctccccagcccgtgccctcgcgcttctcttccccgactcctccgcccatctcttcccgtccctaccctccgtctcccccttcgccacctcttatcccgctcacacccccgtcccatcaccactcgccgccgccgcctccttcgcgctcctcctgccgtcgtcacacctcatcttcctatccgcgcatccgtccccttccaactcctctgtccacctccgcgcctattccctcgctcccgcgcccgctttcccgcgctttgcgcccgcctcgctctccttcaagcgccatgcctcagctgcaggcctgccgctccaggacctacccttcggcattggcgtccgcctggccggcggggtcaacgccgtctcgctgctctcactgtccaccggccagatctgggtgctctctccgaagctggccgcggacggccggacagtggagctgcacaagtgcgcggtcgtcgagctcgagccggcgcggcccgtgtacgcaatggaagtcgcaatgggaaggctgctgctcggggaggttggcggtttgcgcgtcttcccgctacggggtttgatgaagggtggaaaggagagggatgtgaagaaggaagttgctgtggtagtaggaaggaagggctgccacaagaagaatgggatgctgaatggcttagttgtgccagttaatcgtgttagctatgggggcaatggtgaaggtgattttgtttcgacttgtaagctcacaactctgagggtaaaacagagttcaggaagctattgttctttttcgttggcatttcaaaatgatgatcaaaagtcagaaggcagcatggaattgctgaattcagtgaaagctatttcgatccatcctctttccaataacaagtttttggtactggattcatctggagtgttgcatgtcttcattttttcaacaacacaaatggtctcaagaggtgccatcaagcaatgttctgaaaatatccatacatatcgcttgcattatcccatgaaagtgcaattatctgctgtcttttcagttacctctataaagtgtttgtgcagagacacaatttttttgggtttcagatggtggacatactgtacatgttatgtccgcagttgagactgaatcccctaacggtgataatggagacgttactggagaaagagagttagcacctatcaagctttcagctattgaagcaatctttacaagcgaaagagttgaggacattgtatctatctccaaggattcagttcttatccttggtcaaggcaacatgtttctgtatggaacttcttgaatttggttctttatcatgcatggtggatacctcactgttctttagggcatggttcaagactttgcagctttggatggtcttttggctaaagacaggatgagttttggtgattttgaagatgaacttatccaccagtccttgaagtcgtgagctttactatttattaatcacagtaagcagatgaaaaaagctcatgttttttcagaggacagcaagaatctgaaggtgacgccagattatggacggaccacgccgtaatgaccctattgctctgcatgcgtactttacatgcaaagactggcacaattcttgttgatatgacttggaaagagcaatgctgccaaatctattcccagtctcagttgtcgtggaaagtggatcaccatgagggccattcagctatggaataatacagctggtgctagactgctagtgtaattcagggactggacttgcggtgtggtggagtcgaggtttgggcatgttacttactgcatactacctctgttcttaaatatttgtcacccgctagtcatttttgaattaaacggtgacaaattaaaaagaacggagggagtatatcaaaaaaggaataatgtagtactcttgtaagagttaagatggaatgttgaaaggcgcgactttgagccattcttatcattggttttttattgctgtattttttttgtgacattccactattccggtatacccaaatcattcctggttggttgtgtaatcacgctttaggctgtcctcactggtaagtggtggaccccccattttagtgagtgctcacaacttgacatgtttattgga

SEQ ID NO: 36848 - DNA, 2286 bp, Zea Mays
gtctccgcctagtcgctcgccatactacctcctcagacaccggcggcggccatgccgcctccgcgtccgacgcaccccccacttccctctcctctgccgcccgggccgcctcccctaagcgcccgtcgtctccctctcccgcccaaccgcccggcccccacgtctctcctcctcgcgccgccctcctccccagcccgtgccctcgcgcttctcttccccgactcctccgcccatctcttcccgtccctaccctccgtctcccccttcgccacctcttatcccgctcacacccccgtcccatcaccactcgccgccgccgcctccttcgcgctcctcctgccgtcgtcacacctcatcttcctatccgcgcatccgtccccttccaactcctctgtccacctccgcgcctattccctcgctcccgcgcccgctttcccgcgctttgcgcccgcctcgctctccttcaagcgccatgcctcagctgcaggcctgccgctccaggacctacccttcggcattggcgtccgcctggccggcggggtcaacgccgtctcgctgctctcactgtccaccggccagatctgggtgctctctccgaagctggccgcggacggccggacagtggagctgcacaagtgcgcggtcgtcgagctcgagccggcgcggcccgtgtacgcaatggaagtcgcaatgggaaggctgctgctcggggaggttggcggtttgcgcgtcttcccgctacggggtttgatgaagggtggaaaggagagggatgtgaagaaggaagttgctgtggtagtaggaaggaagggctgccacaagaagaatgggatgctgaatggcttagttgtgccagttaatcgtgttagctatgggggcaatggtgaaggtgattttgtttcgacttgtaagctcacaactctgagggtaaaacagagttcaggaagctattgttctttttcgttggcatttcaaaatgatgatcaaaagtcagaaggcagcatggaattgctgaattcagtgaaagctatttcgatccatcctctttccaataacaagtttttggtactggattcatctggagtgttgcatgtcttcattttttcaacaacacaaatggtctcaagaggtgccatcaagcaatgttctgaaaatatccatacatatcgcttgcattatcccatgaaagtgcaattatctgctgtcttttcagttacctctataaagacacaatttttttgggtttcagatggtggacatactgtacatgttatgtccgcagttgagactgaatcccctaacggtgataatggagacgttactggagaaagagagttagcacctatcaagctttcagctattgaagcaatctttacaagcgaaagagttgaggacattgtatctatctccaaggattcagttcttatccttggtcaaggcaacatgtttctgtatggaacttcttgaatttggttctttatcatgcatggtggatacctcactgttctttagggcatggttcaagactttgcagctttggatggtcttttggctaaagacaggatgagttttggtgattttgaagatgaacttatccaccagtccttgaagtcgtgagctttactatttattaatcacagtaagcagatgaaaaaagctcatgttttttcagaggacagcaagaatctgaaggtgacgccagattatggacggaccacgccgtaatgaccctattgctctgcatgcgtactttacatgcaaagactggcacaattcttgttgatatgacttggaaagagcaatgctgccaaatctattcccagtctcagttgtcgtggaaagtggatcaccatgagggccattcagctatggaataatacagctggtgctagactgctagtgtaattcagggactggacttgcggtgtggtggagtcgaggtttgggcatgttacttactgcatactacctctgttcttaaatatttgtcacccgctagtcatttttgaattaaacggtgacaaattaaaaagaacggagggagtatatcaaaaaaggaataatgtagtactcttgtaagagttaagatggaatgttgaaaggcgcgactttgagccattcttatcattggttttttattgctgtattttttttgtgacattccactattccggtatacccaaatcattcctggttggttgtgtaatcacgctttaggctgtcctcactggtaagtggtggaccccccattttagtgagtgctcacaacttgacatgtttattgga

SEQ ID NO: 36849 - DNA, 2253 bp, Zea Mays
gtctccgcctagtcgctcgccatactacctcctcagacaccggcggcggccatgccgcctccgcgtccgacgcaccccccacttccctctcctctgccgcccgggccgcctcccctaagcgcccgtcgtctccctctcccgcccaaccgcccggcccccacgtctctcctcctcgcgccgccctcctccccagcccgtgccctcgcgcttctcttccccgactcctccgcccatctcttcccgtccctaccctccgtctcccccttcgccacctcttatcccgctcacacccccgtcccatcaccactcgccgccgccgcctccttcgcgctcctcctgccgtcgtcacacctcatcttcctatccgcgcatccgtccccttccaactcctctgtccacctccgcgcctattccctcgctcccgcgcccgctttcccgcgctttgcgcccgcctcgctctccttcaagcgccatgcctcagctgcaggcctgccgctccaggacctacccttcggcattggcgtccgcctggccggcggggtcaacgccgtctcgctgctctcactgtccaccggccagatctgggtgctctctccgaagctggccgcggacggccggacagtggagctgcacaagtgcgcggtcgtcgagctcgagccggcgcggcccgtgtacgcaatggaagtcgcaatgggaaggctgctgctcggggaggttggcggtttgcgcgtcttcccgctacggggtttgatgaagggtggaaaggagagggatgtgaagaaggaagttgctgtggtagtaggaaggaagggctgccacaagaagaatgggatgctgaatggcttagttgtgccagttaatcgtgttagctatgggggcaatggtgaaggtgattttgtttcgacttgtaagctcacaactctgagggtaaaacagagttcaggaagctattgttctttttcgttggcatttcaaaatgatgatcaaaagtcagaaggcagcatggaattgctgaattcagtgaaagctatttcgatccatcctctttccaataacaagtttttggtactggattcatctggagtgttgcatgtcttcattttttcaacaacacaaatggtctcaagaggtgccatcaagcaatgttctgaaaatatccatacatatcgcttgcattatcccatgaaagtgcaattatctgctgtcttttcagttacctctataaagacacaatttttttgggtttcagatggtggacatactgtacatgttatgtccgcagttgagactgaatcccctaacggtgataatggagacgttactggagaaagagagttagcacctatcaagctttcagctattgaagcaatctttacaagcgaaagagttgaggacattgtatctatctccaaggattcagttcttatccttggtcaaggcaacatgtttctgtatggaacttcttgaatttggttctttatcatgcatgggcatggttcaagactttgcagctttggatggtcttttggctaaagacaggatgagttttggtgattttgaagatgaacttatccaccagtccttgaagtcgtgagctttactatttattaatcacagtaagcagatgaaaaaagctcatgttttttcagaggacagcaagaatctgaagattatggacggaccacgccgtaatgaccctattgctctgcatgcgtactttacatgcaaagactggcacaattcttgttgatatgacttggaaagagcaatgctgccaaatctattcccagtctcagttgtcgtggaaagtggatcaccatgagggccattcagctatggaataatacagctggtgctagactgctagtgtaattcagggactggacttgcggtgtggtggagtcgaggtttgggcatgttacttactgcatactacctctgttcttaaatatttgtcacccgctagtcatttttgaattaaacggtgacaaattaaaaagaacggagggagtatatcaaaaaaggaataatgtagtactcttgtaagagttaagatggaatgttgaaaggcgcgactttgagccattcttatcattggttttttattgctgtattttttttgtgacattccactattccggtatacccaaatcattcctggttggttgtgtaatcacgctttaggctgtcctcactggtaagtggtggaccccccattttagtgagtgctcacaacttgacatgtttattgga

SEQ ID NO: 36850 - DNA, 2372 bp, Zea Mays
gtctccgcctagtcgctcgccatactacctcctcagacaccggcggcggccatgccgcctccgcgtccgacgcaccccccacttccctctcctctgccgcccgggccgcctcccctaagcgcccgtcgtctccctctcccgcccaaccgcccggcccccacgtctctcctcctcgcgccgccctcctccccagcccgtgccctcgcgcttctcttccccgactcctccgcccatctcttcccgtccctaccctccgtctcccccttcgccacctcttatcccgctcacacccccgtcccatcaccactcgccgccgccgcctccttcgcgctcctcctgccgtcgtcacacctcatcttcctatccgcgcatccgtccccttccaactcctctgtccacctccgcgcctattccctcgctcccgcgcccgctttcccgcgctttgcgcccgcctcgctctccttcaagcgccatgcctcagctgcaggcctgccgctccaggacctacccttcggcattggcgtccgcctggccggcggggtcaacgccgtctcgctgctctcactgtccaccggccagatctgggtgctctctccgaagctggccgcggacggccggacagtggagctgcacaagtgcgcggtcgtcgagctcgagccggcgcggcccgtgtacgcaatggaagtcgcaatgggaaggctgctgctcggggaggttggcggtttgcgcgtcttcccgctacggggtttgatgaagggtggaaaggagagggatgtgaagaaggaagttgctgtggtagtaggaaggaagggctgccacaagaagaatgggatgctgaatggcttagttgtgccagttaatcgtgttagctatgggggcaatggtgaaggtgattttgtttcgacttgtaagctcacaactctgagggtaaaacagagttcaggaagctattgttctttttcgttggcatttcaaaatgatgatcaaaagtcagaaggcagcatggaattgctgaattcagtgaaagctatttcgatccatcctctttccaataacaagtttttggtactggattcatctggagtgttgcatgtcttcattttttcaacaacacaaatggtctcaagaggtgccatcaagcaatgttctgaaaatatccatacatatcgcttgcattatcccatgaaagtgcaattatctgctgtcttttcagttacctctataaagtgtttgtgcagagacacaatttttttgggtttcagatggtggacatactgtacatgttatgtccgcagttgagactgaatcccctaacggtgataatggagacgttactggagaaagagagttagcacctatcaagctttcagctattgaagcaatctttacaagcgaaagagttgaggacattgtatctatctccaaggattcagttcttatccttggtcaaggcaacatgtttctgtatggaacttcttgaatttggttctttatcatgcatggtaagtataatcaaatcaccgtttttgcgtgttactaacaacaattgcttcagcatacgcccttgagtttcatttgatatcaggtggatacctcactgttctttagggcatggttcaagactttgcagctttggatggtcttttggctaaagacaggatgagttttggtgattttgaagatgaacttatccaccagtccttgaagtcgtgagctttactatttattaatcacagtaagcagatgaaaaaagctcatgttttttcagaggacagcaagaatctgaagattatggacggaccacgccgtaatgaccctattgctctgcatgcgtactttacatgcaaagactggcacaattcttgttgatatgacttggaaagagcaatgctgccaaatctattcccagtctcagttgtcgtggaaagtggatcaccatgagggccattcagctatggaataatacagctggtgctagactgctagtgtaattcagggactggacttgcggtgtggtggagtcgaggtttgggcatgttacttactgcatactacctctgttcttaaatatttgtcacccgctagtcatttttgaattaaacggtgacaaattaaaaagaacggagggagtatatcaaaaaaggaataatgtagtactcttgtaagagttaagatggaatgttgaaaggcgcgactttgagccattcttatcattggttttttattgctgtattttttttgtgacattccactattccggtatacccaaatcattcctggttggttgtgtaatcacgctttaggctgtcctcactggtaagtggtggaccccccattttagtgagtgctcacaacttgacatgtttattgga

SEQ ID NO: 36851 - DNA, 2365 bp, Zea Mays
gtctccgcctagtcgctcgccatactacctcctcagacaccggcggcggccatgccgcctccgcgtccgacgcaccccccacttccctctcctctgccgcccgggccgcctcccctaagcgcccgtcgtctccctctcccgcccaaccgcccggcccccacgtctctcctcctcgcgccgccctcctccccagcccgtgccctcgcgcttctcttccccgactcctccgcccatctcttcccgtccctaccctccgtctcccccttcgccacctcttatcccgctcacacccccgtcccatcaccactcgccgccgccgcctccttcgcgctcctcctgccgtcgtcacacctcatcttcctatccgcgcatccgtccccttccaactcctctgtccacctccgcgcctattccctcgctcccgcgcccgctttcccgcgctttgcgcccgcctcgctctccttcaagcgccatgcctcagctgcaggcctgccgctccaggacctacccttcggcattggcgtccgcctggccggcggggtcaacgccgtctcgctgctctcactgtccaccggccagatctgggtgctctctccgaagctggccgcggacggccggacagtggagctgcacaagtgcgcggtcgtcgagctcgagccggcgcggcccgtgtacgcaatggaagtcgcaatgggaaggctgctgctcggggaggttggcggtttgcgcgtcttcccgctacggggtttgatgaagggtggaaaggagagggatgtgaagaaggaagttgctgtggtagtaggaaggaagggctgccacaagaagaatgggatgctgaatggcttagttgtgccagttaatcgtgttagctatgggggcaatggtgaaggtgattttgtttcgacttgtaagctcacaactctgagggtaaaacagagttcaggaagctattgttctttttcgttggcatttcaaaatgatgatcaaaagtcagaaggcagcatggaattgctgaattcagtgaaagctatttcgatccatcctctttccaataacaagtttttggtactggattcatctggagtgttgcatgtcttcattttttcaacaacacaaatggtctcaagaggtgccatcaagcaatgttctgaaaatatccatacatatcgcttgcattatcccatgaaagtgcaattatctgctgtcttttcagttacctctataaagtgtttgtgcagagacacaatttttttgggtttcagatggtggacatactgtacatgttatgtccgcagttgagactgaatcccctaacggtgataatggagacgttactggagaaagagagttagcacctatcaagctttcagctattgaagcaatctttacaagcgaaagagttgaggacattgtatctatctccaaggattcagttcttatccttggtcaaggcaacatgtttctgtatggaacttcttgaatttggttctttatcatgcatggtaagtataatcaaatcaccgtttttgcgtgttactaacaacaattgcttcagcatacgcccttgagtttcatttgatatcaggtggatacctcactgttctttagggcatggttcaagactttgcagctttggatggtcttttggctaaagacaggatgagatgaacttatccaccagtccttgaagtcgtgagctttactatttattaatcacagtaagcagatgaaaaaagctcatgttttttcagaggacagcaagaatctgaaggtgacgccagattatggacggaccacgccgtaatgaccctattgctctgcatgcgtactttacatgcaaagactggcacaattcttgttgatatgacttggaaagagcaatgctgccaaatctattcccagtctcagttgtcgtggaaagtggatcaccatgagggccattcagctatggaataatacagctggtgctagactgctagtgtaattcagggactggacttgcggtgtggtggagtcgaggtttgggcatgttacttactgcatactacctctgttcttaaatatttgtcacccgctagtcatttttgaattaaacggtgacaaattaaaaagaacggagggagtatatcaaaaaaggaataatgtagtactcttgtaagagttaagatggaatgttgaaaggcgcgactttgagccattcttatcattggttttttattgctgtattttttttgtgacattccactattccggtatacccaaatcattcctggttggttgtgtaatcacgctttaggctgtcctcactggtaagtggtggaccccccattttagtgagtgctcacaacttgacatgtttattgga

SEQ ID NO: 36852 - DNA, 2276 bp, Zea Mays
gtctccgcctagtcgctcgccatactacctcctcagacaccggcggcggccatgccgcctccgcgtccgacgcaccccccacttccctctcctctgccgcccgggccgcctcccctaagcgcccgtcgtctccctctcccgcccaaccgcccggcccccacgtctctcctcctcgcgccgccctcctccccagcccgtgccctcgcgcttctcttccccgactcctccgcccatctcttcccgtccctaccctccgtctcccccttcgccacctcttatcccgctcacacccccgtcccatcaccactcgccgccgccgcctccttcgcgctcctcctgccgtcgtcacacctcatcttcctatccgcgcatccgtccccttccaactcctctgtccacctccgcgcctattccctcgctcccgcgcccgctttcccgcgctttgcgcccgcctcgctctccttcaagcgccatgcctcagctgcaggcctgccgctccaggacctacccttcggcattggcgtccgcctggccggcggggtcaacgccgtctcgctgctctcactgtccaccggccagatctgggtgctctctccgaagctggccgcggacggccggacagtggagctgcacaagtgcgcggtcgtcgagctcgagccggcgcggcccgtgtacgcaatggaagtcgcaatgggaaggctgctgctcggggaggttggcggtttgcgcgtcttcccgctacggggtttgatgaagggtggaaaggagagggatgtgaagaaggaagttgctgtggtagtaggaaggaagggctgccacaagaagaatgggatgctgaatggcttagttgtgccagttaatcgtgttagctatgggggcaatggtgaaggtgattttgtttcgacttgtaagctcacaactctgagggtaaaacagagttcaggaagctattgttctttttcgttggcatttcaaaatgatgatcaaaagtcagaaggcagcatggaattgctgaattcagtgaaagctatttcgatccatcctctttccaataacaagtttttggtactggattcatctggagtgttgcatgtcttcattttttcaacaacacaaatggtctcaagaggtgccatcaagcaatgttctgaaaatatccatacatatcgcttgcattatcccatgaaagtgcaattatctgctgtcttttcagttacctctataaagtgtttgtgcagagacacaatttttttgggtttcagatggtggacatactgtacatgttatgtccgcagttgagactgaatcccctaacggtgataatggagacgttactggagaaagagagttagcacctatcaagctttcagctattgaagcaatctttacaagcgaaagagttgaggacattgtatctatctccaaggattcagttcttatccttggtcaaggcaacatgtttctgtatggaacttcttgaatttggttctttatcatgcatgggcatggttcaagactttgcagctttggatggtcttttggctaaagacaggatgagttttggtgattttgaagatgaacttatccaccagtccttgaagtcgtgagctttactatttattaatcacagtaagcagatgaaaaaagctcatgttttttcagaggacagcaagaatctgaaggtgacgccagattatggacggaccacgccgtaatgaccctattgctctgcatgcgtactttacatgcaaagactggcacaattcttgttgatatgacttggaaagagcaatgctgccaaatctattcccagtctcagttgtcgtggaaagtggatcaccatgagggccattcagctatggaataatacagctggtgctagactgctagtgtaattcagggactggacttgcggtgtggtggagtcgaggtttgggcatgttacttactgcatactacctctgttcttaaatatttgtcacccgctagtcatttttgaattaaacggtgacaaattaaaaagaacggagggagtatatcaaaaaaggaataatgtagtactcttgtaagagttaagatggaatgttgaaaggcgcgactttgagccattcttatcattggttttttattgctgtattttttttgtgacattccactattccggtatacccaaatcattcctggttggttgtgtaatcacgctttaggctgtcctcactggtaagtggtggaccccccattttagtgagtgctcacaacttgacatgtttattgga

SEQ ID NO: 36853 - DNA, 1806 bp, Zea Mays
ctccatggcccgacaccaatcctggtctcatcccttctggattgaaccctgctgtgatgcgagacagcgcaatgctggcggcgcgggaggcgaataagcggccgcgcgcagcgccgacgacgaccctccccattgccttctcactgttctacaatgagtatgtcattacgagatcatattagaaagaggagggaagaagaagatgatgacatgatgttgtttattttccctgccttatatctgatgggttcaactagaagtgggggacaaaagaagaaacgccatacatcagatgagacaactccgtatgtgtattgtcaagtattgggaagacaactccgtaggtaagctcacaactctgagggtaaaacagagttcaggaagctattgttctttttcgttggcatttcaaaatgatgatcaaaagtcagaaggcagcatggaattgctgaattcagtgaaagctatttcgatccatcctctttccaataacaagtttttggtactggattcatctggagtgttgcatgtcttcattttttcaacaacacaaatggtctcaagaggtgccatcaagcaatgttctgaaaatatccatacatatcgcttgcattatcccatgaaagtgcaattatctgctgtcttttcagttacctctataaagacacaatttttttgggtttcagatggtggacatactgtacatgttatgtccgcagttgagactgaatcccctaacggtgataatggagacgttactggagaaagagagttagcacctatcaagctttcagctattgaagcaatctttacaagcgaaagagttgaggacattgtatctatctccaaggattcagttcttatccttggtcaaggcaacatgtttctgtatggaacttcttgaatttggttctttatcatgcatggtaagtataatcaaatcaccgtttttgcgtgttactaacaacaattgcttcagcatacgcccttgagtttcatttgatatcaggtggatacctcactgttctttagggcatggttcaagactttgcagctttggatggtcttttggctaaagacaggatgagttttggtgattttgaagatgaacttatccaccagtccttgaagtcgtgagctttactatttattaatcacagtaagcagatgaaaaaagctcatgttttttcagaggacagcaagaatctgaaggtgacgccagattatggacggaccacgccgtaatgaccctattgctctgcatgcgtactttacatgcaaagactggcacaattcttgttgatatgacttggaaagagcaatgctgccaaatctattcccagtctcagttgtcgtggaaagtggatcaccatgagggccattcagctatggaataatacagctggtgctagactgctagtgtaattcagggactggacttgcggtgtggtggagtcgaggtttgggcatgttacttactgcatactacctctgttcttaaatatttgtcacccgctagtcatttttgaattaaacggtgacaaattaaaaagaacggagggagtatatcaaaaaaggaataatgtagtactcttgtaagagttaagatggaatgttgaaaggcgcgactttgagccattcttatcattggttttttattgctgtattttttttgtgacattccactattccggtatacccaaatcattcctggttggttgtgtaatcacgctttaggctgtcctcactggtaagtggtggaccccccattttagtgagtgctcacaacttgacatgtttattgga

SEQ ID NO: 36854 - DNA, 671 bp, Zea Mays
ctccatggcccgacaccaatcctggtctcatcccttctggattgaaccctgctgtgatgcgagacagcgcaatgctggcggcgcgggaggcgaataagcggccgcgcgcagcgccgacgacgaccctccccattgccttctcactatccctacaacaccaattatagttggggaaggtgaacctccctcttgggatccggtaccaactctaaaagttctacaatgagtatgtcattacgagatcatattagaaagaggagggaagaagaagatgatgacatgatgttgtttattttccctgccttatatctgatgggttcaactagaagtgggggacaaaagaagaaacgccatacatcagatgagacaactccgtatgtgtattgtcaagtattgggaagacaactccgtaggtgtgaccattgttattactgtatttgcttatgtagctgattacttatatatctgtttcttggcgagtatgcgtgaacaattgcaagtctttttgttattactgtatgtattaaattgatttgaacagattgagtgcatcctgattgtgtacatgtgctgaaatcctgcaatgttaggattctaggatggcgcaatggtatgctgctctggttttgcactggtttgactgtatggaatggaaccgaattgaactacaa

SEQ ID NO: 36855 - DNA, 792 bp, Zea Mays
tatacttaaccgcccgctgctaatcacactttttcaaatcccctcctactcctccgcacgtccccttggatcaacatcatatggttcagattagaagtttacacggttgcacggaagaattggtttacaccagatatgtttcctagttataaacccttttgctccactcctacaccaatctgccttgtcattttgtcgcaactcatcgccgcttgcttgccctctcctccacccgccgccgcccctgaatcgtcaccggttgctcgccctctcctccactagatgccaccccggctcgccaccggctgctcaccctctcctccacccgccgctacccctactcgccaccccgccgctgcttgctcgccccctcctccacccgccgccccctgctcaccaccccgtcgtcgcttgctcgccccttcctccacccgtcgtgatgccatcgtctcaccgcctcaccacagtttgctcgcctccgccccctgatcgccacctatcgcagccgagtggtcgtgctcatcgcagccaccaccgcttgctcacccccacccacgtcctcatccaccggacgcagattgcacgcaagtgaaggcaagcaaccctcggacgcaaggtaaaaactgtgatccgctctaatggctagtgaaggtgaagcttcacctctacgaaagcgtatgttgttggagttacctagtgaacatcaaagtcagaacttgacatcctcacctcatgcaaatacaactcaaccttttggtgtgtctgcatcatcatcaacacctgctgcaacat

SEQ ID NO: 36856 - DNA, 729 bp, Zea Mays
aaagctaattcctcagccatttggttacatacaaggtttttggaggacccgaaggccctcactatgccccattatgacttagttggggggagaaaggctgtccatgaagtatacccatgtataataaagttcctgtttcaacatgacgaagtgtcttcatgagtctttgccattcatgtctgtaattacaatgttcaagaccacgtcgaaatacatagtaaaattcccagactggaactaaagtcccataggccatatcattagaagcacaggggagactaatcttgctggttgctggcacctcgccgaccccgtatgaaaccttaagaaccgatccggttgactgtatgagatgaatgcagtgtagctgtagttgcacggcggctctcagcggcaacggttgtggacaagaactcgtgtctatgttgcagttccacaaccaaagacaggcgcactgcacagatctccaccagactagacaactttcatggcgttgtttctgaaagtattatatcgtataaattaaataaaatacgagtcaagttaggatttatggcttttccttcgtagtataaaacggcttaggctttttaggtgctttttcggaagttgtttttttttaaaaaaaacgttgtttagtagagctcttgtttttttattgggaaaaggtagagccgaagcgctgtcaaacagctggcgttggtattgatccactctacccaggagcta

SEQ ID NO: 36857 - DNA, 702 bp, Zea Mays
aaagctaattcctcagccatttggttacatacaaggtttttggaggacccgaaggccctcactatgccccattatgacttagttggggggagaaaggctgtccatgaagtatacccatgtataataaagttcctgtttcaacatgacgaagtgtcttcatgagtctttgccattcatgtctgtaattacaatgttcaagaccacgtcgaaatacatagtaaaattcccagactggaactaaagtcccataggccatatcattagaagcacaggggagactaatcttgctggttgctggcacctcgccgaccccgtatgaaaccttaagaaccgattgtagctgtagttgcacggcggctctcagcggcaacggttgtggacaagaactcgtgtctatgttgcagttccacaaccaaagacaggcgcactgcacagatctccaccagactagacaactttcatggcgttgtttctgaaagtattatatcgtataaattaaataaaatacgagtcaagttaggatttatggcttttccttcgtagtataaaacggcttaggctttttaggtgctttttcggaagttgtttttttttaaaaaaaacgttgtttagtagagctcttgtttttttattgggaaaaggtagagccgaagcgctgtcaaacagctggcgttggtattgatccactctacccaggagcta

SEQ ID NO: 36858 - DNA, 1531 bp, Zea Mays
gggtgaggattgaggaaaggatggggacgacacacgcacaccagaactcagggtctcaaccgccgaggccgatcgagcgaggcagaccgacaccatgtggctgccgcacgcgtccgacctccgcgccttcctcgcggctgctgccgtcgcgcatctctcctcctccagggcctcccgcgcctccccgtgcgcgaccccgccacctccgcggttccgcgcgttcgcctcctcccgcgcgtcgccgccgccctcgccctcgcaaacgggatcaatcgcctctgccgccgcagcagcatgcgagcatgtggcggagaagcccgctacatgcacggccgacgagctgcactacgcgcccgtaccgggcaccgagtggcggctcgcgctatggcggtaccttccgccgcctgaggcgccaaagaggaatcacccgctgatgctgctgtctggagtggccacgaacgccattgggttcgacctgtcgcctggggcatcatttgctcgtcatatgtccatgcaaggatttgatacatggattgttgaagtgcgtggtgctggcctaagcacgcgtgaatcagaactagctgcaactaacaccaagtctgacatcactcctgatcctaattttgatgaaagttctacaacaaaagcaagtattgctgttcctgctgagaatatgtccagttctcaacctcaaatttctgaagttccagtaataacagataagaacatggtaggaacaagtatatcagaagaaccacagctggtgacaaagttgtcaaatgctttggcacaattgggtgaaacattctcaggttatgtaaaagatagccggctgaaaaacatagctgacagtttttttgatcgagtgtcagaacttgctcctgctgcctccgtagctagccttgaggaggtttcacaaaggattttaggtttgttggaattgccacagacatcagtgatatctgatcaaattagcaatttaagccagcgccttgtgaagattctgggggaaaaccaacgaagtgtttcccctaagctgtttggctggcaagaacggctctcggcaaccatagaagacctacagaaacagttggagcttattataagctatgattgggactttgaccattatctggaggaggatgtacctgctgcggtttgtaggcattctttcatgtatactactcaaatggtacattggaaacacctttaagaagcgtgcaatattttctgtttgttcagatggattacataagaaaacagagtgtaccaaaggatgggaaattgcttgctattggtcattccatgggaggaatcttattgtatgcaatggtttcaaagtgtggtatgttttgttgacatgtctccttttctcctcgtacatatctagccgtgctggtgaagtttttcttttacttgaaaggaaggatccaaaggggctgagccagagctggcagcaattgttacattggcttcatcagttgactacacaacatccaattcctcactcaagttgctattgccgtttgta

SEQ ID NO: 36859 - DNA, 2229 bp, Zea Mays
aggccagcgacagacaagagcagcgtggatagagcgggatcaagtgtgtgctgtgtggtagttgcgttgcgtcctgtgcttctgattggaggccgccatggatgaggtccccggaaggagcagctccgtgagagctacaaggagcatctttggcgaaagcatcggtgggaggaagccggagatgaacagggcaaggaatgttttaggacaagagaatctgcggccagagatgaagcagctagcaaaatccagcatagataagctgagtgaacgcaagaccgccgtggacagagaaagagccggcgccgagtccgagctgtcgagggcgcgcgccatggcgaaggagctggagcgccaaatagagcaggccaaggcccgggcgtcgtccaagaggtcagagcctcacacaatgcggccggcgaccagggcaagcaagacgggacacggtgcgccgcgctcgcagggggagcggcgcgacgctgccgagtacgcggaggtgtcgcgggagctgaaccgtgccaggcaggagctgctcaggctgcggctggaggtcaagtccgcggcggaggccaaggccaaggccgagagcgacatcgtgtcgtcggcgataaacatccagtctaacctgctcgctgccgacgagatgaagcggctggtggacgaggcgaacgaggagcacgtcctggtggagctcgcgcgcatcgaggccgagcgggagcgccgcgagatcgacgcccagcggtgtgccgaggccgagcggttcgcccgggaaatggaggcgaagctcgcggtgacgaacgctgacgtggaggtcctacaggccgagatggagctggtccgtgccatggagaggaacagtgtcaagaacgacggcactgcggacgtggaggctgaggacaaggcgctgctgcggactgcggaggccgagctggatgccgccaagaaggagctggatagcatcaaggccgggagcttccagttcatgacgtccatggacagcgcgcgcaccgagatcatgcgggtctccgaggaagtgaaccggctcaaggcgcaggagaagaaggcggacgcgcaggtgcagcagctgaacgccaagttgctgaaggcgagggcccggctggaggccctcacggagaccagcgagcggtccaaagcgatcgtttcaaatatgacgtcggcactgcagcagctgcaggacgagaagaaggcggcgatgaaagaggaggagctgaacgagcttgagcaacggtgcgtgcgcgccgagaccgagaacgcgaacgccgagatcgcagcgaccgaggcacggatgcagcagtctgtgaaggagctcgaggcggcgaagacggccgaggccgcggcgatgaagaagctcaaggccgccgtggaaggcacaatgcaggcgagggcgtcacggcggtcggggaccataaccatctcgcggttcgagtacgagtacctgagcgggcgcgcggcgctggtccgcgtggtggccgacaagaaggtgtccgcggcgcaggcgtgggtgcaggcgctcaaggccggcgagaaggagctggcggcgcgcgcggaggccacggagcgcgtgacagccgagctgcgcgccagggaggccgaggcggcggcggaggcggagagcgcggcgggcgagcagaaggcgctggagcaggagctatacgacctgaacgcggtggcggagcgggacgggctgctgtgcgcgtacccgcgacggcggtcgaccagggtgtcggcgacgatgcggaggacgagggcgcggcggtcgtccgtgtcttcgtcggcggggatccggaacccgcggacgccctcgttcaccatcaagaggaagaagaaggtgatgcccagcctcttcaagctgatcaaacagaggaaagacgagcgcgcgagctgagagatgtgcctcgccaaagaaaaatgcatttgtcagttcttttttctgctcgtacatgtcatgttagacgtcactgttgtgcaaaatgtacaaaaaatggattgaccgtgcttagcaacggatgccataaaaaatattcctatagttcgcccacgttcgaaagagcatattcatagcttgattaatggatgtaagttataattaatggatgtatatttaattaaaacgaattatattttagaatgaagtgagtatataaagcttccaccgtgtctcttattttccttgatcagcattaaaataggtctcgtttggtttctcct

SEQ ID NO: 36860 - DNA, 1739 bp, Zea Mays
gcggcggcacacgagcacacagcttgcgcggctgtggtgctagggttcttcgtgggaggaggtgaaggagatcctcatcgaagagtcgaacgttcaaccggtgaatagccctgtgacggtttgcggtgacatccatgggcagttccatgacctgatgaagctcttcgcgacggggggccacgtcccagagacgaactatattttcatgggtgattttgtggaccgtggcttcaacagtctggaggttttcaccatcctgttgctactaaaagcgaggtatcctgcacacataacccttctgcgtggaaatcatgaaagtaggcagttgacacaggtatattcttgtatgtgaaaaacattaattctgtacagttcatagtttttctgatttaggccactttggttgcaactaaatgccttgagtggctgagtccaatatatgtctccatgattctttgttctgctctttacttgtgagctcaaaaggtgttgtattcatctggtcaccctccactgtgccctcagaattgtgaatagggatgcaaggtacacatatggttattgaagtcttatgattctcaagataatattatctggtaatcggcctgtgtgttatgcttaggttttctttagccagtgcctgttaaattacctgtcaacattgttcttgttattttcccccctggttatgactctatatggctatctcttttaactctcaatttacattgcatgtttgtatccatactgtaccacaaatggctgaaaacacttgacatgtcttagcttaccatgctggcatactaataataatgtgacttatccttaggtgtatggtttctatgatgagtgtcagaggaagtatggcaacgccaatgcatggcggtattgcactgatgtttttgattaccttacgctatcagcaatcattaatggtcaagtcctctgtgttcatggcggtctttctcctgatgtacgtactattgatcagatacgaacaattgatcgcaattgtgaaattccccatgaaggtcctttctgcgaccttatgtggagtgaccctgaggagatagagacatgggctgttagtccccgtggagcaggttggctgtttggatcgcgcgtcacagcagagttcaactttgttaacggtatcgagctagtttgccgggctcaccagctggtccaggaaggcttaaagtacatgttccaggagaagggccttgtcactgtgtggtctgcacctaattattgctacagatgtggcaatgtcgcttctatcttaagcttcgatgagaagatggaaagggatgtcaagttcttcacagagacagaggagaacaaccagatgcgaggcccaaggaccgcagtcccatatttcctatgacttcaattgtacaattttagaagtctattcgaatctgtaagggctaaagatcaatcagatgtgtttattgttttaggtccagattatagtgcaatctgatgcgtttgatttctgttttcctttaaccacatgtacaatagaccatcgggacagtcatatgttcctgtatctcttcggtgacactgccaaagttttgtttgtgattttgttcccgtgctatccattttggactgtgcttgcgttgtgcagcagaagagtcaggctggttatatcttttatctcatttgagattgttcattcatgtgacaagatatttacgtgtacgtaactcctggcatatattcaatttaat

SEQ ID NO: 36861 - DNA, 2417 bp, Zea Mays
agtccgagaagaaaaaggaaactgaagaagagacctcgtcgtctcgtgcagccgcaagcacgaggctgtgagcgagacagccaaggtgctcatcgactccagccagccgcccaaagccagccgcccaaaaagccaggcgcaaatcacaacctcgcctcctgtcccctccccggctcctcgttcccctctcgccgctcgcctccccgccgagatcgaggaggcgccaatagcgagagggtttcctcttccctccacggctccaacgagcccccggcccctccgcctcaaatcccacgcgcccggttggccgccgcccccgccatggatgtggatctgtggatctccaaggtcaaggagggccagcacctcgccgagcacgagcttcagtcgctctgcgaatacgtgaaggagatcctcatcgaagagtcgaacgttcaaccggtgaatagccctgtgacggtttgcggtgacatccatgggcagttccatgacctgatgaagctcttcgcgacggggggccacgtcccagagacgaactatattttcatgggtgattttgtggaccgtggcttcaacagtctggaggttttcaccatcctgttgctactaaaagcgaggtatcctgcacacataacccttctgcgtggaaatcatgaaagtaggcagttgacacaggtgtatggtttctatgatgagtgtcagaggaagtatggcaacgccaatgcatggcggtattgcactgatgtttttgattaccttacgctatcagcaatcattaatggtcaagtcctctgtgttcatggcggtctttctcctgatgtacgtactattgatcagatacgaacaattgatcgcaattgtgaaattccccatgaaggtcctttctgcgaccttatgtggagtgaccctgaggagatagagacatgggctgttagtccccgtggagcaggttggctgtttggatcgcgcgtcacagcagagttcaactttgttaacggtatcgagctagtttgccgggctcaccagctggtccaggaaggcttaaagtacatgttccaggagaagggccttgtcactgtgtggtctgcacctaattattgctacagatgtggcaatgtcgcttctatcttaagcttcgatgagaagatggtatgtcagttcttttgtcttcaaggatctgctagaagcattacacacacctgattacttttgacttttgagtcaatttatacaataagtttatctcaatcctcagtaggttttagtgtgcatttttacaagcaacttttgtacggttaattgtttctgatgtgcaaccaaaagatatattatgcaaccagtgtttctggctaatatttttgtgtatttacattagtgtagattttataaaaattaatgctatggtacagctaagtggggtcaccagctgctgtcttttgccataatacatcaagtttgtgctggacatttttcatgtactttcggttcgaaataggttggcttgtcttttctagatacatagcaaaaactgtgtaccaaaaaaaaacgcccaattatttgaaatggactacttgctagtgacatgcagaggttggacctgaaacgagcaatgaaggtatgtagggagagggtttcagtttgactgttcatgaaataaacgaatttatgtataagtgcatcaaccatacttagggcttgttcagttaatccccaaaccgagaggattggatcccctgcaacaagtcaaaactcccctccagcccccttgacttggagttcaactgaacaaggccttattggggaaacaaaaaccatttgagatttagtagttaatcagcattatgcttattgtatctttgctccttctatggtagcaaacggccaacaagttttgtcccactgctttctcaagttgcctactaatgtttcatgagatatatgacttgatgccgacttacaatatgttttgcactgttaccaggaaagggatgtcaagttcttcacagagacagaggagaacaaccagatgcgaggcccaaggaccgcagtcccatatttcctatgacttcaattgtacaattttagaagtctattcgaatctgtaagggctaaagatcaatcagatgtgtttattgttttaggtccagattatagtgcaatctgatgcgtttgatttctgttttcctttaaccacatgtacaatagaccatcgggacagtcatatgttcctgtatctcttcggtgacactgccaaagttttgtttgtgattttgttcccgtgctatccattttggactgtgcttgcgttgtgcagcagaagagtcaggctggttatatcttttatctcatttgagattgttcattcatgtgacaagatatttacgtgtacgtaactcctggcatatattcaatttaat

SEQ ID NO: 36862 - DNA, 1861 bp, Zea Mays
agtccgagaagaaaaaggaaactgaagaagagacctcgtcgtctcgtgcagccgcaagcacgaggctgtgagcgagacagccaaggtgctcatcgactccagccagccgcccaaagccagccgcccaaaaagccaggcgcaaatcacaacctcgcctcctgtcccctccccggctcctcgttcccctctcgccgctcgcctccccgccgagatcgaggaggcgccaatagcgagagggtttcctcttccctccacggctccaacgagcccccggcccctccgcctcaaatcccacgcgcccggttggccgccgcccccgccatggatgtggatctgtggatctccaaggtcaaggagggccagcacctcgccgagcacgagcttcagtcgctctgcgaatacgtgaaggagatcctcatcgaagagtcgaacgttcaaccggtgaatagccctgtgacggtttgcggtgacatccatgggcagttccatgacctgatgaagctcttcgcgacggggggccacgtcccagagacgaactatattttcatgggtgattttgtggaccgtggcttcaacagtctggaggttttcaccatcctgttgctactaaaagcgaggtatcctgcacacataacccttctgcgtggaaatcatgaaagtaggcagttgacacaggtatattcttgtatgtgaaaaacattaattctgtacagttcatagtttttctgatttaggccactttggttgcaactaaatgccttgagtggctgagtccaatatatgtctccatgattctttgttctgctctttacttgtgagctcaaaaggtgttgtattcatctggtcaccctccactgtgccctcagaattgtgaatagggatgcaaggtacacatatggttattgaagtcttatgattctcaagataatattatctggtaatcggcctgtgtgttatgcttaggttttctttagccagtgcctgttaaattacctgtcaacattgttcttgttattttcccccctggttatgactctatatggctatctcttttaactctcaatttacattgcatgtttgtatccatactgtaccacaaatggctgaaaacacttgacatgtcttagcttaccatgctggcatactaataataatgtgacttatccttaggtgtatggtttctatgatgagtgtcagaggaagtatggcaacgccaatgcatggcggtattgcactgatgtttttgattaccttacgctatcagcaatcattaatggtcaagtcctctgtgttcatggcggtctttctcctgatgtacgtactattgatcaggtcggtgacttctcttccataactttattataaccatctgtgaacacatttgtttataaatgaataaacccttaagtatgacccttccaatctcatcgggtgctgagcttcgtgtcttgtagtttgccatacatgacagatacctcaagaattacagttgtttgaaaacttcactgttatcggtgataaataaaatgcttcagtggataaaaatttcgacctgcggggggtaagacagcccccgagcattgcattaagagaagactttcttacacaagtcggaaaaaaccctgaacccctgtcccacccatacataatggcaccgtagcccatgtgagaagactgcatggtttttaaagtggtaaggcgagacaaggtgttggaccaccgcctgaacgcctaggcgaggtaggcgggcaaggtgcctaggcgttggaccaccgcctggacgcctaggcgacgccttaagaacagtggaagactgtgattgtcgccggaccttacacctgtgctttagcatgggaaaaaa

SEQ ID NO: 36863 - DNA, 1466 bp, Zea Mays
caaaattctgcccttattgtgcacaaaatgaggtactgtatgtcatgaatccgaacaagttcagggcttgtgaattcctgattcgattccatgagcaacaacgtggagacaagataattgtgtttgctgataatctgtttgcactaactacttatgcgatgaaactgcgcaagccaatgatttttggtgccacaaggtgacttcacatttgtgcagatgttacctattttcttctaattttgcccttatttatctttgaatcatttagccatgctgagaggacaagaattctctaccaattcaagaacagtccagaagtcaatacaatttttctttcaaaggtcggtgataactcgattgatatcccagaagctaatgttatcatacaaatatcatctcacgctggttcgagacgtcaagaagctcagcgtctgggccgtattctcagagcaaagggtaaacaccaagataggatggctggaggaaaagaagaatacaatgcttttttctattcccttgtatcaactgacacacaggaaatgtactactcaacaaaaaggcagcagtttcttattgaccagggatatagcttcaaggttatcactagtttgccgccggctgaagaaggacctaatctgagctattacacacttgatgaacaacttgagctcttgagcatgatggccccattcacctctaccaacaggcgctgaatgcaggggatgacatgattggtgttgagcgcttagaagaagattctgatggcaaggctcttattagagcacgacgctctgccggatcaatgagtgccttctctggagctggtggaatggtctacatggagtacagcactgggaagggaaagggtgttcagaagaaacacaaggacccgtcaaagaggcatcatctgttcaagaaacgctatgcgtagcctgttgtgctttgctagaaatgatttggttcatgacaaccttgttttggcatcaaagtcgttggtttaaacacacaagcccatgttatgcacagttgttgctcttggttaggaccatcctaaagcaattgttttctctgtttgagcaaggttactgagctactgtagcgaagaacaattttggtctcaggtttacacatgctgcttaaagttggcatacccggctttcgggcgggacaacaggacgtgtcttcttgaattgccttgtattatacaagtataaacaaacaaacgctaaatcgcaacgcttcttatgtgctgctggttctggcgtgctgtatttcacctgattagtttccgatcatcttgtgtatgatgcgggattgtctatggttcttcctatggttcagttccataatttgtaatggattacgactaacaatgtagtatttgctcggtttttaatcagttttcgatgttaaaaaatgggcgatgatgtaattcgttaagtagtacgtgcacgcgtgtgaatgtg

SEQ ID NO: 36864 - DNA, 2711 bp, Zea Mays
tgcttcgctgaatcgtattctcaacagttctcaccgcgacaccgcccatcctctctccgacatcgattcgcgccgagccgccgaccacctgccgccgtctcctccttggtcccagccatggccggcggcgacggcgatcggcatcgcgcgccgaagcggcacaagtcctcgacgccgtcgaaagcggccctggtggacgagagcgccgagttcgactacgctgatgactttgatgacgacgcccacgatgctgatacggaggttaagaagagggattttacgaagctcgagttgaaggtggaccacgcgagccgtccgctctgggcgtgcgccgacggccgcatcttcctcgagaccttctcgccgctctacaagcaggcttacgattttctcatcgccatcgccgagcctgtgtgcaggccagaatctatgcatgaatacaatctaactccccactcattgtatgctgcggtctcagtgggacttgagacaagcactatcatcagtgtcttgagtaaactatctaaaaccaagttgccccgtgaaataattgatttcatccatggatcaactgctaactacggcaaagtcaagcttgtcttgaagaagaaccgatattttgtcgagtctccatttcctgaggtattgagtacccttctgagggatgaagttatatctagagctaggatatctcctgaggattcccttggggcaccttcatttactgttagcaagacatctggccaaatagctagtggacatgaagacctgttaaatggaatggaaattgctgctgcaactgaagacaaggaaacacattcttttgagattgatccttctcaggttgagaatgtcaagcaacggtgcttaccaaatgcattgaactatcccatgctggaggagtatgatttcagaaatgacactgtaaacccagatttggatatggagctaaagccgcaagcacggcctaggccatatcaagaaaagagtctcagtaaaatgtttgggaacggacgagcaaggtctggaattattgtgctaccttgtggtgctggcaagtccttggttggtgtatctgcagcctgtcgtattaagaagagctgtttatgtttggccacaaatgctgtctccgtagatcaatgggcatttcagttcaagctttggtcgaccataaaagatgagaacattagtcgttttacatctgataacaaggagaagtttacagggatggctggtgtggttgttactacatataacatggttgcattcggtggtaaaaggtctgaagattcggagaagatcattgaagaaatccgaaacagagagtggggcttgcttctaatggatgaggtccatgttgtccctgcacatatgttcagaaaagtcatcagcattactaaatctcactgcaagctgggtcttactgctacccttgtgagagaggacgaacgtattactgacctgaattttctaattggaccaaaactgtatgaagcgaattggttggatttagtcaaaggtggatttattgcaaatgtgcagtgtgcagaagtatggtgtcctatgaccaaagagttctttgctgagtatttgaaaaaggaaaattcaaagaagaagcaggtactgtatgtcatgaatccgaacaagttcagggcttgtgaattcctgattcgattccatgagcaacaacgtggagacaagataattgtgtttgctgataatctgtttgcactaactacttatgcgatgaaactgcgcaagccaatgatttttggtgccacaagccatgctgagaggacaagaattctctaccaattcaagaacagtccagaagtcaatacaatttttctttcaaaggtcggtgataactcgattgatatcccagaagctaatgttatcatacaaatatcatctcacgctggttcgagacgtcaagaagctcagcgtctgggccgtattctcagagcaaagggtaaacaccaagataggatggctggaggaaaagaagaatacaatgcttttttctattcccttgtatcaactgacacacaggaaatgtactactcaacaaaaaggcagcagtttcttattgaccagggatatagcttcaaggttatcactagtttgccgccggctgaagaaggacctaatctgagctattacacacttgatgaacaacttgagctcttgagcatggggatgacatgattggtgttgagcgcttagaagaagattctgatggcaaggctcttattagagcacgacgctctgccggatcaatgagtgccttctctggagctggtggaatggtctacatggagtacaggttactgagctactgtagcgaagaacaattttggtctcaggtttacacatgctgcttaaagttggcatacccggctttcgggcgggacaacaggacgtgtcttcttgaattgccttgtattatacaagtataaacaaacaaacgctaaatcgcaacgcttcttatgtgctgctggttctggcgtgctgtatttcacctgattagtttccgatcatcttgtgtatgatgcgggattgtctatggttcttcctatggttcagttccataatttgtaatggattacgactaacaatgtagtatttgctcggtttttaatcagttttcgatgttaaaaaatgggcgatgatgtaattcgttaagtagtacgtgcacgcgtgtgaatgtg

SEQ ID NO: 36865 - DNA, 2899 bp, Zea Mays
tgcttcgctgaatcgtattctcaacagttctcaccgcgacaccgcccatcctctctccgacatcgattcgcgccgagccgccgaccacctgccgccgtctcctccttggtcccagccatggccggcggcgacggcgatcggcatcgcgcgccgaagcggcacaagtcctcgacgccgtcgaaagcggccctggtggacgagagcgccgagttcgactacgctgatgactttgatgacgacgcccacgatgctgatacggaggttaagaagagggattttacgaagctcgagttgaaggtggaccacgcgagccgtccgctctgggcgtgcgccgacggccgcatcttcctcgagaccttctcgccgctctacaagcaggcttacgattttctcatcgccatcgccgagcctgtgtgcaggccagaatctatgcatgaatacaatctaactccccactcattgtatgctgcggtctcagtgggacttgagacaagcactatcatcagtgtcttgagtaaactatctaaaaccaagttgccccgtgaaataattgatttcatccatggatcaactgctaactacggcaaagtcaagcttgtcttgaagaagaaccgatattttgtcgagtctccatttcctgaggattcccttggggcaccttcatttactgttagcaagacatctggccaaatagctagtggacatgaagacctgttaaatggaatggaaattgctgctgcaactgaagacaaggaaacacattcttttgagattgatccttctcaggttgagaatgtcaagcaacggtgcttaccaaatgcattgaactatcccatgctggaggagtatgatttcagaaatgacactgtaaacccagatttggatatggagctaaagccgcaagcacggcctaggccatatcaagaaaagagtctcagtaaaatgtttgggaacggacgagcaaggtctggaattattgtgctaccttgtggtgctggcaagtccttggttggtgtatctgcagcctgtcgtattaagaagagctgtttatgtttggccacaaatgctgtctccgtagatcaatgggcatttcagttcaagctttggtcgaccataaaagatgagaacattagtcgttttacatctgataacaaggagaagtttacagggatggctggtgtggttgttactacatataacatggttgcattcggtggtaaaaggtctgaagattcggagaagatcattgaagaaatccgaaacagagagtggggcttgcttctaatggatgaggtccatgttgtccctgcacatatgttcagaaaagtcatcagcattactaaatctcactgcaagctgggtcttactgctacccttgtgagagaggacgaacgtattactgacctgaattttctaattggaccaaaactgtatgaagcgaattggttggatttagtcaaaggtggatttattgcaaatgtgcagtgtgcagaagtatggtgtcctatgaccaaagagttctttgctgagtatttgaaaaaggaaaattcaaagaagaagcaggtactgtatgtcatgaatccgaacaagttcagggcttgtgaattcctgattcgattccatgagcaacaacgtggagacaagataattgtgtttgctgataatctgtttgcactaactacttatgcgatgaaactgcgcaagccaatgatttttggtgccacaagccatgctgagaggacaagaattctctaccaattcaagaacagtccagaagtcaatacaatttttctttcaaaggtcggtgataactcgattgatatcccagaagctaatgttatcatacaaatatcatctcacgctggttcgagacgtcaagaagctcagcgtctgggccgtattctcagagcaaagggtaaacaccaagataggatggctggaggaaaagaagaatacaatgcttttttctattcccttgtatcaactgacacacaggaaatgtactactcaacaaaaaggcagcagtttcttattgaccagggatatagcttcaaggttatcactagtttgccgccggctgaagaaggacctaatctgagctattacacacttgatgaacaacttgagctcttgagcatggcgctgaatgcaggggatgacatgattggtgttgagcgcttagaagaagattctgatggcaaggctcttattagagcacgacgctctgccggatcaatgagtgccttctctggagctggtggaatggtctacatggagtacagcactgggaagggaaagggtgttcagaagaaacacaaggacccgtcaaagaggcatcatctgttcaagaaacgctatgcgtagcctgttgtgctttgctagaaatgatttggttcatgacaaccttgttttggcatcaaagtcgttggtttaaacacacaagcccatgttatgcacagttgttgctcttggttaggaccatcctaaagcaattgttttctctgtttgagcaaggttactgagctactgtagcgaagaacaattttggtctcaggtttacacatgctgcttaaagttggcatacccggctttcgggcgggacaacaggacgtgtcttcttgaattgccttgtattatacaagtataaacaaacaaacgctaaatcgcaacgcttcttatgtgctgctggttctggcgtgctgtatttcacctgattagtttccgatcatcttgtgtatgatgcgggattgtctatggttcttcctatggttcagttccataatttgtaatggattacgactaacaatgtagtatttgctcggtttttaatcagttttcgatgttaaaaaatgggcgatgatgtaattcgttaagtagtacgtgcacgcgtgtgaatgtg

SEQ ID NO: 36866 - DNA, 2873 bp, Zea Mays
tgcttcgctgaatcgtattctcaacagttctcaccgcgacaccgcccatcctctctccgacatcgattcgcgccgagccgccgaccacctgccgccgtctcctccttggtcccagccatggccggcggcgacggcgatcggcatcgcgcgccgaagcggcacaagtcctcgacgccgtcgaaagcggccctggtggacgagagcgccgagttcgactacgctgatgactttgatgacgacgcccacgatgctgatacggaggttaagaagagggattttacgaagctcgagttgaaggtggaccacgcgagccgtccgctctgggcgtgcgccgacggccgcatcttcctcgagaccttctcgccgctctacaagcaggcttacgattttctcatcgccatcgccgagcctgtgtgcaggccagaatctatgcatgaatacaatctaactccccactcattgtatgctgcggtctcagtgggacttgagacaagcactatcatcagtgtcttgagtaaactatctaaaaccaagttgccccgtgaaataattgatttcatccatggatcaactgctaactacggcaaagtcaagcttgtcttgaagaagaaccgatattttgtcgagtctccatttcctgaggtattgagtacccttctgagggatgaagttatatctagagctaggatatctcctgaggattcccttggggcaccttcatttactgttagcaagacatctggccaaatagctagtggacatgaagacctgttaaatggaatggaaattgctgctgcaactgaagacaaggaaacacattcttttgagattgatccttctcaggttgagaatgtcaagcaacggtgcttaccaaatgcattgaactatcccatgctggaggagtatgatttcagaaatgacactgtaaacccagatttggatatggagctaaagccgcaagcacggcctaggccatatcaagaaaagagtctcagtaaaatgtttgggaacggacgagcaaggtctggaattattgtgctaccttgtggtgctggcaagtccttggttggtgtatctgcagcctgtcgtattaagaagagctgtttatgtttggccacaaatgctgtctccgtagatcaatgggcatttcagttcaagctttggtcgaccataaaagatgagaacattagtcgttttacatctgataacaaggagaagtttacagggatggctggtgtggttgttactacatataacatggttgcattcggtggtaaaaggtctgaagattcggagaagatcattgaagaaatccgaaacagagagtggggcttgcttctaatggatgaggtccatgttgtccctgcacatatgttcagaaaagtcatcagcattactaaatctcactgcaagctgggtcttactgctacccttgtgagagaggacgaacgtattactgacctgaattttctaattggaccaaaactgtatgaagcgaattggttggatttagtcaaaggtggatttattgcaaatgtgcagtgtgcagaagtatggtgtcctatgaccaaagagttctttgctgagtatttgaaaaaggaaaattcaaagaagaagcaggtactgtatgtcatgaatccgaacaagttcagggcttgtgaattcctgattcgattccatgagcaacaacgtggagacaagataattgtgtttgctgataatctgtttgcactaactacttatgcgatgaaactgcgcaagccaatgatttttggtgccacaagccatgctgagaggacaagaattctctaccaattcaagaacagtccagaagtcaatacaatttttctttcaaaggtcggtgataactcgattgatatcccagaagctaatgttatcatacaaatatcatctcacgctggttcgagacgtcaagaagctcagcgtctgggccgtattctcagagcaaagggtaaacaccaagataggatggctggaggaaaagaagaatacaatgcttttttctattcccttgtatcaactgacacacaggaaatgtactactcaacaaaaaggcagcagtttcttattgaccagggatatagcttcaaggttatcactagtttgccgccggctgaagaaggacctaatctgagctattacacacttgatgaacaacttgagctcttgagcatggcgctgaatgcaggggatgacatgattggtgttgagcgcttagaagaagattctgatggcaaggctcttattagagcacgacgctctgccggatcaatgagtgccttctctggagctggtggaatggtctacatggagtacagcactgggaagggaaagggtgttcagaagaaacacaaggacccgtcaaagaggcatcatctgttcaagaaacgctatgcgtagcctgttgtgctttgctagaaatgatttggttcatgacaaccttgttttggcatcaaagtcgttggtttaaacacacaagcccatgttatgcacagttgttgctcttggtttacacatgctgcttaaagttggcatacccggctttcgggcgggacaacaggacgtgtcttcttgaattgccttgtattatacaagtataaacaaacaaacgctaaatcgcaacgcttcttatgtgctgctggttctggcgtgctgtatttcacctgattagtttccgatcatcttgtgtatgatgcgggattgtctatggttcttcctatggttcagttccataatttgtaatggattacgactaacaatgtagtatttgctcggtttttaatcagttttcgatgttaaaaaatgggcgatgatgtaattcgttaagtagtacgtgcacgcgtgtgaatgtg

SEQ ID NO: 36867 - DNA, 1515 bp, Zea Mays
ctgacttattcagccatggcggctttccgctcgctacggcgccgtctgccgctggcgcttctcctcgccgtctgtgttgccgcttcgcgtagcgacccttccggcgacgatttctacaaccgctccatatgcaagctgcaaccatacagatgcggcgaagtgaatatcacctacccgttctacctttccgacgacacggcggacgtcctgggcaactcctcctcctactgcgggtaccctgggctggccatcgactgcgtggacgacgagtaccccaccatacagctcggcggcaacagcagcaacacaggctactcctacaacgtgacggacatcgactatcccacctccaccatctacctcgccgacccggacgtcctcgacgacgcgagctgcccgcgggtcgaccacaacgtcaccgtctcgccatcgccgaccttgtggctcaacctgtcggactacaccgtccgttacctgctcttcttcgccaactgctccatcaacgttctccacgttcccaaccagtctgacatcaacccgatcgcgtgcgcaagcggctctgacggcgactactctttcgtgatcccttcggagatgccccaccagcttctgctgcagatgtgcagccaacaagtgatcctagtgccggtgctccagaacgcctcgctgacgccggtcgatccgcagtggagcaccagcgggtaccgcgacgctctcaagcagggcttccagctgcagtgggactcggacaggaagaccgagcggtgtgccgagtgcgagggatccaatggacggtgtggctacaacagatctggggaattcgtgacttgcctgtgcgccgacggccacgtgagcgaccatgaatgcaccaaaggatcaaaacggaaaaaagcaattattgccggtattcttgcaggcacgctgtcgtcccttctattcttgtgtctagtcattctcacattcttctctgcttacaaatacgggatgctgccattcaaatcgaaggacgaaccaaggatcgagtcctttctacagaagaacgggaacctgcatccaaaaagatacacctacgcagatgtgaaaagaatgacaagatccttcaccgagaagctaggccaaggtgggttcggagccgtgtacagaggcagcctccacgatggccgccaggtagcagtcaagatgctaaaggacaccaaaggcgatggcgaggaattcatgaacgaggtggccagtatcagcaggacttgtcatgtcaacatcgtgacactgacggggttctgcttgcaaggatccaagagggcgcttgtttacgagtacatgccgaatggttcgcttgaaaggttcgtgaatgtctgactaaatggttgcagaaactctgcaggtatctgcttattgcccacaacatgatcaactcttaagatgagcactgtcttagagaatgataataaatcttgatatgatcacatgatcagaattggttgctagtatatgttgattatgaatttatgatgttca

SEQ ID NO: 36868 - DNA, 2477 bp, Zea Mays
aaaaaaacactcctctgacttattcagccatggcggctttccgctcgctacggcgccgtctgccgctggcgcttctcctcgccgtctgtgttgccgcttcgcgtagcgacccttccggcgacgatttctacaaccgctccatatgcaagctgcaaccatacagatgcggcgaagtgaatatcacctacccgttctacctttccgacgacacggcggacgtcctgggcaactcctcctcctactgcgggtaccctgggctggccatcgactgcgtggacgacgagtaccccaccatacagctcggcggcaacagcagcaacacaggctactcctacaacgtgacggacatcgactatcccacctccaccatctacctcgccgacccggacgtcctcgacgacgcgagctgcccgcgggtcgaccacaacgtcaccgtctcgccatcgccgaccttgtggctcaacctgtcggactacaccgtccgttacctgctcttcttcgccaactgctccatcaacgttctccacgttcccaaccagtctgacatcaacccgatcgcgtgcgcaagcggctctgacggcgactactctttcgtgatcccttcggagatgccccaccagcttctgctgcagatgtgcagccaacaagtgatcctagtgccggtgctccagaacgcctcgctgacgccggtcgatccgcagtggagcaccagcgggtaccgcgacgctctcaagcagggcttccagctgcagtgggactcggacaggaagaccgagcggtgtgccgagtgcgagggatccaatggacggtgtggctacaacagatctggggaattcgtgacttgcctgtgcgccgacggccacgtgagcgaccatgaatgcaccaaaggatcaaaacggaaaaaagcaattattgccggtattcttgcaggcacgctgtcgtcccttctattcttgtgtctagtcattctcacattcttctctgcttacaaatacgggatgctgccattcaaatcgaaggacgaaccaaggatcgagtcctttctacagaagaacgggaacctgcatccaaaaagatacacctacgcagatgtgaaaagaatgacaagatccttcaccgagaagctaggccaaggtgggttcggagccgtgtacagaggcagcctccacgatggccgccaggtagcagtcaagatgctaaaggacaccaaaggcgatggcgaggaattcatgaacgaggtggccagtatcagcaggacttgtcatgtcaacatcgtgacactgacggggttctgcttgcaaggatccaagagggcgcttgtttacgagtacatgccgaatggttcgcttgaaaggtacgccttcagggccgaaaacacactgagctgggagaaactgtttgacgtagcgactggcacggccagaggactcgagtatctccaccggggatgcaacactccaatcgtgcatttcgacatcaagccgcacaacatcctgttagaccaggatttctgccctaagatctctgactttggattggccaagctatgcccgaacaaagcgagtagtgctgtctccattgttggcgcgagagggacagtaggttacatcgccccggaggtttactcaaagcaattcggagtagtaagtagcaagtccgacgtctatagctatggaatgatggtgcttgagatggttggggcaagggacaagagtacaagtgcagatagtgagcgtagtagccagtatttccctcagtggatctatgaacatttggacgactactgtgtcagtgcttctgaggttgatggtgggactacagagctcgtgaggaagatgatagttgtaggtatgtggtgcatacagttgatcccaacggaccggccaacaatgactagagtcgtcgagatgctggaaggaagcacgagtaatctggaattgccacccaaagttctgttgagctggcaagctagcatagatgttttcctattaagaccccaactaatcaaaggttatataaattagacaaaaatttggctagtaatagttccaggccgacagtggatctataaattagccaagacatcaagaggttctacagaaggattggttccaatttgctgaacaagataccaagaggccctgtcaagtgtcaagacaaaatttaaataaaatacactccctgaggatacatcaatagttccctttgaaggatgcatggatggacctaccatatagtctgtaacagaatgggtgaacacaaccccacaaatgtgaaaagtaactccatttgggctaggagaattcagactcatttctaccttctatagtcatagagaatcaccccaaatctccttggctctttcttatttcaataggtcaaatgtctatgcgaaactttttatctggaatggaaatgaacatttctctcagctcttctgggatgtccaagtcatcaaagaccttagactttcgtgc

SEQ ID NO: 36869 - DNA, 1996 bp, Zea Mays
ctcctctcggcgcccagcgagtccagccgagccgcaaccaaaaagcaaagcaacgcccaacaggacagggagaaaagctcgcaggagtgacctccctctgtgtctctccgctcggcgctcggaccaccgcggaacggcggaaccctccgatagaatcatagaaccaaaccctcctcctcgcaccgcgccgctgcagctgaccaccctacttgaccggccggggagagagatagagataaagacatagacaaacagacggcgggcaggcatgggcggcgtcacgtccaccatcgccgcgcgcttcgccttcttcccgcccacgccgccgtcctacaccgtcgtggtcgccgacgctgcgacaggccgcctcgccatcccggagatctcacgggccctctcgcgccgccggaggcgggacggcgccggcgctgggggctcctcctcggcctcctccgtcgcggccgccgagaacgaggagggcgcggaggtggtgcgcctccggacccgccgcgggaacgagatcgtgggggtgtacgtgcgccacgcgcgggcctccgccacgctgctctactcccacggcaacgccgccgacctcggccagatgtacggcctcttcgtcgagctcagccgccgcctccgcgtcaacctcttcgggtatgattattctggttatgggagatctacagggaagcccactgagtgtaatacatatgcagacattgaagcagcatataactgcctcaaggaaaaatatagtgtcgcagatgaggatataatcttatacggccagtctgttggaagtggtccaaccattgatcttgcttcacgattgccagacttgcgagctgtggttttgcatagtcctattttatctggagtaagagtactatatccagtcaaacggacgttttggttcgacatttacaagaacatcgataaaattggtttggtaaattgtccggtgcttgtcatccatggtacatcagatgatgtcgttgactgctcccacggtaaacagctatgggaacattgcaaagtaaaatattctccactgtggttaaatggtggtgggcactgcaacctcgagctatatccagattacattaagcacttgaagcagtttgtgtcaagcgttagcaaaaaaacatcaaagccggaccagaaagagataatggcaaaggatggcactaccagtaaagaaagagaggaagcatactcggagaaacctcagccggcagctaagtgctcacagtcacagatctcacgtaagagcatagatagccgagttgggaaatccaaaacagtggatgttcctgataaatcacggatgagctcagatgacatcgacaagttccggaggagaaggtgcttggtttggtgatgcctatgttgtgcacagattgtcgaacagtacctgagtgaggatactatagcatggaaatcaagcaactttattacatacatcatgctgcgaggaatggcatcagccgttcctgcagtggagaggaaagaactgttaaataagaaaaggaaccagaaagctaccatcatcatccatcagagacaaagccacttgactgaaagctggtagtttcccagttaatttaacactgacactgacaccgtcgacatgttttgcagcaccggttagggtttccccatcatctaaaagtgtacaattattgtatgtaatcacgagggacctatacaaacatttacagccgctctgtgcaaagtctgaaagcctaggagcaccatagtttatcctcggtgcatcagcatcgggcccacatgcgttgtggaaccatttggctatgtgagctctgcatactgatctactccagccttattatacggatcgtgctccacttatcaactgtgacacggcagcaagcggatcatgctccacatatcaattggaaactgttgggtgaaaggaaccggaccgcgaagcctgaaaacaaatgacaggcaatctggcatgcctcacagtcac

SEQ ID NO: 36870 - DNA, 2047 bp, Zea Mays
gtgaggggttgcaaaacatattatttacatacagtaatacagaatgtacatattttttcccccggccaccctcctcactcagcccatccaagacattcgtgtccgggtgaggccaaccgcttcgctcctcgcctcctcctctcggcgcccagcgagtccagccgagccgcaaccaaaaagcaaagcaacgcccaacaggacagggagaaaagctcgcaggagtgacctccctctgtgtctctccgctcggcgctcggaccaccgcggaacggcggaaccctccgatagaatcatagaaccaaaccctcctcctcgcaccgcgccgctgcagctgaccaccctacttgaccggccggggagagagatagagataaagacatagacaaacagacggcgggcaggcatgggcggcgtcacgtccaccatcgccgcgcgcttcgccttcttcccgcccacgccgccgtcctacaccgtcgtggtcgccgacgctgcgacaggccgcctcgccatcccggagatctcacgggccctctcgcgccgccggaggcgggacggcgccggcgctgggggctcctcctcggcctcctccgtcgcggccgccgagaacgaggagggcgcggaggtggtgcgcctccggacccgccgcgggaacgagatcgtgggggtgtacgtgcgccacgcgcgggcctccgccacgctgctctactcccacggcaacgccgccgacctcggccagatgtacggcctcttcgtcgagctcagccgccgcctccgcgtcaacctcttcgggtatgattattctggttatgggagatctacagggaagcccactgagtgtaatacatatgcagacattgaagcagcatataactgcctcaaggaaaaatatagtgtcgcagatgaggatataatcttatacggccagtctgttggaagtggtccaaccattgatcttgcttcacgattgccagacttgcgagctgtggttttgcatagtcctattttatctggagtaagagtactatatccagtcaaacggacgttttggttcgacatttacaagggtacatcagatgatgtcgttgactgctcccacggtaaacagctatgggaacattgcaaagtaaaatattctccactgtggttaaatggtggtgggcactgcaacctcgagctatatccagattacattaagcacttgaagcagtttgtgtcaagcgttagcaaaaaaacatcaaagccggaccagaaagagataatggcaaaggatggcactaccagtaaagaaagagaggaagcatactcggagaaacctcagccggcagctaagtgctcacagtcacagatctcacgtaagagcatagatagccgagttgggaaatccaaaacagtggatgttcctgataaatcacggatgagctcagatgacatcgacaagttccggaggagaaggtgcttggtttggtgatgcctatgttgtgcacagattgtcgaacagtacctgagtgaggatactatagcatggaaatcaagcaactttattacatacatcatgctgcgaggaatggcatcagccgttcctgcagtggagaggaaagaactgttaaataagaaaaggaaccagaaagctaccatcatcatccatcagagacaaagccacttgactgaaagctggtagtttcccagttaatttaacactgacactgacaccgtcgacatgttttgcagcaccggttagggtttccccatcatctaaaagtgtacaattattgtatgtaatcacgagggacctatacaaacatttacagccgctctgtgcaaagtctgaaagcctaggagcaccatagtttatcctcggtgcatcagcatcgggcccacatgcgttgtggaaccatttggctatgtgagctctgcatactgatctactccagccttattatacggatcgtgctccacttatcaactgtgacacggcagcaagcggatcatgctccacatatcaattggaaactgttgggtgaaagctctgacagacccaacaaaacaa

SEQ ID NO: 36871 - DNA, 2095 bp, Zea Mays
gtgaggggttgcaaaacatattatttacatacagtaatacagaatgtacatattttttcccccggccaccctcctcactcagcccatccaagacattcgtgtccgggtgaggccaaccgcttcgctcctcgcctcctcctctcggcgcccagcgagtccagccgagccgcaaccaaaaagcaaagcaacgcccaacaggacagggagaaaagctcgcaggagtgacctccctctgtgtctctccgctcggcgctcggaccaccgcggaacggcggaaccctccgatagaatcatagaaccaaaccctcctcctcgcaccgcgccgctgcagctgaccaccctacttgaccggccggggagagagatagagataaagacatagacaaacagacggcgggcaggcatgggcggcgtcacgtccaccatcgccgcgcgcttcgccttcttcccgcccacgccgccgtcctacaccgtcgtggtcgccgacgctgcgacaggccgcctcgccatcccggagatctcacgggccctctcgcgccgccggaggcgggacggcgccggcgctgggggctcctcctcggcctcctccgtcgcggccgccgagaacgaggagggcgcggaggtggtgcgcctccggacccgccgcgggaacgagatcgtgggggtgtacgtgcgccacgcgcgggcctccgccacgctgctctactcccacggcaacgccgccgacctcggccagatgtacggcctcttcgtcgagctcagccgccgcctccgcgtcaacctcttcgggtatgattattctggttatgggagatctacagggaagcccactgagtgtaatacatatgcagacattgaagcagcatataactgcctcaaggaaaaatatagtgtcgcagatgaggatataatcttatacggccagtctgttggaagtggtccaaccattgatcttgcttcacgattgccagacttgcgagctgtggttttgcatagtcctattttatctggagtaagagtactatatccagtcaaacggacgttttggttcgacatttacaagaacatcgataaaattggtttggtaaattgtccggtgcttgtcatccatggtacatcagatgatgtcgttgactgctcccacggtaaacagctatgggaacattgcaaagtaaaatattctccactgtggttaaatggtggtgggcactgcaacctcgagctatatccagattacattaagcacttgaagcagtttgtgtcaagcgttagcaaaaaaacatcaaagccggaccagaaagagataatggcaaaggatggcactaccagtaaagaaagagaggaagcatactcggagaaacctcagccggcagctaagtgctcacagtcacagatctcacgtaagagcatagatagccgagttgggaaatccaaaacagtggatgttcctgataaatcacggatgagctcagatgacatcgacaagttccggaggagaaggtgcttggtttggtgatgcctatgttgtgcacagattgtcgaacagtacctgagtgaggatactatagcatggaaatcaagcaactttattacatacatcatgctgcgaggaatggcatcagccgttcctgcagtggagaggaaagaactgttaaataagaaaaggaaccagaaagctaccatcatcatccatcagagacaaagccacttgactgaaagctggtagtttcccagttaatttaacactgacactgacaccgtcgacatgttttgcagcaccggttagggtttccccatcatctaaaagtgtacaattattgtatgtaatcacgagggacctatacaaacatttacagccgctctgtgcaaagtctgaaagcctaggagcaccatagtttatcctcggtgcatcagcatcgggcccacatgcgttgtggaaccatttggctatgtgagctctgcatactgatctactccagccttattatacggatcgtgctccacttatcaactgtgacacggcagcaagcggatcatgctccacatatcaattggaaactgttgggtgaaagctctgacagacccaacaaaacaa

SEQ ID NO: 36872 - DNA, 1854 bp, Zea Mays
aaaaagcaaagcaacgcccaacaggacagggagaaaagctcgcaggagtgacctccctctgtgtctctccgctcggcgctcggaccaccgcggaacggcggaaccctccgatagaatcatagaaccaaaccctcctcctcgcaccgcgccgctgcagctgaccaccctacttgaccggccggggagagagatagagataaagacatagacaaacagacggcgggcaggcatgggcggcgtcacgtccaccatcgccgcgcgcttcgccttcttcccgcccacgccgccgtcctacaccgtcgtggtcgccgacgctgcgacaggccgcctcgccatcccggagatctcacgggccctctcgcgccgccggaggcgggacggcgccggcgctgggggctcctcctcggcctcctccgtcgcggccgccgagaacgaggagggcgcggaggtggtgcgcctccggacccgccgcgggaacgagatcgtgggggtgtacgtgcgccacgcgcgggcctccgccacgctgctctactcccacggcaacgccgccgacctcggccagatgtacggcctcttcgtcgagctcagccgccgcctccgcgtcaacctcttcgggtatgattattctggttatgggagatctacagggaagacattgaagcagcatataactgcctcaaggaaaaatatagtgtcgcagatgaggatataatcttatacggccagtctgttggaagtggtccaaccattgatcttgcttcacgattgccagacttgcgagctgtggttttgcatagtcctattttatctggagtaagagtactatatccagtcaaacggacgttttggttcgacatttacaagaacatcgataaaattggtttggtaaattgtccggtgcttgtcatccatggtacatcagatgatgtcgttgactgctcccacggtaaacagctatgggaacattgcaaagtaaaatattctccactgtggttaaatggtggtgggcactgcaacctcgagctatatccagattacattaagcacttgaagcagtttgtgtcaagcgttagcaaaaaaacatcaaagccggaccagaaagagataatggcaaaggatggcactaccagtaaagaaagagaggaagcatactcggagaaacctcagccggcagctaagtgctcacagtcacagatctcacgtaagagcatagatagccgagttgggaaatccaaaacagtggatgttcctgataaatcacggatgagctcagatgacatcgacaagttccggaggagaaggtgcttggtttggtgatgcctatgttgtgcacagattgtcgaacagtacctgagtgaggatactatagcatggaaatcaagcaactttattacatacatcatgctgcgaggaatggcatcagccgttcctgcagtggagaggaaagaactgttaaataagaaaaggaaccagaaagctaccatcatcatccatcagagacaaagccacttgactgaaagctggtagtttcccagttaatttaacactgacactgacaccgtcgacatgttttgcagcaccggttagggtttccccatcatctaaaagtgtacaattattgtatgtaatcacgagggacctatacaaacatttacagccgctctgtgcaaagtctgaaagcctaggagcaccatagtttatcctcggtgcatcagcatcgggcccacatgcgttgtggaaccatttggctatgtgagctctgcatactgatctactccagccttattatacggatcgtgctccacttatcaactgtgacacggcagcaagcggatcatgctccacatatcaatt

SEQ ID NO: 36873 - DNA, 620 bp, Zea Mays
gtggagattgctgcctgacagaccttaaagcaaaaaacccttagggaacatgctgacaaggcattgcagtacttcatcagtgtggagccgagtaaagcactacctcttcttttgcgttggattgccagctatcagactctgtttacgaaggtttgcagcaaatgcggacggcttctgatgatggacaagtctttggctttgctgttgcctcctgtccaccgcccctatcaccagacttcaaatattggaccagatcttcaagaggcctaccacattggatgttcctcctacgacggctagctggtgcttctaagaaacacccgagactattttggtagcacaggatgtttctcgcgttgtcatcgacgaagcacgtgtacaacagtccttgtgtgtaaaacattgtcctttctggaatgtatccaacccatcaggtgtcctttttgtactttggttagtgtatgcatattgtcatgtgctgtacaaatatattagcattgctactttattacgggtggggcctagcccaaacttgatacagctaggataaagttagagcagttgctacagtttctagctagctaccttattctatacgcatcaccctagctgactgctgc

SEQ ID NO: 36874 - DNA, 1676 bp, Zea Mays
gatttgggctccaccactgcacatgaatcatgatgcagcagcgagcagcctatacggcttactgggccggccgccgatcgcgagcaaacacttccgcagctctggaattcggaggctcaggaatcatgatgcagcagcctcaggcgcatgcgtcggcacttgcggtggcgcacccgcacgatccggcgggcggggacgcgccgccgaagcaggtggctcaggcgatggagcggctgggccgtgcgggccgtctcatcgcagacatccggctcggcgcggaccgcctcctcgaggccctcttcgtctccggcgacgcgcccccgtacagcgtgcgccagcacgtcgacaggatggagcacattatcgtcaaggaggatgccgccatgcgcctccacttccaggacctacgcgccctcggcaggaaggcaactagaggagtctggagttcttaatggggcccttaaagctcgaggcaattcatggggcttgcacatgccacttgtttgtccagatggtgctgttgtagcttatgcttggaagcgacaactagcgggtcaggccggtgcatctgctgtggacaggactaggttagctctcaaggccttcactgaccagaaaagaagattcttccctcatctagaagatgaagttgttagccatctccatgatggtgaacctggtggcaccaaaaagccaaagttgtttaccagcaatggagatctagaggaaaaatctttgtctgacatactgaaaaatttagaacatgaagcatctaacataaaaatattcacatactggcatctggattggtcaaaaagagcttcctcattagcatctctgttggatgatgactttgtggatccatctaaagagctgaacctgcaaaatatgggcaaatcgagatctggtgctctgacaacttccatagaccaagtcgcagttattgaattgctggttccttcagtatttagagctgtagtgtcattgcatcctgctggatctactgatcctgatgcagtggcattcttttctcccactgagggaggaagctatcttcatgcaaggggcacgtcggtacataatgtgtttaaacatgtaaaggaacatgctgacaaggcattgcagtacttcatcagtgtggagccgagtaaagcactacctcttcttttgcgttggattgccagctatcagactctgtttacgaaggtttgcagcaaatgcggacggcttctgatgatggacaagtctttggctttgctgttgcctcctgtccaccgcccctatcaccagacttcaaatattggaccagatcttcaagaggcctaccacattggatgttcctcctacgacggctagctggtgcttctaagaaacacccgagactattttggtagcacaggatgtttctcgcgttgtcatcgacgaagcacgtgtacaacagtccttgtgtgtaaaacattgtcctttctggaatgtatccaacccatcaggtgtcctttttgtactttggttagtgtatgcatattgtcatgtgctgtacaaatatattagcattgctactttattacgggtggggcctagcccaaacttgatacagctaggataaagttagagcagttgctacagtttctagctagctaccttattctatacgcatcaccctagctgactgctgc

SEQ ID NO: 36875 - DNA, 487 bp, Zea Mays
attcacagtaaacagccaacaaaccttctacattaccagattgtttgacatcctaattgtggtgacataagattagaccagatccacaagtccaaaaaaggggggagaactctatagtctataaactggactagaaatgtgggacacaaccctaatgtgacatcgcatatggaatatgcaaaggacggtcgaagattcctagctgaatattagatagagaaaacagtgtcttgtgagctaatggtttctcaggatgggcgtaaaggtacactgaattccttcaactgaacactgaatggcctatgttaagcccaacatagaatatcaaacgtgcagttcttcaattattatcatatagtttttattcactaaataaagcagtaatgcaaacacctgctttgaagatgtcacatgaaacacctttcatatgcattcctgtctaataatcagggaataagtaatgagttagcaaatgctaccagtagat

SEQ ID NO: 36876 - DNA, 1366 bp, Zea Mays
accaatcttttctttccagcctcaaatcccgtttttcccatcccgtgaagaaccatggcacggtactccccaccgtcgctgcgctgcttcttccgctgcgccgccagctccgcctcccgagccgtaggcagcggcactcggaagaagaaccttgtattcttgggctctccccaggtcgccgcctcggtcctggacaagctgctgggcgcgtccggctccccggaatccgcatttcaggtggctgccgtcgtgacgcagccgccggccgccaagaacagggggaggaagttgatgccgtcggccgtcgcgcagttagcgctcgatcgcgggttcccagaggaactcatcttcacgccagaacgagcccgagaagaagtggaaccggatgtttgcataactgctgcttacgggaacattctgccccagaaatttcttgatatcccatcgtgcggatggtgttgcagaaacaggtgtttcccttgcatatactgtccgtgcattggatgcaggtccagtgattgcgtgtgaaaggttttctgttgatgaatgtattaaggcaccagagctactttctatgctgtttcatttaggatccaagctattgattaatgaacttccatccattcttgatggttcggctaaagataaggcacaaccacaggatgactccaaagctacactggcaccaaagttaaattctgaggagtcatggctatcgtttgacgaagaagctaaagtgctgcataacaaggatggcctgggacgcgcgcaaagctgcaactcataaaccaaaacagtgtacccgatgtactagagattaaggttatcagcacgaaggtttcaacatcatgtgtcaaagttggagatgaaaacgagatactattctctgggagctcgttgctgattccttgcagtggttcgacctggctcgaggtgttggagcttcaactccctggaaagaaagtaacaaaggcacaagatttttggaatggtttgcgtggtcagaagctgatgaaattgccatagggggatatctgcattcgcagcacaggagtgtgcctatatgcatagcaagggttattgaggtcagtcattgcgcgaacataagcagggtagtgctagaagcctatatgcggagatctcggttttatgactaccttttccttctggtaaacttggtgctataaactcgtaactcagttacattaggcatgccatttgtattgcttcctcaatttcagaaaacacactgctgtaactatttcagttattcaatttttcactgtcataactgagctacaaacatttgagaaataatacagttatgtggtgagtaataaggcaataatttgccgtaccttcttga

SEQ ID NO: 36877 - DNA, 1471 bp, Zea Mays
accaatcttttctttccagcctcaaatcccgtttttcccatcccgtgaagaaccatggcacggtactccccaccgtcgctgcgctgcttcttccgctgcgccgccagctccgcctcccgagccgtaggcagcggcactcggaagaagaaccttgtattcttgggctctccccaggtcgccgcctcggtcctggacaagctgctgggcgcgtccggctccccggaatccgcatttcaggtggctgccgtcgtgacgcagccgccggccgccaagaacagggggaggaagttgatgccgtcggccgtcgcgcagttagcgctcgatcgcgggttcccagaggaactcatcttcacgccagaacgagcccgagaagagtcgttcctgtcggccttgaaggaagtggaaccggatgtttgcataactgctgcttacgggaacattctgccccagaaatttcttgatatcccatcgtgcgttaatatacacccaagtttgttgcctctatatcgtggtgcagctcctgtgcagagggcactgcaggatggtgttgcagaaacaggtgtttcccttgcatatactgtccgtgcattggatgcaggtccagtgattgcgtgtgaaaggttttctgttgatgaatgtattaaggcaccagagctactttctatgctgtttcatttaggatccaagctattgattaatgaacttccatccattcttgatggttcggctaaagataaggcacaaccacaggatgactccaaagctacactggcaccaaagttaaattctgaggagtcatggctatcgtttgacgaagaagctaaagtgctgcataacaaggtgcgggcatttgcaggatggcctgggacgcgcgcaaagctgcaactcataaaccaaaacagtgtacccgatgtactagagattaaggttatcagcacgaaggtttcaacatcatgtgtcaaagttggagatgaaaacgagatactattctctgggagctcgttgctgattccttgcagtggttcgacctggctcgaggtgttggagcttcaactccctggaaagaaagtaacaaaggcacaagatttttggaatggtttgcgtggtcagaagctgatgaaattgccatagggggatatctgcattcgcagcacaggagtgtgcctatatgcatagcaagggttattgaggtcagtcattgcgcgaacataagcagggtagtgctagaagcctatatgcggagatctcggttttatgactaccttttccttctggtaaacttggtgctataaactcgtaactcagttacattaggcatgccatttgtattgcttcctcaatttcagaaaacacactgctgtaactatttcagttattcaatttttcactgtcataactgagctacaaacatttgagaaataatacagttatgtggtgagtaataaggcaataatttgccgtaccttcttga

SEQ ID NO: 36878 - DNA, 1401 bp, Zea Mays
accaatcttttctttccagcctcaaatcccgtttttcccatcccgtgaagaaccatggcacggtactccccaccgtcgctgcgctgcttcttccgctgcgccgccagctccgcctcccgagccgtaggcagcggcactcggaagaagaaccttgtattcttgggctctccccaggtcgccgcctcggtcctggacaagctgctgggcgcgtccggctccccggaatccgcatttcaggtggctgccgtcgtgacgcagccgccggccgccaagaacagggggaggaagttgatgccgtcggccgtcgcgcagttagcgctcgatcgcgggttcccagaggaactcatcttcacgccagaacgagcccgagaagagtcgttcctgtcggccttgaaggaagtggaaccggatgtttgcataactgctgcttacgggaacattctgccccagaaatttcttgatatcccatcgtgcggcacagttaatatacacccaagtttgttgcctctatatcgtggtgcagctcctgtgcagagggcactgcaggatggtgttgcagaaacaggtgtttcccttgcatatactgtccgtgcattggatgcaggtccagtgattgcgtgtgaaaggttttctgttgatgaatgtattaaggcaccagagctactttctatgctgtttcatttaggatccaagctattgattaatgaacttccatccattcttgatggttcggctaaagataaggcacaaccacaggatgactccaaagctacactggcaccaaaggatggcctgggacgcgcgcaaagctgcaactcataaaccaaaacagtgtacccgatgtactagagattaaggttatcagcacgaaggtttcaacatcatgtgtcaaagttggagatgaaaacgagatactattctctgggagctcgttgctgattccttgcagtggttcgacctggctcgaggtgttggagcttcaactccctggaaagaaagtaacaaaggcacaagatttttggaatggtttgcgtggtcagaagctgatgaaattgccatagggggatatctgcattcgcagcacaggagtgtgcctatatgcatagcaagggttattgaggtcagtcattgcgcgaacataagcagggtagtgctagaagcctatatgcggagatctcggttttatgactaccttttccttctggtaaacttggtgctataaactcgtaactcagttacattaggcatgccatttgtattgcttcctcaatttcagaaaacacactgctgtaactatttcagttattcaatttttcactgtcataactgagctacaaacatttgagaaataatacagttatgtggtgagtaataaggcaataatttgccgtaccttcttga

SEQ ID NO: 36879 - DNA, 1406 bp, Zea Mays
accaatcttttctttccagcctcaaatcccgtttttcccatcccgtgaagaaccatggcacggtactccccaccgtcgctgcgctgcttcttccgctgcgccgccagctccgcctcccgagccgtaggcagcggcactcggaagaagaaccttgtattcttgggctctccccaggtcgccgcctcggtcctggacaagctgctgggcgcgtccggctccccggaatccgcatttcaggtggctgccgtcgtgacgcagccgccggccgccaagaacagggggaggaagttgatgccgtcggccgtcgcgcagttagcgctcgatcgcgggttcccagaggaactcatcttcacgccagaacgagcccgagaagagtcgttcctgtcggccttgaaggaagtggaaccggatgtttgcataactgctgcttacgggaacattctgccccagaaatttcttgatatcccatcgtgcggatggtgttgcagaaacaggtgtttcccttgcatatactgtccgtgcattggatgcaggtccagtgattgcgtgtgaaaggttttctgttgatgaatgtattaaggcaccagagctactttctatgctgtttcatttaggatccaagctattgattaatgaacttccatccattcttgatggttcggctaaagataaggcacaaccacaggatgactccaaagctacactggcaccaaagttaaattctgaggagtcatggctatcgtttgacgaagaagctaaagtgctgcataacaaggtgcgggcatttgcaggatggcctgggacgcgcgcaaagctgcaactcataaaccaaaacagtgtacccgatgtactagagattaaggttatcagcacgaaggtttcaacatcatgtgtcaaagttggagatgaaaacgagatactattctctgggagctcgttgctgattccttgcagtggttcgacctggctcgaggtgttggagcttcaactccctggaaagaaagtaacaaaggcacaagatttttggaatggtttgcgtggtcagaagctgatgaaattgccatagggggatatctgcattcgcagcacaggagtgtgcctatatgcatagcaagggttattgaggtcagtcattgcgcgaacataagcagggtagtgctagaagcctatatgcggagatctcggttttatgactaccttttccttctggtaaacttggtgctataaactcgtaactcagttacattaggcatgccatttgtattgcttcctcaatttcagaaaacacactgctgtaactatttcagttattcaatttttcactgtcataactgagctacaaacatttgagaaataatacagttatgtggtgagtaataaggcaataatttgccgtaccttcttga

SEQ ID NO: 36880 - DNA, 1461 bp, Zea Mays
accaatcttttctttccagcctcaaatcccgtttttcccatcccgtgaagaaccatggcacggtactccccaccgtcgctgcgctgcttcttccgctgcgccgccagctccgcctcccgagccgtaggcagcggcactcggaagaagaaccttgtattcttgggctctccccaggtcgccgcctcggtcctggacaagctgctgggcgcgtccggctccccggaatccgcatttcaggtggctgccgtcgtgacgcagccgccggccgccaagaacagggggaggaagttgatgccgtcggccgtcgcgcagttagcgctcgatcgcgggttcccagaggaactcatcttcacgccagaacgagcccgagaagagtcgttcctgtcggccttgaaggaagtggaaccggatgtttgcataactgctgcttacgggaacattctgccccagaaatttcttgatatcccatcgtgcggcacagttaatatacacccaagtttgttgcctctatatcgtggtgcagctcctgtgcagagggcactgcaggatggtgttgcagaaacaggtgtttcccttgcatatactgtccgtgcattggatgcaggtccagtgattgcgtgtgaaaggttttctgttgatgaatgtattaaggcaccagagctactttctatgctgtttcatttaggatccaagctattgattaatgaacttccatccattcttgatggttcggctaaagataaggcacaaccacaggatgactccaaagctacactggcaccaaagttaaattctgaggagtcatggctatcgtttgacgaagaagctaaagtgctgcataacaaggatggcctgggacgcgcgcaaagctgcaactcataaaccaaaacagtgtacccgatgtactagagattaaggttatcagcacgaaggtttcaacatcatgtgtcaaagttggagatgaaaacgagatactattctctgggagctcgttgctgattccttgcagtggttcgacctggctcgaggtgttggagcttcaactccctggaaagaaagtaacaaaggcacaagatttttggaatggtttgcgtggtcagaagctgatgaaattgccatagggggatatctgcattcgcagcacaggagtgtgcctatatgcatagcaagggttattgaggtcagtcattgcgcgaacataagcagggtagtgctagaagcctatatgcggagatctcggttttatgactaccttttccttctggtaaacttggtgctataaactcgtaactcagttacattaggcatgccatttgtattgcttcctcaatttcagaaaacacactgctgtaactatttcagttattcaatttttcactgtcataactgagctacaaacatttgagaaataatacagttatgtggtgagtaataaggcaataatttgccgtaccttcttga

SEQ ID NO: 36881 - DNA, 1023 bp, Zea Mays
cgatgagaatgtgttggaggatctcaccagcttggtcacacaatgggcagacctccggatgagggagaccaggttgatgatgtacttgagacaaagttagataggaaattcaaaattattacagacaaagggacattggatgccatcggattgcatccagatggtcgtgcgaaaagaatggtatattgggaatctgtatcaaacttggttgagcctggtggcattgtggtcataacgtcatgtaatcacacaaaggatgagcttctgcatgaagtagaagatttcaccaagagaaaatttggcaaggagaacgtggatgaaggtgcacgagatgcgtctgagatcttccggtacatagaccatgtccgaacatatcctaccataatgtttggaggaattgagggctctcaagtctgcactgtggcctttcagcgggtgtgactgaaagctgaggcacacatagttcttggcctgacgtgtcacgttgggtccagaagaaatggataaaaaattttgtgcttcgcctgtgggactgttcctaccgtattaaggaacagtccaaactgtgtcttcttctgttgttagctcatctatccaggatggtcgtgtaattttagatggaccagactatgagacgaatcagtcctgtattgttgtcaccgtgaacatttccttgtatttccgttcctcttatacatactctagccttaatttattactctttcttgtaaggaggtttcaacttgctaccagtggattgtttaagtgatcatcatcttgttatattggctagatcagaggaacgagttttcttgtctcggatcccaggactgctggacggctgtcagcttgcctgctccataatgttggacacagtctgctggactgctggacacagtctgctgcaacttgcctgctccgttctcttcccgtatgtattaaattgatgtaatggtctagaaaatcaacaaggttctccaaaaaaaatctgaacgcaaaaatcatcatcaggggataaaaaaa

SEQ ID NO: 36882 - DNA, 1419 bp, Zea Mays
gtcaacttgacatgtagcactatcataagggggactgagaccaagaggctgagctctgataaggatgatcaagatcctggtgatgttgaaggatcaatgctgggtcttcaaagttattgggatgcttcttatttggaagatcttgcaaattttcaggaacatgggcacactggagaaatatggtttggtgcagatgtaatggacacagttgctgtttggacgaaaagtttgtgtaacattattgaaggcaagattccatctggtcaagacaacatcaaaagtgaagtcaatgaaaatttattctccaactaccctgttcttgatgttggaactggaaatggtcttcttttgcaagcattggctaagcaggggtttacagacttaactggaacagattacagtaaaggagctgttgaacttgcaagaaacctagctgctcgtgatggcttctcttcaataaactttttggttgatgatgtacttgagacaaagttagataggaaattcaaaattattacagacaaagggacattggatgccatcggattgcatccagatggtcgtgcgaaaagaatggtatattgggaatctgtatcaaacttggttgagcctggtggcattgtggtcataacgtcatgtaatcacacaaaggatgagcttctgcatgaagtagaagatttcaccaagagaaaatttggcaaggagaacgtggatgaaggtgcacgagatgcgtctgagatcttccggtacatagaccatgtccgaacatatcctaccataatgtttggaggaattgagggctctcaagtctgcactgtggcctttcagcgggtgtgactgaaagctgaggcacacatagttcttggcctgacgtgtcacgttgggtccagaagaaatggataaaaaattttgtgcttcgcctgtgggactgttcctaccgtattaaggaacagtccaaactgtgtcttcttctgttgttagctcatctatccaggatggtcgtgtaattttagatggaccagactatgagacgaatcagtcctgtattgttgtcaccgtgaacatttccttgtatttccgttcctcttatacatactctagccttaatttattactctttcttgtaaggaggtttcaacttgctaccagtggattgtttaagtgatcatcatcttgttatattggctagatcagaggaacgagttttcttgtctcggatcccaggactgctggacggctgtcagcttgcctgctccataatgttggacacagtctgctggactgctggacacagtctgctgcaacttgcctgctccgttctcttcccgtatgtattaaattgatgtaatggtctagaaaatcaacaaggttctccaaaaaaaatctgaacgcaaaaatcatcatcaggggataaaaaaa

SEQ ID NO: 36883 - DNA, 1829 bp, Zea Mays
agaaaacccaaacaaacgcagtctacctcgacagtcgacactcgagagtcgagaccctctcccagcatcaacccgccccgcgctgccctcgtcccgatctccgacccaaatacccgatccaccatggccggaataaggcttacgcccgaggaacccgagatgcccgttggcacgccaccccgcccccagctcccacccttcgtcgccgcggcaggcggtggcggcggaggtctggaaatggcgtcggacgacgagcggtccattgcggcggattcatggtcagtgcggagcgagtacgggagcacgctcgacgatgaccagcgctacgccgacgctgctgaggtgctcgccgcttccgcgtcctccgccaacttcccctccgccgcctccgattactgctctgataaggatgatcaagatcctggtgatgttgaaggatcaatgctgggtcttcaaagttattgggatgcttcttatttggaagatcttgcaaattttcaggaacatgggcacactggagaaatatggtttggtgcagatgtaatggacacagttgctgtttggacgaaaagtttgtgtaacattattgaaggcaagattccatctggtcaagacaacatcaaaagtgaagtcaatgaaaatttattctccaactaccctgttcttgatgttggaactggaaatggtcttcttttgcaagcattggctaagcaggggtactacccaaattttctcaatgatgtttaattagcttcctgttggaacgtggattactacgcaggtttacagacttaactggaacagattacagtaaaggagctgttgaacttgcaagaaacctagctgctcgtgatggcttctcttcaataaactttttggttgatgatgtacttgagacaaagttagataggaaattcaaaattattacagacaaagggacattggatgccatcggattgcatccagatggtcgtgcgaaaagaatggtatattgggaatctgtatcaaacttggttgagcctggtggcattgtggtcataacgtcatgtaatcacacaaaggatgagcttctgcatgaagtagaagatttcaccaagagaaaatttggcaaggagaacgtggatgaaggtgcacgagatgcgtctgagatcttccggtacatagaccatgtccgaacatatcctaccataatgtttggaggaattgagggctctcaagtctgcactgtggcctttcagcgggtgtgactgaaagctgaggcacacatagttcttggcctgacgtgtcacgttgggtccagaagaaatggataaaaaattttgtgcttcgcctgtgggactgttcctaccgtattaaggaacagtccaaactgtgtcttcttctgttgttagctcatctatccaggatggtcgtgtaattttagatggaccagactatgagacgaatcagtcctgtattgttgtcaccgtgaacatttccttgtatttccgttcctcttatacatactctagccttaatttattactctttcttgtaaggaggtttcaacttgctaccagtggattgtttaagtgatcatcatcttgttatattggctagatcagaggaacgagttttcttgtctcggatcccaggactgctggacggctgtcagcttgcctgctccataatgttggacacagtctgctggactgctggacacagtctgctgcaacttgcctgctccgttctcttcccgtatgtattaaattgatgtaatggtctagaaaatcaacaaggttctccaaaaaaaatctgaacgcaaaaatcatcatcaggggataaaaaaa

SEQ ID NO: 36884 - DNA, 2603 bp, Zea Mays
ttgttgcctctcccgacgcccctccctaccctacttcaaaacatttcaaaccactctacgcgactacgcctccttcctctcctcaccccctccccctccactcgctcgccactgaggcgcctgaccagtgatcgtaccatctcccctcgaccacagtccaccgcccgtcaccgccccgccccgcccgctcgacgaggccgcggccgccgcgccgggtggtgaagagggtgctgctatgagtagcgctgtgaaggaccaactgcagcagatgtcgacgacgtacgattctctcctgttggagctcaacatgatttgggatgaggtcggtgagcccgacatggcgagggaccggatgctgctggagctcgagcaggaatggctcgacgtctacaggaggaaggtcgaccaggccaatcggtgcagggcccagttgcggcaggccattgcggatgcagaggccgagctcgctggcatctgctcggccatgagcgagccaccgatacatgttagacagtcaaatcagaagttacatggtttaagggaggaattgaatgcgattgtcccatacttggaggagatgagaaagaagaaagttgaaagatgggaccaatttgttgatgtcatagagcaaattaagaaggttgcatctgaaatcaggccttcagattttgtacccttcataattcctgtggatcagtctgatctgtcattaagaaagctggatgagctaacgaaagagctacaatcccttcagaaggagaagagtgatcggctgaagcaagtgatggaacatcttagcactttgcatttgttatgcgaggtgcttggtgtagatttcaaacaaacggtatacgaggtgcaccctagcctgggtgaggctgatggatcaaagaacctaagcaacagtacaattgagagacttgcatcagctgtaaacagattgcgtgaattgaaagtccagaggatgcaaaagcttcaagatttggcatctagcatgcttgaactttggaatctcatggatacaccgcttgaagagcagcagatgttccagaatttaacgtgcaatattgctgcttcagaacatgaaataactgggcctaacaccctctctactgacttcctcagctacgtggaatctgaagttttaagacttgaacagcttaaagcgagcaagatgaaagacctcgttcttaaaaagaagacagaactggaagatcataggagacgtgctcatttgattggtgaggaaggttatgcagccgaatttagcgatgaggctattgaggagctgtcgatcctgcgctggtgctggaacaaattgaggctcacattgccacagtgaaagaggaagcttttagccgtaaggatattcttgagaaggttgaaagatggctgaatgcatgtgaggaggaagcttggctggaagattataacaaagacgacaatcgttataatgccgggaggggggcccacttgacactcaaaagggctgagaaagctcgtattttggttaacaagatcccaggactggtagatgttttgaccacaaaaattgtagcttgggagacagaaagaggaaaggagttcacatatgatggtgtccgcctgcggtcaatgcttgaagactacataatcattcgccaggagaaagagctagagaagaagaggcaaagggatcagaagaagatccaggatcaactcaaagctgagcaggaagcgctgtatggatcaaaaccaagtccatctaagactcaaagcacgaagaaggtgcctagacaatccatgggtggtgcgaaccgaagactgtctcttggtggagccacaacgcaagcccccaaaacagatataatgcactccaagacagctcgtgctgcgaagaaggctgaagatttgggcgctttatctcctagtagcagaggcttggacattgccggtcttcccatcaagaaactatctttcaacgcaagcactctgcgagaggcagaaacaccacgcaagccttttgcccagatcatgccaggaaacaatgtctcgtcgatgcctgcgcggcccatctccaacgacacagaggaagagaacaaaacccccaaaacatttgcagggctcaatccaaaaacgccggtgacagtgacggctcctatgcagttggcggtgacaccagctgtggccaacaaggtcatagccactcctgcaacccttttccaggagaaggcagagtcgccagcgctgcctggggacatcgagtactcgttcgaagagaggcgactcgccgtttacctggccaggcaagtggcattttttgttcattcaccttctcccagttgcgctaatacccagctattacttagttgaaagctgagctgactgcgatttctcggcagaggccaatgttacctgttggtcgatactcgatagtagtgggcctcggtcttactttgcactactattcattcatagccatattgctactagccagtaaagggagtttttagtcttgagagcttgtggtctgcatcgtaagttgtatagctttatacggtgcatcgtcgatgacctgttattgttattatatggtttattactgttatccaaatatcttgtct

SEQ ID NO: 36885 - DNA, 2599 bp, Zea Mays
ttgttgcctctcccgacgcccctccctaccctacttcaaaacatttcaaaccactctacgcgactacgcctccttcctctcctcaccccctccccctccactcgctcgccactgaggcgcctgaccagtgatcgtaccatctcccctcgaccacagtccaccgcccgtcaccgccccgccccgcccgctcgacgaggccgcggccgccgcgccgggtggtgaagaggtgagtatcctacttgcgattctcccgggtgctgctatgagtagcgctgtgaaggaccaactgcagcagatgtcgacgacgtacgattctctcctgttggagctcaacatgatttgggatgaggtcggtgagcccgacatggcgagggaccggatgctgctggagctcgagcaggaatggctcgacgtctacaggaggaaggtcgaccaggccaatcggtgcagggcccagttgcggcaggccattgcggatgcagaggccgagctcgctggcatctgctcggccatgagcgagccaccgatacatgttagacagtcaaatcagaagttacatggtttaagggaggaattgaatgcgattgtcccatacttggaggagatgagaaagaagaaagttgaaagatgggaccaatttgttgatgtcatagagcaaattaagaaggttgcatctgaaatcaggccttcagattttgtacccttcataattcctgtggatcagtctgatctgtcattaagaaagctggatgagctaacgaaagagctacaatcccttcagaaggagaagagtgatcggctgaagcaagtgatggaacatcttagcactttgcatttgttatgcgaggtgcttggtgtagatttcaaacaaacggtatacgaggtgcaccctagcctgggtgaggctgatggatcaaagaacctaagcaacagtacaattgagagacttgcatcagctgtaaacagattgcgtgaattgaaagtccagaggatgcaaaagcttcaagatttggcatctagcatgcttgaactttggaatctcatggatacaccgcttgaagagcagcagatgttccagaatttaacgtgcaatattgctgcttcagaacatgaaataactgggcctaacaccctctctactgacttcctcagctacgtggaatctgaagttttaagacttgaacagcttaaagcgagcaagatgaaagacctcgttcttaaaaagaagacagaactggaagatcataggagacgtgctcatttgattggtgaggaaggttatgcagccgaatttagcgatgaggctattgaggcaggagctgtcgatcctgcgctggtgctggaacaaattgaggctcacattgccacagtgaaagaggaagcttttagccgtaaggatattcttgagaaggttgaaagatggctgaatgcatgacgacaatcgttataatgccgggaggggggcccacttgacactcaaaagggctgagaaagctcgtattttggttaacaagatcccaggactggtagatgttttgaccacaaaaattgtagcttgggagacagaaagaggaaaggagttcacatatgatggtgtccgcctgcggtcaatgcttgaagactacataatcattcgccaggagaaagagctagagaagaagaggcaaagggatcagaagaagatccaggatcaactcaaagctgagcaggaagcgctgtatggatcaaaaccaagtccatctaagactcaaagcacgaagaaggtgcctagacaatccatgggtggtgcgaaccgaagactgtctcttggtggagccacaacgcaagcccccaaaacagatataatgcactccaagacagctcgtgctgcgaagaaggctgaagatttgggcgctttatctcctagtagcagaggcttggacattgccggtcttcccatcaagaaactatctttcaacgcaagcactctgcgagaggcagaaacaccacgcaagccttttgcccagatcatgccaggaaacaatgtctcgtcgatgcctgcgcggcccatctccaacgacacagaggaagagaacaaaacccccaaaacatttgcagggctcaatccaaaaacgccggtgacagtgacggctcctatgcagttggcggtgacaccagctgtggccaacaaggtcatagccactcctgcaacccttttccaggagaaggcagagtcgccagcgctgcctggggacatcgagtactcgttcgaagagaggcgactcgccgtttacctggccaggcaagtggcattttttgttcattcaccttctcccagttgcgctaatacccagctattacttagttgaaagctgagctgactgcgatttctcggcagaggccaatgttacctgttggtcgatactcgatagtagtgggcctcggtcttactttgcactactattcattcatagccatattgctactagccagtaaagggagtttttagtcttgagagcttgtggtctgcatcgtaagttgtatagctttatacggtgcatcgtcgatgacctgttattgttattatatggtttattactgttatccaaatatcttgtct

SEQ ID NO: 36886 - DNA, 2600 bp, Zea Mays
ttgttgcctctcccgacgcccctccctaccctacttcaaaacatttcaaaccactctacgcgactacgcctccttcctctcctcaccccctccccctccactcgctcgccactgaggcgcctgaccagtgatcgtaccatctcccctcgaccacagtccaccgcccgtcaccgccccgccccgcccgctcgacgaggccgcggccgccgcgccgggtggtgaagagggtgctgctatgagtagcgctgtgaaggaccaactgcagcagatgtcgacgacgtacgattctctcctgttggagctcaacatgatttgggatgaggtcggtgagcccgacatggcgagggaccggatgctgctggagctcgagcaggaatggctcgacgtctacaggaggaaggtcgaccaggccaatcggtgcagggcccagttgcggcaggccattgcggatgcagaggccgagctcgctggcatctgctcggccatgagcgagccaccgatacatgttagacagtcaaatcagaagttacatggtttaagggaggaattgaatgcgattgtcccatacttggaggagatgagaaagaagaaagttgaaagatgggaccaatttgttgatgtcatagagcaaattaagaaggttgcatctgaaatcaggccttcagattttgtacccttcataattcctgtggatcagtctgatctgtcattaagaaagctggatgagctaacgaaagagctacaatcccttcagaaggagaagagtgatcggctgaagcaagtgatggaacatcttagcactttgcatttgttatgcgaggtgcttggtgtagatttcaaacaaacggtatacgaggtgcaccctagcctgggtgaggctgatggatcaaagaacctaagcaacagtacaattgagagacttgcatcagctgtaaacagattgcgtgaattgaaagtccagaggatgcaaaagcttcaagatttggcatctagcatgcttgaactttggaatctcatggatacaccgcttgaagagcagcagatgttccagaatttaacgtgcaatattgctgcttcagaacatgaaataactgggcctaacaccctctctactgacttcctcagctacgtggaatctgaagttttaagacttgaacagcttaaagcgagcaagatgaaagacctcgttcttaaaaagaagacagaactggaagatcataggagacgtgctcatttgattggtgaggaaggttatgcagccgaatttagcgatgaggctattgaggcaggagctgtcgatcctgcgctggtgctggaacaaattgaggctcacattgccacagtgaaagaggaagcttttagccgtaaggatattcttgagaaggttgaaagatggctgaatgcatgtgaggaggaagcttggctggaagattataacaaagacgacaatcgttataatgccgggaggggggcccacttgacactcaaaagggctgagaaagctcgtattttggttaacaagatcccaggactggtagatgttttgaccacaaaaattgtagcttgggagacagaaagaggaaaggagttcacatatgatggtgtccgcctgcggtcaatgcttgaagactacataatcattcgccaggagaaagagctagagaagaagaggcaaagggatcagaagaagatccaggatcaactcaaagctgagcaggaagcgctgtatggatcaaaaccaagtccatctaagactcaaagcacgaagaaggtgcctagacaatccatgggtggtgcgaaccgaagactgtctcttggtggagccacaacgcaagcccccaaaacagatataatgcactccaagacagctcgtgctgcgaagaaggctgaagatttgggcgctttatctcctaaggcttggacattgccggtcttcccatcaagaaactatctttcaacgcaagcactctgcgagaggcagaaacaccacgcaagccttttgcccagatcatgccaggaaacaatgtctcgtcgatgcctgcgcggcccatctccaacgacacagaggaagagaacaaaacccccaaaacatttgcagggctcaatccaaaaacgccggtgacagtgacggctcctatgcagttggcggtgacaccagctgtggccaacaaggtcatagccactcctgcaacccttttccaggagaaggcagagtcgccagcgctgcctggggacatcgagtactcgttcgaagagaggcgactcgccgtttacctggccaggcaagtggcattttttgttcattcaccttctcccagttgcgctaatacccagctattacttagttgaaagctgagctgactgcgatttctcggcagaggccaatgttacctgttggtcgatactcgatagtagtgggcctcggtcttactttgcactactattcattcatagccatattgctactagccagtaaagggagtttttagtcttgagagcttgtggtctgcatcgtaagttgtatagctttatacggtgcatcgtcgatgacctgttattgttattatatggtttattactgttatccaaatatcttgtct

SEQ ID NO: 36887 - DNA, 2604 bp, Zea Mays
ttgttgcctctcccgacgcccctccctaccctacttcaaaacatttcaaaccactctacgcgactacgcctccttcctctcctcaccccctccccctccactcgctcgccactgaggcgcctgaccagtgatcgtaccatctcccctcgaccacagtccaccgcccgtcaccgccccgccccgcccgctcgacgaggccgcggccgccgcgccgggtggtgaagaggtgagtatcctacttgcgattctcccgggtgctgctatgagtagcgctgtgaaggaccaactgcagcagatgtcgacgacgtacgattctctcctgttggagctcaacatgatttgggatgaggtcggtgagcccgacatggcgagggaccggatgctgctggagctcgagcaggaatggctcgacgtctacaggaggaaggtcgaccaggccaatcggtgcagggcccagttgcggcaggccattgcggatgcagaggccgagctcgctggcatctgctcggccatgagcgagccaccgatacatgttagacagtcaaatcagaagttacatggtttaagggaggaattgaatgcgattgtcccatacttggaggagatgagaaagaagaaagttgaaagatgggaccaatttgttgatgtcatagagcaaattaagaaggttgcatctgaaatcaggccttcagattttgtacccttcataattcctgtggatcagtctgatctgtcattaagaaagctggatgagctaacgaaagagctacaatcccttcagaaggagaagagtgatcggctgaagcaagtgatggaacatcttagcactttgcatttgttatgcgaggtgcttggtgtagatttcaaacaaacggtatacgaggtgcaccctagcctgggtgaggctgatggatcaaagaacctaagcaacagtacaattgagagacttgcatcagctgtaaacagattgcgtgaattgaaagtccagaggatgcaaaagcttcaagatttggcatctagcatgcttgaactttggaatctcatggatacaccgcttgaagagcagcagatgttccagaatttaacgtgcaatattgctgcttcagaacatgaaataactgggcctaacaccctctctactgacttcctcagctaccttaaagcgagcaagatgaaagacctcgttcttaaaaagaagacagaactggaagatcataggagacgtgctcatttgattggtgaggaaggttatgcagccgaatttagcgatgaggctattgaggcaggagctgtcgatcctgcgctggtgctggaacaaattgaggctcacattgccacagtgaaagaggaagcttttagccgtaaggatattcttgagaaggttgaaagatggctgaatgcatgtgaggaggaagcttggctggaagattataacaaagacgacaatcgttataatgccgggaggggggcccacttgacactcaaaagggctgagaaagctcgtattttggttaacaagatcccaggactggtagatgttttgaccacaaaaattgtagcttgggagacagaaagaggaaaggagttcacatatgatggtgtccgcctgcggtcaatgcttgaagactacataatcattcgccaggagaaagagctagagaagaagaggcaaagggatcagaagaagatccaggatcaactcaaagctgagcaggaagcgctgtatggatcaaaaccaagtccatctaagactcaaagcacgaagaaggtgcctagacaatccatgggtggtgcgaaccgaagactgtctcttggtggagccacaacgcaagcccccaaaacagatataatgcactccaagacagctcgtgctgcgaagaaggctgaagatttgggcgctttatctcctagtagcagaggcttggacattgccggtcttcccatcaagaaactatctttcaacgcaagcactctgcgagaggcagaaacaccacgcaagccttttgcccagatcatgccaggaaacaatgtctcgtcgatgcctgcgcggcccatctccaacgacacagaggaagagaacaaaacccccaaaacatttgcagggctcaatccaaaaacgccggtgacagtgacggctcctatgcagttggcggtgacaccagctgtggccaacaaggtcatagccactcctgcaacccttttccaggagaaggcagagtcgccagcgctgcctggggacatcgagtactcgttcgaagagaggcgactcgccgtttacctggccaggcaagtggcattttttgttcattcaccttctcccagttgcgctaatacccagctattacttagttgaaagctgagctgactgcgatttctcggcagaggccaatgttacctgttggtcgatactcgatagtagtgggcctcggtcttactttgcactactattcattcatagccatattgctactagccagtaaagggagtttttagtcttgagagcttgtggtctgcatcgtaagttgtatagctttatacggtgcatcgtcgatgacctgttattgttattatatggtttattactgttatccaaatatcttgtct

SEQ ID NO: 36888 - DNA, 1372 bp, Zea Mays
ccccgcgccaccacccagttcttcgatcccattccaagcgcgcgcagcagcagcagcagcgccagcatgggtcgggcgccgtgctgcgacaagacgagtgtgaagcgggggccgtggtcgcccgaggaggacgacctgctgcgcagctacgtccagaaccacggcacgggcggcaactggatcgcgctcccgcacaaagcagggctcaaccggtgcggcaagagctgccggctgcggtggctcaactacctgcgccccgacatcaagcacggcggctacacggagcaggaggaccgggtcatctgctccctctacagctccatcgggagcaggtggtccatcatcgcgtccaagctgcccgggcggacggacaacgacgtcaagaactactggaacaccaagctcaagaagaaggcgatcgccatgcagcagcagcagcagcagcagcaagagtactaccagcagcagcacagctcaggaggccgcggccgccgcgccgccgccgccgccgccgctccccgaagccaatgcgcctccgtgcagccgtcgcccgcgtccgcctcgtccgccgtcaccaccgcgagcgccagcgacgcgtgcagcttcggggccatgtacccctccccgtcggcgctgcaggccgctccggtgctcgcgcgctacgacagcacggcggcggcgccagcaccactgtctctgccgcagcaggcgtcttcgctcgccgccgagttcgtccctcccgcgccaccacccgtcggcgccagctgggccggcgggctgcccctcgacgacatgttcctgcccgagctcctcggggacagcgagttcccgcccggcgacggcgacttcttcggcgccggggccggggccgggctcctcgccccgctgctgctgcaggacagatttccagcggcgtccctgcaggagctctccgcgtgctacttccccaacgcgccggccgagatgtgggcggccgcggaccacgcccatgccaagccgccggccggcctctgccacagcctgacatgaccgcggagacaacactggcgcgcgctcgatccgtcttgctagctagctagtcatccttggctctctcgatccctgtcctgtccatcgtcgatacgcatgcgctctctctatatatgggtgaggtcatcacatgtacattatcactttccatatggcctgcgatgcgactagctagcatcatgcatatcatagaaacattactagatgtggatcgccattgctttgtttggcttctcttctgcgtgcgtacgtacacgaacacgattacacgaccactggactggacagccagtcactgtgtgcaaaaatattcttcagtgccgttgtttgtcactatgataat

SEQ ID NO: 36889 - DNA, 1596 bp, Zea Mays
tatgtgctttccctagactctttaggttggtggagcatttgcttatactggccaaagactcaggtttaccatcaaagtatatcgccgattataactcaagacttactgtatcctttctacgacctgactgttatggtgcatatctcatcttatttgagtacttagctattaatggcatataatcttgttaaatgaaacaaaatgtttgctttctgaaactaaaacatggtactctaacttgcttaaactcaatccttcaaatcctcgtttccaccttgagtttgagtagggtgttaactgttaagtgtacgaggccttttctataggccatatggctcatgattctatatagtcatctccacttgtgggatgcttatcttttcagatccccaatgttccccaaggttagaaacactattgatgttttttcaaccaatccccttgggattttttgttccaccatggagcagtgttttcaagttggacgacttgctgttcgttctggctgaccggcttgggcgattaatcacgattagtcggatgacttggcgattaatcatgacttgtccaaaccgacttggaattaatcggatgacttgaaaacattgtcgtggagaaacaaaagggtaaagaaattaggcagaacaactgcaaacaaattacacaatggaattctcttatcatatacgctgcagagcatttttagtgataagaaattcaaaggttgtctcaactccctcatggatgctgatgcaacaacgagcaacattcaaagatttcttttcagagctgtgtcatatatggacatggaatctggattcctgtcggtagaaagcttcctaaaggccctttcttccatgcagaggcaacctaagatggacagcttacaagatctctcgattttggaattatacattcttgtgtgcatgcacagattagaaagtaaggagcaaacctcatacaacttcaccagcataatgaaagaatacagatccatacaagacgcctataagacttctgataaatatgcaagcaccgtttgttttagggcctttgagcacctttcggatcgtgagctgattagttttggtgacaatagatggagaaaccaggcgcttgaataccgacctgttaagctcctcatatcctcccgcgagctcgctgagtccctcaagctgaacaccacctgccccgctgtactgcagaagctgtttgatcgtgaaagatacatgtagaatctcctttcagatggccgcgcttcacctgacttgagtcgccgctttcatgtttcaccgggttgtcaagttcatgtttcactgtaaaccggcgattgtattagtatcttgtccactgttcgctggaaaaggtgtgggccgtgtggccaactgcccagcgtgagtcgtgacctgcctgtcaatcgcttgagtcttgaccataggccacacggaattagatatctgtggtgcactgattttgggctaacgacccgatttctatctcgcacaagtttagcagcgtggtgacagtattttggtagctttgaaatgaatgcgctattcggagtttacaaaaatagatagaataaaatgattcaaa

SEQ ID NO: 36890 - DNA, 1816 bp, Zea Mays
ggcttcttcagatgacaacactgagttcatgattgacatgttacgggagtgcggactagctcacaagacaatactatttattctagaagaattcgacctctttgctcagggtaaacagaggttgctttacagcttacttgatgcaatgcaatctctaacatcccaagctgttgtcattggtgtgagttgccgcttggatgcagatcaactcctagagaaaagggttagatcccgattctctcataggaaacttttatttatttcgccttcgttggatgatatacaacggttggtggagcatttgcttatactggccaaagactcaggtttaccatcaaagtatatcgccgattataactcaagacttactgtatcctttctacgacctgactgttatggtgcatatctcatcttatttgagtacttagctattaatggcatataatcttgttaaatgaaacaaaatgtttgctttctgaaactaaaacatggtactctaacttgcttaaactcaatccttcaaatcctcgtttccaccttgagtttgagtagggtgttaactgttaagtgtacgaggccttttctataggccatatggctcatgattctatatagtcatctccacttgtgggatgcttatcttttcagatccccaatgttccccaaggttagaaacactattgatgttttttcaaccaatccccttgggattttttgttccaccatggagcagtgttttcaagttggacgacttgctgttcgttctggctgaccggcttgggcgattaatcacgattagtcggatgacttggcgattaatcatgacttgtccaaaccgacttggaattaatcggatgacttgaaaacattgtcgtggagaaacaaaagggtaaagaaattaggcagaacaactgcaaacaaattacacaatggaattctcttatcatatacgctgcagagcatttttagtgataagaaattcaaaggttgtctcaactccctcatggatgctgatgcaacaacgagcaacattcaaagatttcttttcagagctgtgtcatatatggacatggaatctggattcctgtcggtagaaagcttcctaaaggccctttcttccatgcagaggcaacctaagatggacagcttacaagattagaaagtaaggagcaaacctcatacaacttcaccagcataatgaaagaatacagatccatacaagacgcctataagacttctgataaatatgcaagcaccgtttgttttagggcctttgagcacctttcggatcgtgagctgattagttttggtgacaatagatggagaaaccaggcgcttgaataccgacctgttaagctcctcatatcctcccgcgagctcgctgagtccctcaagctgaacaccacctgccccgctgtactgcagaagctgtttgatcgtgaaagatacatgtagaatctcctttcagatggccgcgcttcacctgacttgagtcgccgctttcatgtttcaccgggttgtcaagttcatgtttcactgtaaaccggcgattgtattagtatcttgtccactgttcgctggaaaaggtgtgggccgtgtggccaactgcccagcgtgagtcgtgacctgcctgtcaatcgcttgagtcttgaccataggccacacggaattagatatctgtggtgcactgattttgggctaacgacccgatttctatctcgcacaagtttagcagcgtggtgacagtattttggtagctttgaaatgaatgcgctattcggagtttacaaaaatagatagaataaaatgattcaaa

SEQ ID NO: 36891 - DNA, 1557 bp, Zea Mays
ggcttcttcagatgacaacactgagttcatgattgacatgttacgggagtgcggactagctcacaagacaatactatttattctagaagaattcgacctctttgctcagggtaaacagaggttgctttacagcttacttgatgcaatgcaatctctaacatcccaagctgttgtcattggtgtgagttgccgcttggatgcagatcaactcctagagaaaagggttagatcccgattctctcataggaaacttttatttatttcgccttcgttggatgatatacaacggttggtggagcatttgcttatactggccaaagactcaggtttaccatcaaagtatatcgccgattataactcaagacttactgtatcctttctacgacctgactgttatggtgcatatctcatcttatttgagtacttagctattaatggcatataatcttgttaaatgaaacaaaatgtttgctttctgaaactaaaacatggtactctaacttgcttaaactcaatccttcaaatcctcgtttccaccttgagtttgagtagggtgttaactgttaagtgtacgaggccttttctataggccatatggctcatgattctatatagtcatctccacttgtgggatgcttatcttttcagatccccaatgttccccaaggttagaaacactattgatgttttttcaaccaatccccttgggattttttgttccaccatggagcagtgttttcaagttggacgacttgctgttcgttctggctgaccggcttgggcgattaatcacgattagtcggatgacttggcgattaatcatgacttgtccaaaccgacttggaattaatcggatgacttgaaaacattgtcgtggagaaacaaaagggtaaagaaattaggcagaacaactgcaaacaaattacacaatggaattctcttatcatatacgctgcagagcatttttagtgataagaaattcaaaggttgtctcaactccctcatggatgctgatgcaacaacgagcaacattcaaagatttcttttcagagctgtgtcatatatggacatggaatctggattcctgtcggtagaaagcttcctaaaggccctttcttccatgcagaggcaacctaagatggacagcttacaaggctgtactgcagaagctgtttgatcgtgaaagatacatgtagaatctcctttcagatggccgcgcttcacctgacttgagtcgccgctttcatgtttcaccgggttgtcaagttcatgtttcactgtaaaccggcgattgtattagtatcttgtccactgttcgctggaaaaggtgtgggccgtgtggccaactgcccagcgtgagtcgtgacctgcctgtcaatcgcttgagtcttgaccataggccacacggaattagatatctgtggtgcactgattttgggctaacgacccgatttctatctcgcacaagtttagcagcgtggtgacagtattttggtagctttgaaatgaatgcgctattcggagtttacaaaaatagatagaataaaatgattcaaa

SEQ ID NO: 36892 - DNA, 1852 bp, Zea Mays
ggcttcttcagatgacaacactgagttcatgattgacatgttacgggagtgcggactagctcacaagacaatactatttattctagaagaattcgacctctttgctcagggtaaacagaggttgctttacagcttacttgatgcaatgcaatctctaacatcccaagctgttgtcattggtgtgagttgccgcttgatcaactcctagagaaaagggttagatcccgattctctcataggaaacttttatttatttcgccttcgttggatgatatacaacggttggtggagcatttgcttatactggccaaagactcaggtttaccatcaaagtatatcgccgattataactcaagacttactgtatcctttctacgacctgactgttatggtgcatatctcatcttatttgagtacttagctattaatggcatataatcttgttaaatgaaacaaaatgtttgctttctgaaactaaaacatggtactctaacttgcttaaactcaatccttcaaatcctcgtttccaccttgagtttgagtagggtgttaactgttaagtgtacgaggccttttctataggccatatggctcatgattctatatagtcatctccacttgtgggatgcttatcttttcagatccccaatgttccccaaggttagaaacactattgatgttttttcaaccaatccccttgggattttttgttccaccatggagcagtgttttcaagttggacgacttgctgttcgttctggctgaccggcttgggcgattaatcacgattagtcggatgacttggcgattaatcatgacttgtccaaaccgacttggaattaatcggatgacttgaaaacattgtcgtggagaaacaaaagggtaaagaaattaggcagaacaactgcaaacaaattacacaatggaattctcttatcatatacgctgcagagcatttttagtgataagaaattcaaaggttgtctcaactccctcatggatgctgatgcaacaacgagcaacattcaaagatttcttttcagagctgtgtcatatatggacatggaatctggattcctgtcggtagaaagcttcctaaaggccctttcttccatgcagaggcaacctaagatggacagcttacaagatctctcgattttggaattatacattcttgtgtgcatgcacagattagaaagtaaggagcaaacctcatacaacttcaccagcataatgaaagaatacagatccatacaagacgcctataagacttctgataaatatgcaagcaccgtttgttttagggcctttgagcacctttcggatcgtgagctgattagttttggtgacaatagatggagaaaccaggcgcttgaataccgacctgttaagctcctcatatcctcccgcgagctcgctgagtccctcaagctgaacaccacctgccccgctgtactgcagaagctgtttgatcgtgaaagatacatgtagaatctcctttcagatggccgcgcttcacctgacttgagtcgccgctttcatgtttcaccgggttgtcaagttcatgtttcactgtaaaccggcgattgtattagtatcttgtccactgttcgctggaaaaggtgtgggccgtgtggccaactgcccagcgtgagtcgtgacctgcctgtcaatcgcttgagtcttgaccataggccacacggaattagatatctgtggtgcactgattttgggctaacgacccgatttctatctcgcacaagtttagcagcgtggtgacagtattttggtagctttgaaatgaatgcgctattcggagtttacaaaaatagatagaataaaatgattcaaa

SEQ ID NO: 36893 - DNA, 1228 bp, Zea Mays
ggcttcttcagatgacaacactgagttcatgattgacatgttacgggagtgcggactagctcacaagacaatactatttattctagaagaattcgacctctttgctcagggtaaacagaggttgctttacagcttacttgatgcaatgcaatctctaacatcccaagctgttgtcattggtgtgagttgccgcttggatgcagatcaactcctagagaaaagggttagatcccgattctctcataggaaacttttatttatttcgccttcgttggatgatatacaacggttggtggagcatttgcttatactggccaaagactcaggtttaccatcaaagtatatcgccgattataactcaagacttactagcatttttagtgataagaaattcaaaggttgtctcaactccctcatggatgctgatgcaacaacgagcaacattcaaagatttcttttcagagctgtgtcatatatggacatggaatctggattcctgtcggtagaaagcttcctaaaggccctttcttccatgcagaggcaacctaagatggacagcttacaagattagaaagtaaggagcaaacctcatacaacttcaccagcataatgaaagaatacagatccatacaagacgcctataagacttctgataaatatgcaagcaccgtttgttttagggcctttgagcacctttcggatcgtgagctgattagttttggtgacaatagatggagaaaccaggcgcttgaataccgacctgttaagctcctcatatcctcccgcgagctcgctgagtccctcaagctgaacaccacctgccccgctgtactgcagaagctgtttgatcgtgaaagatacatgtagaatctcctttcagatggccgcgcttcacctgacttgagtcgccgctttcatgtttcaccgggttgtcaagttcatgtttcactgtaaaccggcgattgtattagtatcttgtccactgttcgctggaaaaggtgtgggccgtgtggccaactgcccagcgtgagtcgtgacctgcctgtcaatcgcttgagtcttgaccataggccacacggaattagatatctgtggtgcactgattttgggctaacgacccgatttctatctcgcacaagtttagcagcgtggtgacagtattttggtagctttgaaatgaatgcgctattcggagtttacaaaaatagatagaataaaatgattcaaa

SEQ ID NO: 36894 - DNA, 1221 bp, Zea Mays
ggcttcttcagatgacaacactgagttcatgattgacatgttacgggagtgcggactagctcacaagacaatactatttattctagaagaattcgacctctttgctcagggtaaacagaggttgctttacagcttacttgatgcaatgcaatctctaacatcccaagctgttgtcattggtgtgagttgccgcttggatgcagatcaactcctagagaaaagggttagatcccgattctctcataggaaacttttatttatttcgccttcgttggatgatatacaacggttggtggagcatttgcttatactggccaaagactcaggtttaccatcaaagtatatcgccgattataactcaagacttactagcatttttagtgataagaaattcaaaggttgtctcaactccctcatggatgctgatgcaacaacgagcaacattcaaagatttcttttcagagctgtgtcatatatggacatggaatctggattcctgtcggtagaaagcttcctaaaggccctttcttccatgcagaggcaacctaagatggacagcttacaagattagaaagtaaggagcaaacctcatacaacttcaccagcataatgaaagatccatacaagacgcctataagacttctgataaatatgcaagcaccgtttgttttagggcctttgagcacctttcggatcgtgagctgattagttttggtgacaatagatggagaaaccaggcgcttgaataccgacctgttaagctcctcatatcctcccgcgagctcgctgagtccctcaagctgaacaccacctgccccgctgtactgcagaagctgtttgatcgtgaaagatacatgtagaatctcctttcagatggccgcgcttcacctgacttgagtcgccgctttcatgtttcaccgggttgtcaagttcatgtttcactgtaaaccggcgattgtattagtatcttgtccactgttcgctggaaaaggtgtgggccgtgtggccaactgcccagcgtgagtcgtgacctgcctgtcaatcgcttgagtcttgaccataggccacacggaattagatatctgtggtgcactgattttgggctaacgacccgatttctatctcgcacaagtttagcagcgtggtgacagtattttggtagctttgaaatgaatgcgctattcggagtttacaaaaatagatagaataaaatgattcaaa

SEQ ID NO: 36895 - DNA, 1219 bp, Zea Mays
taggcttcttcagatgacaacactgagttcatgattgacatgttacgggagtgcggactagctcacaagacaatactatttattctagaagaattcgacctctttgctcagggtaaacagaggttgctttacagcttacttgatgcaatgcaatctctaacatcccaagctgttgtcattggtgtgagttgccgcttggatgcagatcaactcctagagaaaagggttagatcccgattctctcataggaaacttttatttatttcgccttcgttggatgatatacaacggttggtggagcatttgcttatactggccaaagactcaggtttaccatcaaagtatatcgccgattataactcaagacttacttgataagaaattcaaaggttgtctcaactccctcatggatgctgatgcaacaacgagcaacattcaaagatttcttttcagagctgtgtcatatatggacatggaatctggattcctgtcggtagaaagcttcctaaaggccctttcttccatgcagaggcaacctaagatggacagcttacaagattagaaagtaaggagcaaacctcatacaacttcaccagcataatgaaagaatacagatccatacaagacgcctataagacttctgataaatatgcaagcaccgtttgttttagggcctttgagcacctttcggatcgtgagctgattagttttggtgacaatagatggagaaaccaggcgcttgaataccgacctgttaagctcctcatatcctcccgcgagctcgctgagtccctcaagctgaacaccacctgccccgctgtactgcagaagctgtttgatcgtgaaagatacatgtagaatctcctttcagatggccgcgcttcacctgacttgagtcgccgctttcatgtttcaccgggttgtcaagttcatgtttcactgtaaaccggcgattgtattagtatcttgtccactgttcgctggaaaaggtgtgggccgtgtggccaactgcccagcgtgagtcgtgacctgcctgtcaatcgcttgagtcttgaccataggccacacggaattagatatctgtggtgcactgattttgggctaacgacccgatttctatctcgcacaagtttagcagcgtggtgacagtattttggtagctttgaaatgaatgcgctattcggagtttacaaaaatagatagaataaaatgattcaaa

SEQ ID NO: 36896 - DNA, 1232 bp, Zea Mays
cttctctcttaggcttcttcagatgacaacactgagttcatgattgacatgttacgggagtgcggactagctcacaagacaatactatttattctagaagaattcgacctctttgctcagggtaaacagaggttgctttacagcttacttgatgcaatgcaatctctaacatcccaagctgttgtcattggtgtgagttgccgcttggatgcagatcaactcctagagaaaagggttagatcccgattctctcataggaaacttttatttatttcgccttcgttggatgatatacaacggttggtggagcatttgcttatactggccaaagactcaggtttaccatcaaagtatatcgccgattataactcaagacttactagcatttttagtgataagaaattcaaaggttgtctcaactccctcatggatgctgatgcaacaacgagcaacattcaaagatttcttttcagagctgtgtcatatatggacatggaatctggattcctgtcggtagaaagcttcctaaaggccctttcttccatgcagaggcaacctaagatggacagcttacaagatctctcgattttggaattatacattcttgtgtgcatgcacagattagaaagtaaggagcaaacctcatacaacttcaccagcataatgaaagaatacagatccatacaagacgcctataagacttctgataaatatgcaagcaccgtttgttttaggatggagaaaccaggcgcttgaataccgacctgttaagctcctcatatcctcccgcgagctcgctgagtccctcaagctgaacaccacctgccccgctgtactgcagaagctgtttgatcgtgaaagatacatgtagaatctcctttcagatggccgcgcttcacctgacttgagtcgccgctttcatgtttcaccgggttgtcaagttcatgtttcactgtaaaccggcgattgtattagtatcttgtccactgttcgctggaaaaggtgtgggccgtgtggccaactgcccagcgtgagtcgtgacctgcctgtcaatcgcttgagtcttgaccataggccacacggaattagatatctgtggtgcactgattttgggctaacgacccgatttctatctcgcacaagtttagcagcgtggtgacagtattttggtagctttgaaatgaatgcgctattcggagtttacaaaaatagatagaataaaatgattcaaa

SEQ ID NO: 36897 - DNA, 1872 bp, Zea Mays
ctctgatcccttctctcttaggcttcttcagatgacaacactgagttcatgattgacatgttacgggagtgcggactagctcacaagacaatactatttattctagaagaattcgacctctttgctcagggtaaacagaggttgctttacagcttacttgatgcaatgcaatctctaacatcccaagctgttgtcattggtgtgagttgccgcttggatgcagatcaactcctagagaaaagggttagatcccgattctctcataggaaacttttatttatttcgccttcgttggatgatatacaacggttggtggagcatttgcttatactggccaaagactcaggtttaccatcaaagtatatcgccgattataactcaagacttactgtatcctttctacgacctgactgttatggtgcatatctcatcttatttgagtacttagctattaatggcatataatcttgttaaatgaaacaaaatgtttgctttctgaaactaaaacatggtactctaacttgcttaaactcaatccttcaaatcctcgtttccaccttgagtttgagtagggtgttaactgttaagtgtacgaggccttttctataggccatatggctcatgattctatatagtcatctccacttgtgggatgcttatcttttcagatccccaatgttccccaaggttagaaacactattgatgttttttcaaccaatccccttgggattttttgttccaccatggagcagtgttttcaagttggacgacttgctgttcgttctggctgaccggcttgggcgattaatcacgattagtcggatgacttggcgattaatcatgacttgtccaaaccgacttggaattaatcggatgacttgaaaacattgtcgtggagaaacaaaagggtaaagaaattaggcagaacaactgcaaacaaattacacaatggaattctcttatcatatacgctgcagagcatttttagtgataagaaattcaaaggttgtctcaactccctcatggatgctgatgcaacaacgagcaacattcaaagatttcttttcagagctgtgtcatatatggacatggaatctggattcctgtcggtagaaagcttcctaaaggccctttcttccatgcagaggcaacctaagatggacagcttacaagatctctcgattttggaattatacattcttgtgtgcatgcacagattagaaagtaaggagcaaacctcatacaacttcaccagcataatgaaagatccatacaagacgcctataagacttctgataaatatgcaagcaccgtttgttttagggcctttgagcacctttcggatcgtgagctgattagttttggtgacaatagatggagaaaccaggcgcttgaataccgacctgttaagctcctcatatcctcccgcgagctcgctgagtccctcaagctgaacaccacctgccccgctgtactgcagaagctgtttgatcgtgaaagatacatgtagaatctcctttcagatggccgcgcttcacctgacttgagtcgccgctttcatgtttcaccgggttgtcaagttcatgtttcactgtaaaccggcgattgtattagtatcttgtccactgttcgctggaaaaggtgtgggccgtgtggccaactgcccagcgtgagtcgtgacctgcctgtcaatcgcttgagtcttgaccataggccacacggaattagatatctgtggtgcactgattttgggctaacgacccgatttctatctcgcacaagtttagcagcgtggtgacagtattttggtagctttgaaatgaatgcgctattcggagtttacaaaaatagatagaataaaatgattcaaa

SEQ ID NO: 36898 - DNA, 1896 bp, Zea Mays
ctctgatcccttctctcttaggcttcttcagatgacaacactgagttcatgattgacatgttacgggagtgcggactagctcacaagacaatactatttattctagaagaattcgacctctttgctcagggtaaacagaggttgctttacagcttacttgatgcaatgcaatctctaacatcccaagctgttgtcattggtgtgagttgccgcttggatgcagatcaactcctagagaaaagggttagatcccgattctctcataggaaacttttatttatttcgccttcgttggatgatatacaacggttggtggagcatttgcttatactggccaaagactcaggtttaccatcaaagtatatcgccgattataactcaagacttactgtatcctttctacgacctgactgttatggtgcatatctcatcttatttgagtacttagctattaatggcatataatcttgttaaatgaaacaaaatgtttgctttctgaaactaaaacatggtactctaacttgcttaaactcaatccttcaaatcctcgtttccaccttgagtttgagtagggtgttaactgttaagtgtacgaggccttttctataggccatatggctcatgattctatatagtcatctccacttgtgggatgcttatcttttcagatccccaatgttccccaaggttagaaacactattgatgttttttcaaccaatccccttgggattttttgttccaccatggagcagtgttttcaagttggacgacttgctgttcgttctggctgaccggcttgggcgattaatcacgattagtcggatgacttggcgattaatcatgacttgtccaaaccgacttggaattaatcggatgacttgaaaacattgtcgtggagaaacaaaagggtaaagaaattaggcagaacaactgcaaacaaattacacaatggaattctcttatcatatacgctgcagagcatttttagtgataagaaattcaaaggttgtctcaactccctcatggatgctgatgcaacaacgagcaacattcaaagatttcttttcagagctgtgtcatatatggacatggaatctggattcctgtcggtagaaagcttcctaaaggccctttcttccatgcagaggcaacctaagatggacagcttacaagtcaaaactttgacgcagatctctcgattttggaattatacattcttgtgtgcatgcacagattagaaagtaaggagcaaacctcatacaacttcaccagcataatgaaagaatacagatccatacaagacgcctataagacttctgataaatatgcaagcaccgtttgttttagggcctttgagcacctttcggatcgtgagctgattagttttggtgacaatagatggagaaaccaggcgcttgaataccgacctgttaagctcctcatatcctcccgcgagctcgctgagtccctcaagctgaacaccacctgccccgctgtactgcagaagctgtttgatcgtgaaagatacatgtagaatctcctttcagatggccgcgcttcacctgacttgagtcgccgctttcatgtttcaccgggttgtcaagttcatgtttcactgtaaaccggcgattgtattagtatcttgtccactgttcgctggaaaaggtgtgggccgtgtggccaactgcccagcgtgagtcgtgacctgcctgtcaatcgcttgagtcttgaccataggccacacggaattagatatctgtggtgcactgattttgggctaacgacccgatttctatctcgcacaagtttagcagcgtggtgacagtattttggtagctttgaaatgaatgcgctattcggagtttacaaaaatagatagaataaaatgattcaaa

SEQ ID NO: 36899 - DNA, 660 bp, Zea Mays
cagtcttcgagcagcgtcgttccaaaaagaaaaaagaaaaactcagccgccggccgctgcccctctcggctgcacgacgtccgtgagggcgtgccccctggccccgtcccttgtcgcctgcccgccggtgcccgcacaggctgccagtgccatactgccatccctccgtccggccgtctgcccaggctgcctgcccggcgccctggcctcccggtcgctggctctctgcccaggcgccaggccgcaggtcccaccgccccagaccacccgcgaaccagtccgctgcaggctgcaggccaccgtccctccagttcgccggtcagattattaaccattcagataccccagctccgcctagacgcgaatcctccgccactatggtggcagcggtgtccctgccgagccaagcacaggccgtgcttcggagccggctctgcgacccggtcttcatccactccgccctcagtagctccctggacactaattacagcaagctgaagtacctcgtcgccagctcggtctccgaggcctgcaacaattctgtcctcctcttgggtccccgcgggtgtggaaaagcagcggtggtcgacatggttcttgatgatctgaaggaggagcacccagatgcgatttccgtgggcctaaggaggtccaaggagg

SEQ ID NO: 36900 - DNA, 1257 bp, Zea Mays
atcccctcaaacacacaatcgttcctgtgcatctcccaggccaccaaaataaacaaggatagacccttcttcagccttacagagaattaatgtgaaactacaaattacactgaactattggtgtcaaaatcattgattattttaccagggaaaaaacagatggttattttggcagttttggtccattgatgtatataggatactgttttataataacaggcatggctgcaaatgaaaaggctatgcaccacctcctgcctggtttcaccccagatggtatttttgttgaaatttggtggggatctgacatcatgcataacagttctacgaaccattggtatcccttttttgggcaacattcatgtctggcggaggctggagaagcgtatttatatcccacttccagatttcgaaagcagaaaggcacttatcaacattaatcttagaacagttcagatagctgcggatgttaacatcgatgaggttgctcggaggacagaaggctatagtggagatgacttgacaaatgtttgccgtgatgcttcaatgaacggtatgcggcgcaagatagcaggcaaaacccgcgacgagatcaagaacatgtcaaaggacgatatagccaaggacccagtggccatgtgcgactttgtggaggctctggtgaaggtccagaagagtgtctcgcctgcagacatagaaaagcacgagaagtggatggctgagtttggatctgcctgagacctcggtcatctccttcaacattggtttctgtggttgacacgacaagtgtatgttgatatccgctgaccgctggtgcatagatcagaggcacgaactatcttgtatattttcagggatactacaaattaagttcacgattatttcatttcaatccctgatatgtacattctagctgtgaaacgtgtctcatcaattagccgtggcaaccattgtcagatgttgattgaacgtaactgcagccccgcctatacctccagatgcttccagtttggattgaaacgtctgcttctagctcttccaagattttcatgggcgtgaagaaagcgttaatcactttgccactgcgcagtggtgccactgtagagctccccctctttatttctgtgttctttttacggtcctgtgttttgcatgtgtcagttccaaacacgccgttaacgtgttgccattaggggtggtaatgagctctaaattttagactaaggatatgatcatctttatttctatttatttttg

SEQ ID NO: 36901 - DNA, 2580 bp, Zea Mays
aaccgaaagtccatttcgtccccaaaatttcgattttcgaaaccaaaccaaaccactctcctactacagctctcggcctccctcgcgttctctccatcgaactggcgaactgctcctgctcgtctcttcccacaccacgcattttgtcgggattcgggaaccctatcgccggatcttcgcggcggcggcggaaatggcgaatcccctcgcggggctgcaggaccacatcaagcttgcgcgggattacgcgctcgagggcctatacgacacctccataatcttcttcgacggcgccattgctcagatcaacaagcatctaactactttggacgatgctttggttcgtacgaaatggatgaactgcaagaaagcaatctctgaagaagtggaaagtgtgaaacagttggatgctcaattaaagtcccttaaagaagctcctgggacgaggcggtcctcatcacctcctattcgctccaataaatcatttgttttccaaccgttggacgagtatccaacatcttcaccagctccttttgatgatcctgatgtgtgggctccaccaagggatacaccgacccgaagaccaacaagaggtcaatctagtgcaagaaaatcctcccaagatggagcctgggcacgtggttcatcaaggactggaacacctagccgaagctcaaaacctaatgggagtaaaggaggctctgtggttaaatcatcaactgcctctaacagttctgtaaggaaaggaaaaccaagttcaagcaaggctgattcagcgggtattcgtcgaccttggaaaggagttcttatgtttggtccaccaggcacgggaaagactcttttggcaaaggcagtggctacagaatgtggaacaacattcttcaatgtttcctctgcaacattggcctctaaatggcgcggcgaaagtgagcgcatggttcgttgtttatttgatcttgcgagggcctatgctccaagtacaattttcattgatgaaattgactccttatgcacatcacgtggagcatctggtgaacatgagtcgtcaagaagggtgaagtctgaacttctagtgcaaattgatggtgtaaacaatagctccaccactgaagatggtcagccaaaaattgttatggttctagctgcaacaaattttccatgggatattgatgaggcactgaggctagggttaaaaaattccctcgtttgccccacaccaaagcacaggtctaaggtccgtgccagttgtggtcattctcacatggagtcatggactatggcgttgctgcttatggatggggaagggttcggggttttctcaacatgcattagaaggtcttccaggttgagttttttagaccttccaatagttgcatggacaccgaggcaatcaatagtgtgggtggtgccatactaaattttcctattactgttacagtggttccccttttataggggttgggtagatcttttcgccttcacgagaatgccccctacctggtacaggatattcctaggatccctatcatcataggaacgggggcatggctgcaaatgaaaaggctatgcaccacctcctgcctggtttcaccccagatggtatttttgttgaaatttggtggggatctgacatcatgcataacagttctacgaaccattggtatcccttttttgggcaacattcatgtctggcggaggctggagaagcgtatttatatcccacttccagatttcgaaagcagaaaggcacttatcaacattaatcttagaacagttcagatagctgcggatgttaacatcgatgaggttgctcggaggacagaaggctatagtggagatgacttgacaaatgtttgccgtgatgcttcaatgaacggtatgcggcgcaagatagcaggcaaaacccgcgacgagatcaagaacatgtcaaaggacgatatagccaaggacccagtggccatgtgcgactttgtggaggctctggtgaaggtccagaagagtgtctcgcctgcagacatagaaaagcacgagaagtggatggctgagtttggatctgcctgagacctcggtcatctccttcaacattggtttctgtggttgacacgacaagtgtatgttgatatccgctgaccgctggtgcatagatcagaggcacgaactatcttgtatattttcagggatactacaaattaagttcacgattatttcatttcaatccctgatatgtacattctagctgtgaaacgtgtctcatcaattagccgtggcaaccattgtcagatgttgattgaacgtaactgcagccccgcctatacctccagatgcttccagtttggattgaaacgtctgcttctagctcttccaagattttcatgggcgtgaagaaagcgttaatcactttgccactgcgcagtggtgccactgtagagctccccctctttatttctgtgttctttttacggtcctgtgttttgcatgtgtcagttccaaacacgccgttaacgtgttgccattaggggtggtaatgagctctaaattttagactaaggatatgatcatctttatttctatttatttttg

SEQ ID NO: 36902 - DNA, 3092 bp, Zea Mays
aaccgaaagtccatttcgtccccaaaatttcgattttcgaaaccaaaccaaaccactctcctactacagctctcggcctccctcgcgttctctccatcgaactggcgaactgctcctgctcgtctcttcccacaccacgcattttgtcgggattcgggaaccctatcgccggatcttcgcggcggcggcggaaatggcgaatcccctcgcggggctgcaggaccacatcaagcttgcgcgggattacgcgctcgagggcctatacgacacctccataatcttcttcgacggcgccattgctcagatcaacaagcatctaactactttggacgatgctttggttcgtacgaaatggatgaactgcaagaaagcaatctctgaagaagtggaaagtgtgaaacagttggatgctcaattaaagtcccttaaagaagctcctgggacgaggcggtcctcatcacctcctattcgctccaataaatcatttgttttccaaccgttggacgagtatccaacatcttcaccagctccttttgatgatcctgatgtgtgggctccaccaagggatacaccgacccgaagaccaacaagaggtcaatctagtgcaagaaaatcctcccaagatggagcctgggcacgtggttcatcaaggactggaacacctagccgaagctcaaaacctaatgggagtaaaggaggctctgtggttaaatcatcaactgcctctaacagttctgtaaggaaaggaaaaccaagttcaagcaaggctgattcagcgagtagtgatgctgaggaaggtaagtccaagaagggtcaatatgaagggccagatatggacttagctgcaatgcttgaaagggatgttctggattctactccaggagtaagatgggatgatgttgccggacttagtgaggccaaacgactcctcgaggaagcagttgtgcttcctctctggatgcctgaatattttcagggtattcgtcgaccttggaaaggagttcttatgtttggtccaccaggcacgggaaagactcttttggcaaaggcagtggctacagaatgtggaacaacattcttcaatgtttcctctgcaacattggcctctaaatggcgcggcgaaagtgagcgcatggttcgttgtttatttgatcttgcgagggcctatgctccaagtacaattttcattgatgaaattgactccttatgcacatcacgtggagcatctggtgaacatgagtcgtcaagaagggtgaagtctgaacttctagtgcaaattgatggtgtaaacaatagctccaccactgaagatggtcagccaaaaattgttatggttctagctgcaacaaattttccatgggatattgatgaggcactgaggctagggttaaaaaattccctcgtttgccccacaccaaagcacaggtctaaggggttgggtagatcttttcgccttcacgagaatgccccctacctggtacaggatattcctaggatccctatcatcataggaacgggggcatggctgcaaatgaaaaggctatgcaccacctcctgcctggtttcaccccagatggtatttttgttgaaatttggtggggatctgacatcatgcataacagttctacgaaccattggtatcccttttttgggcaacattcatgtctggtagtttcctgctttatgtagacactatttatgtctggtagttcaatagaattttgcctatatctatactagcggcatttacctgctagttataatttactctagatatttatcttcacacatgagaatactatttttttctcattattatttttcaccaggctattcccatgtatgctgctactattgccattgctacttctcttcttccatatgcatctaccacttctgatccaaattatagttcactttagctttatcgtaaaccatttctttttatctttgaccaaatttaaaggaaaatgtaatatctacaatatcaatctattttcttaaattctccattaaatatttcttaatagtgcatctattcgaacttatagatgttaatataattttctaaaactttggtcaaagttagagaagtctaacgtaggagaaagcataaggaactacaatttgaatagagggaatatgttagtaacttactattgttcacattaatgtgcattatgttgacttctaaattgcccaggcggaggctggagaagcgtatttatatcccacttccagatttcgaaagcagaaaggcacttatcaacattaatcttagaacagttcagatagctgcggatgttaacatcgatgaggttgctcggaggacagaaggctatagtggagatgacttgacaaatgtttgccgtgatgcttcaatgaacggtatgcggcgcaagatagcaggcaaaacccgcgacgagatcaagaacatgtcaaaggacgatatagccaaggacccagtggccatgtgcgactttgtggaggctctggtgaaggtccagaagagtgtctcgcctgcagacatagaaaagcacgagaagtggatggctgagtttggatctgcctgagacctcggtcatctccttcaacattggtttctgtggttgacacgacaagtgtatgttgatatccgctgaccgctggtgcatagatcagaggcacgaactatcttgtatattttcagggatactacaaattaagttcacgattatttcatttcaatccctgatatgtacattctagctgtgaaacgtgtctcatcaattagccgtggcaaccattgtcagatgttgattgaacgtaactgcagccccgcctatacctccagatgcttccagtttggattgaaacgtctgcttctagctcttccaagattttcatgggcgtgaagaaagcgttaatcactttgccactgcgcagtggtgccactgtagagctccccctctttatttctgtgttctttttacggtcctgtgttttgcatgtgtcagttccaaacacgccgttaacgtgttgccattaggggtggtaatgagctctaaattttagactaaggatatgatcatctttatttctatttatttttg

SEQ ID NO: 36903 - DNA, 3425 bp, Zea Mays
aaataaggtcatgtttgagttaacacaactaataaattgttagttggagctaacgaactaattgttagctaaagtattaactactaggcgttggaatctctgccgctaatttcagccgctatctatcggctctagtttcaaacaggcctaaccgaaagtccatttcgtccccaaaatttcgattttcgaaaccaaaccaaaccactctcctactacagctctcggcctccctcgcgttctctccatcgaactggcgaactgctcctgctcgtctcttcccacaccacgcattttgtcgggattcgggaaccctatcgccggatcttcgcggcggcggcggaaatggcgaatcccctcgcggggctgcaggaccacatcaagcttgcgcgggattacgcgctcgagggcctatacgacacctccataatcttcttcgacggcgccattgctcagatcaacaatgatgctgaggaaggtaagtccaagaagggtcaatatgaagggccagatatggacttagctgcaatgcttgaaagggatgttctggattctactccaggagtaagatgggatgatgttgccggacttagtgaggccaaacgactcctcgaggaagcagttgtgcttcctctctggatgcctgaatattttcagggtattcgtcgaccttggaaaggagttcttatgtttggtccaccaggcacgggaaagactcttttggcaaaggcagtggctacagaatgtggaacaacattcttcaatgtttcctctgcaacattggcctctaaatggcgcggcgaaagtgagcgcatggttcgttgtttatttgatcttgcgagggcctatgctccaagtacaattttcattgatgaaattgactccttatgcacatcacgtggagcatctggtgaacatgagtcgtcaagaagggtgaagtctgaacttctagtgcaaattgatggtgtaaacaatagctccaccactgaagatggtcagccaaaaattgttatggttctagctgcaacaaattttccatgggatattgatgaggcactgaggtcaggttgatcaccagagcctagaggactggtggctgaggtcaaggctactcagtcctgtttatgtcatttatatttttcgatgtatctagttacatttgttctaaacaaaacaaatccactaattgctcattccagttccttttgtaatgctttacaattctttgtgtcattgcgtttatagtgcctaattcttgttcagttatgtaattttcttcaagcaaagcacccaattttgcaggatgacatgattttgccgttatttgtccaaataatagggttagagtttttaaattggttcttcatacttttttcgaacgacgcaggagagctgcatgtcattctattaaaaaggagtaagaaaaaatacaagtgggggaccgaggcctaaaacccacacccttacagtacagacataggcacgccacacacacgagggataacgacccaacacagaagggggtggggggcttgctcaagagcccagccccaccaaccttgcgcacagaaagctaaacgcagaattaccagctagataccacaggttacggcagactacagaaacactaggcctaatcccctcaaacacacaatcgttcctgtgcatctcccaggccaccaaaataaacaaggatagacccttcttcagccttacagagaattaatgtgaaactacaaattacactgaactattggtgtcaaaatcattgattattttaccagggaaaaaacagatggttattttggcagttttggtccattgatgtatataggatactgttttataataacaggcatggctgcaaatgaaaaggctatgcaccacctcctgcctggtttcaccccagatggtatttttgttgaaatttggtggggatctgacatcatgcataacagttctacgaaccattggtatcccttttttgggcaacattcatgtctggtagtttcctgctttatgtagacactatttatgtctggtagttcaatagaattttgcctatatctatactagcggcatttacctgctagttataatttactctagatatttatcttcacacatgagaatactatttttttctcattattatttttcaccaggctattcccatgtatgctgctactattgccattgctacttctcttcttccatatgcatctaccacttctgatccaaattatagttcactttagctttatcgtaaaccatttctttttatctttgaccaaatttaaaggaaaatgtaatatctacaatatcaatctattttcttaaattctccattaaatatttcttaatagtgcatctattcgaacttatagatgttaatataattttctaaaactttggtcaaagttagagaagtctaacgtaggagaaagcataaggaactacaatttgaatagagggaatatgttagtaacttactattgttcacattaatgtgcattatgttgacttctaaattgcccaggcggaggctggagaagcgtatttatatcccacttccagatttcgaaagcagaaaggcacttatcaacattaatcttagaacagttcagatagctgcggatgttaacatcgatgaggttgctcggaggacagaaggctatagtggagatgacttgacaaatgtttgccgtgatgcttcaatgaacggtatgcggcgcaagatagcaggcaaaacccgcgacgagatcaagaacatgtcaaaggacgatatagccaaggacccagtggccatgtgcgactttgtggaggctctggtgaaggtccagaagagtgtctcgcctgcagacatagaaaagcacgagaagtggatggctgagtttggatctgcctgagacctcggtcatctccttcaacattggtttctgtggttgacacgacaagtgtatgttgatatccgctgaccgctggtgcatagatcagaggcacgaactatcttgtatattttcagggatactacaaattaagttcacgattatttcatttcaatccctgatatgtacattctagctgtgaaacgtgtctcatcaattagccgtggcaaccattgtcagatgttgattgaacgtaactgcagccccgcctatacctccagatgcttccagtttggattgaaacgtctgcttctagctcttccaagattttcatgggcgtgaagaaagcgttaatcactttgccactgcgcagtggtgccactgtagagctccccctctttatttctgtgttctttttacggtcctgtgttttgcatgtgtcagttccaaacacgccgttaacgtgttgccattaggggtggtaatgagctctaaattttagactaaggatatgatcatctttatttctatttatttttg

SEQ ID NO: 36904 - DNA, 4024 bp, Zea Mays
attttagaaaagctcatcgggaaaaactgaatcaaatgtccatggacacaaaatacgttactattatagaaagcctaatatgttaatactattacggagaaaccatttaaacgaattctataacaacaaaataaggtcatgtttgagttaacacaactaataaattgttagttggagctaacgaactaattgttagctaaagtattaactactaggcgttggaatctctgccgctaatttcagccgctatctatcggctctagtttcaaacaggcctaaccgaaagtccatttcgtccccaaaatttcgattttcgaaaccaaaccaaaccactctcctactacagctctcggcctccctcgcgttctctccatcgaactggcgaactgctcctgctcgtctcttcccacaccacgcattttgtcgggattcgggaaccctatcgccggatcttcgcggcggcggcggaaatggcgaatcccctcgcggggctgcaggaccacatcaagcttgcgcgggattacgcgctcgagggcctatacgacacctccataatcttcttcgacggcgccattgctcagatcaacaagcatctaactactttggacgatgctttggttcgtacgaaatggatgaactgcaagaaagcaatctctgaagaagtggaaagtgtgaaacagttggatgctcaattaaagtcccttaaagaagctcctgggacgaggcggtcctcatcacctcctattcgctccaataaatcatttgttttccaaccgttggacgagtatccaacatcttcaccagctccttttgatgatcctgatgtgtgggctccaccaagggatacaccgacccgaagaccaacaagaggtcaatctagtgcaagaaaatcctcccaagatggagcctgggcacgtggttcatcaaggactggaacacctagccgaagctcaaaacctaatgggagtaaaggaggctctgtggttaaatcatcaactgcctctaacagttctgtaaggaaaggaaaaccaagttcaagcaaggctgattcagcgagtagtgatgctgaggaaggtaagtccaagaagggtcaatatgaagggccagatatggacttagctgcaatgcttgaaagggatgttctggattctactccaggagtaagatgggatgatgttgccggacttagtgaggccaaacgactcctcgaggaagcagttgtgcttcctctctggatgcctgaatattttcagggtattcgtcgaccttggaaaggagttcttatgtttggtccaccaggcacgggaaagactcttttggcaaaggcagtggctacagaatgtggaacaacattcttcaatgtttcctctgcaacattggcctctaaatggcgcggcgaaagtgagcgcatggttcgttgtttatttgatcttgcgagggcctatgctccaagtacaattttcattgatgaaattgactccttatgcacatcacgtggagcatctggtgaacatgagtcgtcaagaagggtgaagtctgaacttctagtgcaaattgatggtgtaaacaatagctccaccactgaagatggtcagccaaaaattgttatggttctagctgcaacaaattttccatgggatattgatgaggcactgaggtcaggttgatcaccagagcctagaggactggtggctgaggtcaaggctactcagtcctgtttatgtcatttatatttttcgatgtatctagttacatttgttctaaacaaaacaaatccactaattgctcattccagttccttttgtaatgctttacaattctttgtgtcattgcgtttatagtgcctaattcttgttcagttatgtaattttcttcaagcaaagcacccaattttgcaggatgacatgattttgccgttatttgtccaaataatagggttagagtttttaaattggttcttcatacttttttcgaacgacgcaggagagctgcatgtcattctattaaaaaggagtaagaaaaaatacaagtgggggaccgaggcctaaaacccacacccttacagtacagacataggcacgccacacacacgagggataacgacccaacacagaagggggtggggggcttgctcaagagcccagccccaccaaccttgcgcacagaaagctaaacgcagaattaccagctagataccacaggttacggcagactacagaaacactaggcctaatcccctcaaacacacaatcgttcctgtgcatctcccaggccaccaaaataaacaaggatagacccttcttcagccttacagagaattaatgtgaaactacaaattacactgaactattggtgtcaaaatcattgattattttaccagggaaaaaacagatggttattttggcagttttggtccattgatgtatataggatactgttttataataacaggcatggctgcaaatgaaaaggctatgcaccacctcctgcctggtttcaccccagatggtatttttgttgaaatttggtggggatctgacatcatgcataacagttctacgaaccattggtatcccttttttgggcaacattcatgtctggtagtttcctgctttatgtagacactatttatgtctggtagttcaatagaattttgcctatatctatactagcggcatttacctgctagttataatttactctagatatttatcttcacacatgagaatactatttttttctcattattatttttcaccaggctattcccatgtatgctgctactattgccattgctacttctcttcttccatatgcatctaccacttctgatccaaattatagttcactttagctttatcgtaaaccatttctttttatctttgaccaaatttaaaggaaaatgtaatatctacaatatcaatctattttcttaaattctccattaaatatttcttaatagtgcatctattcgaacttatagatgttaatataattttctaaaactttggtcaaagttagagaagtctaacgtaggagaaagcataaggaactacaatttgaatagagggaatatgttagtaacttactattgttcacattaatgtgcattatgttgacttctaaattgcccaggcggaggctggagaagcgtatttatatcccacttccagatttcgaaagcagaaaggcacttatcaacattaatcttagaacagttcagatagctgcggatgttaacatcgatgaggttgctcggaggacagaaggctatagtggagatgacttgacaaatgtttgccgtgatgcttcaatgaacggtatgcggcgcaagatagcaggcaaaacccgcgacgagatcaagaacatgtcaaaggacgatatagccaaggacccagtggccatgtgcgactttgtggaggctctggtgaaggtccagaagagtgtctcgcctgcagacatagaaaagcacgagaagtggatggctgagtttggatctgcctgagacctcggtcatctccttcaacattggtttctgtggttgacacgacaagtgtatgttgatatccgctgaccgctggtgcatagatcagaggcacgaactatcttgtatattttcagggatactacaaattaagttcacgattatttcatttcaatccctgatatgtacattctagctgtgaaacgtgtctcatcaattagccgtggcaaccattgtcagatgttgattgaacgtaactgcagccccgcctatacctccagatgcttccagtttggattgaaacgtctgcttctagctcttccaagattttcatgggcgtgaagaaagcgttaatcactttgccactgcgcagtggtgccactgtagagctccccctctttatttctgtgttctttttacggtcctgtgttttgcatgtgtcagttccaaacacgccgttaacgtgttgccattaggggtggtaatgagctctaaattttagactaaggatatgatcatctttatttctatttatttttg

SEQ ID NO: 36905 - DNA, 1698 bp, Zea Mays
cgacgataagcgtgcttgagcggcagagactagtttattttttctatctctctcccttttgatatttttccagctgtccaccacctccctcgctcgagtacattttgttactattatttgattatttctgcccttggtatacaatgttcgatgatgcgctataaacaaaaaaatatcccgcacccactctgtcgctaaactaatatactggagaaccgatcttctgttagccgctcctactaatatactggttagccgatcgattgttcaggtcctcggatcttgactgtatggatgcgttcttgtcatgcctggacgacggcccgacggcttcgccgccgcgcgccgccccgccgccatccccggcgcttagcgcgcgggacctctacagcttcatatgcagcggtccactggtggacaggatcggctataccaaagagaaggtcgccgactccatcggccggtggcttcgctgcggggttgacgtggcgcgcctcctccgcctcgacgagctccagctgtcggaggccgagaaggcccgggtttaccagttctacatccccgtcttcctctggtgcgaggaccaggtcatagagcacagagccaagtacagcgagggcgacgacatcccgccattggtgatcggggtcagcgctccccaaggaagtggaaagacgactctggtcttcgcacttgattatctttttcaggttgctggaaatccgccacattgtctatagatgacttctatttgacagcaaaagagcagaatgaactgagggacagataccctggaaatgctcttttggagctccgtggaaatgctggaagccacaatctccaattcagtgttgaaacacttgagtcactgatgaaactaacaaaagaaggcatcaagatgaaggttccacggtatgacaagtctgcttttgggggaagaggtgatcgtgctgatccttctgtgtggccggaggttgaagggccgttagaggttgttttctttgaaggatggatgcttggatttaaacctcttccaaatgaagttgtgaaagcagtggatccccagctcgaggtggttaacaacaaccttgaagcatactatgacgcttgggacaggttcatcgactcgtggatcgttataaaaataagagaacctagttctgtctatcagtggaggctgcaggcggagatagctatgagagcagatggaaaacctggaatgtctgatgaggaggttatggattttgtatcacgctacctaccagcataccacgcatatttgcccaagttgtacaaagagggaccgaatggttcaaagccagaccatctactggtcatcgacatagacgaagggaggaatcctagatcctaatgagggctcatttgttttgctctcagttcatgtgaattgggtggaattgagtgggtttaaatcctaaacaagtcaaaatctttcatatattttttaatttcatctaatccacatgggatagaaataaccgaacaatgtctaagtgtttttcatgtacaatgtacattttctgaaatacagagtaggacttatgacccccacagtggagcatgggcaaatattaatagcctctcgttttctagacttagttcaaatatgtcctaattatgcaaatttcatgtatgttcgatttctcccatatatagtaatatctaatcagagaagtg

SEQ ID NO: 36906 - DNA, 1707 bp, Zea Mays
ttttctttttctttcgacgataagcgtgcttgagcggcagagactagtttattttttctatctctctcccttttgatatttttccagctgtccaccacctccctcgctcgagtacattttgttactattatttgattatttctgcccttggtatacaatgttcgatgatgcgctataaacaaaaaaatatcccgcacccactctgtcgctaaactaatatactggagaaccgatcttctgttagccgctcctactaatatactggttagccgatcgattgttcaggtcctcggatcttgactcgttcttgtcatgcctggacgacggcccgacggcttcgccgccgcgcgccgccccgccgccatccccggcgcttagcgcgcgggacctctacagcttcatatgcagcggtccactggtggacaggatcggctataccaaagagaaggtcgccgactccatcggccggtggcttcgctgcggggttgacgtggcgcgcctcctccgcctcgacgagctccagctgtcggaggccgagaaggcccgggtttaccagttctacatccccgtcttcctctggtgcgaggaccaggtcatagagcacagagccaagtacagcgagggcgacgacatcccgccattggtgatcggggtcagcgctccccaaggaagtggaaagacgactctggtcttcgcacttgattatctttttcaggttgctggtaggaaatccgccacattgtctatagatgacttctatttgacagcaaaagagcagaatgaactgagggacagataccctggaaatgctcttttggagctccgtggaaatgctggaagccacaatctccaattcagtgttgaaacacttgagtcactgatgaaactaacaaaagaaggcatcaagatgaaggttccacggtatgacaagtctgcttttgggggaagaggtgatcgtgctgatccttctgtgtggccggaggttgaagggccgttagaggttgttttctttgaaggatggatgcttggatttaaacctcttccaaatgaagttgtgaaagcagtggatccccagctcgaggtggttaacaacaaccttgaagcatactatgacgcttgggacaggttcatcgactcgtggatcgttataaaaataagagaacctagttctgtctatcagtggaggctgcaggcggagatagctatgagagcagatggaaaacctggaatgtctgatgaggaggttatggattttgtatcacgctacctaccagcataccacgcatatttgcccaagttgtacaaagagggaccgaatggttcaaagccagaccatctactggtcatcgacatagacgaagggaggaatcctagatcctaatgagggctcatttgttttgctctcagttcatgtgaattgggtggaattgagtgggtttaaatcctaaacaagtcaaaatctttcatatattttttaatttcatctaatccacatgggatagaaataaccgaacaatgtctaagtgtttttcatgtacaatgtacattttctgaaatacagagtaggacttatgacccccacagtggagcatgggcaaatattaatagcctctcgttttctagacttagttcaaatatgtcctaattatgcaaatttcatgtatgttcgatttctcccatatatagtaatatctaatcagagaagtg

SEQ ID NO: 36907 - DNA, 1452 bp, Zea Mays
ctcttgtgggatcttggtggtgtcgatggaaacttttggccgttaccttgacttgcatgagctttataatgagttcataaattccaagttcggaacactgatggaatattcagcttatgttggctgtttctcccagacggacaagatctcacatagtcataaagctaccagagaatacttggaacatattttggaatatctgacatcatttctgtatcgcacagagccattgcaagacattgataagatttttttaaagctggagagtgaattcgaggaacaatgggccaatgaaggaatacttggatgggggaataaagggacagaaaaagagtctgaaatagatctcgattactacagcacagttgaagaacttgttgagcttggcccagaaaaattaaaacaggctttagctgctcgaggtttgaagagtggcggtactgttcaacagcgtgcagatcgtcttttcttgttgaaggttacaccgttggaacaactagataggaagcattttgccaaagttccacatactaaagatggctcaaacacagctcctaatggtaatgctttcaaggaggatatgaagaaagaaattgcattgatggaagtgaagatgaaacgtctttgtgagctgctagatgaggcctttgtaaggacaaaggaaaatgcggagaagaagcttactttgacatatgaagagatggaagcagaacgggaagaggaggaggtacaagttgacactgagagtgatgacgaagagcaacaaatctacaatcctctcaagttgccgatgggttgggatggcaaacctatcccctactggctgtacaagctacatggccttgggcaggaattcaagtgtgagatatgtggaaaccatagctattgggggcgaagggcttatgagcgtcatttcaaggaatggcgtcatcagcatgggatgcgatgccttggcattcccaatactaagaatttcaatgaaattacatccatcgaggaggcgaaagcgctctgggagaaaattcaagcacgacaaggggtgaataagtggcggccagacctagaggaagagtatgaagatcaggaaggcaacatctacaacaagaagacctacactgacctgcagcgtcaaggcctgatctagggctcctgctggttaaagttgtcgggatttgttcagaacttatctcatgtagttgtaactctgaaaatattggcccatctggcatacattttatgtaataacatgattctccggaactcatgtgcttttcccggttgtcatggttgtctcgtgtgtctgtttgcccagcttggtcgtccgtagctatgttatgttttatataatcgtaaatgtgttattgtattaagcacaagttggtgtttgcatcacgtaaaacatatttttataaaaaaattagaaaaaaataaaactaggctgtttttggtcta

SEQ ID NO: 36908 - DNA, 1970 bp, Zea Mays
cccagacgggcccaaatctatcgcaaacaggcctcgtctcgtcctcgtcctcgtccgccgccaaatcgaacccccccaaaccctagctacccggcgcaacgtccccttcccgcctctccgcggcgctgcgtgacacccggcctccgctacgaaacaccggggcgggtgtagcctagcgggcgggccatggcgtcaacggtgctggagcggctcgcggtgagcgagctgcaacgggagcccgctaacccgcgtgaccgcctctttcagtcccaccgcgtccgccacatgctcgacctcgtcgtctccacctccggcaagctcgtggaaatttacgaggacaaggacaatgctaggaaggatgagatcaacactcatcttactgcacccacgcaaagtggactgtttagcaagtactatgaaaggctcaaagagatccgtgaatatcatcggcggaacccatctgcccgctttgttagtacaactgatgactatgaagagcttctaaaggaggaaccagttattgaattcactggcgaggaaacttttggccgttaccttgacttgcatgagctttataatgagttcataaattccaagttcggaacactgatggaatattcagcttatgttggctgtttctcccagacggacaagatctcacatagtcataaagctaccagaaaatacagagaatacttggaacatattttggaatatctgacatcatttctgtatcgcacagagccattgcaagacattgataagatttttttaaagctggagagtgaattcgaggaacaatgggccaatgaaggaatacttggatgggggaataaagggacagaaaaagagtctgaaatagatctcgattactacagcacagttgaagaacttgttgagcttggcccagaaaaattaaaacaggctttagctgctcgaggtttgaagagtggcggtactgttcaacagcgtgcagatcgtcttttcttgttgaaggttacaccgttggaacaactagataggaagcattttgccaaagttccacatactaaagatggctcaaacacagctcctaatggtaatgctttcaaggaggatatgaagaaagaaattgcattgatggaagtgaagatgaaacgtctttgtgagctgctagatgaggcctttgtaaggacaaaggaaaatgcggagaagaagcttactttgacatatgaagagatggaagcagaacgggaagaggaggaggtacaagttgacactgagagtgatgacgaagagcaacaaatctacaatcctctcaagttgccgatgggttgggatggcaaacctatcccctactggctgtacaagctacatggccttgggcaggaattcaagtgtgagatatgtggaaaccatagctattgggggcgaagggcttatgagcgtcatttcaaggaatggcgtcatcagcatgggatgcgatgccttggcattcccaatactaagaatttcaatgaaattacatccatcgaggaggcgaaagcgctctgggagaaaattcaagcacgacaaggggtgaataagtggcggccagacctagaggaagagtatgaagatcaggaaggcaacatctacaacaagaagacctacactgacctgcagcgtcaaggcctgatctagggctcctgctggttaaagttgtcgggatttgttcagaacttatctcatgtagttgtaactctgaaaatattggcccatctggcatacattttatgtaataacatgattctccggaactcatgtgcttttcccggttgtcatggttgtctcgtgtgtctgtttgcccagcttggtcgtccgtagctatgttatgttttatataatcgtaaatgtgttattgtattaagcacaagttggtgtttgcatcacgtaaaacatatttttataaaaaaattagaaaaaaataaaactaggctgtttttggtcta

SEQ ID NO: 36909 - DNA, 2062 bp, Zea Mays
ttcagttctcctcccagacgggcccaaatctatcgcaaacaggcctcgtctcgtcctcgtcctcgtccgccgccaaatcgaacccccccaaaccctagctacccggcgcaacgtccccttcccgcctctccgcggcgctgcgtgacacccggcctccgctacgaaacaccggggcgggtgtagcctagcgggcgggccatggcgtcaacggtgctggaggcgacgcgggcggcccatgaggatctggagaggctggagcggctcgcggtgagcgagctgcaacgggagcccgctaacccgcgtgaccgcctctttcagtcccaccgcgtccgccacatgctcgacctcgtcgtctccacctccggcaagctcgtggaaatttacgaggacaaggacaatgctaggaaggatgagatcaacactcatcttactgcacccacgcaaagtggactgtttagcaagtactatgaaaggctcaaagagatccgtgaatatcatcggcggaacccatctgcccgctttgttagtacaactgatgactatgaagagcttctaaaggaggaaccagttattgaattcactggcgaggattgtttgattcctcttgtgggatcttggtggtgtcgatggaaacttttggccgttaccttgacttgcatgagctttataatgagttcataaattccaagttcggaacactgatggaatattcagcttatgttggctgtttctcccagacggacaagatctcacatagtcataaagctaccagaaaatacagagaatacttggaacatattttggaatatctgacatcatttctgtatcgcacagagccattgcaagacattgataagatttttttaaagctggagagtgaattcgaggaacaatgggccaatgaaggaatacttggatgggggaataaagggacagaaaaagagtctgaaatagatctcgattactacagcacagttgaagaacttgttgagcttggcccagaaaaattaaaacaggctttagctgctcgaggtttgaagagtggcggtactgttcaacagcgtgcagatcgtcttttcttgttgaaggttacaccgttggaacaactagataggaagcattttgccaaagttccacatactaaagatggctcaaacacagctcctaatggtaatgctttcaaggaggatatgaagaaagaaattgcattgatggaagtgaagatgaaacgtctttgtgagctgctagatgaggcctttgtaaggacaaaggaaaatgcggagaagaagcttactttgacatatgaagagatggaagcagaacgggaagaggaggaggtacaagttgacactgagagtgatgacgaagagcaacaaatctacaatcctctcaagttgccgatgggttgggatggcaaacctatcccctactggctgtacaagctacatggccttgggcaggaattcaagtgtgagatatgtggaaaccatagctattgggggcgaagggcttatgagcgtcatttcaaggaatggcgtcatcagcatgggatgcgatgccttggcattcccaatactaagaatttcaatgaaattacatccatcgaggaggcgaaagcgctctgggagaaaattcaagcacgacaaggggtgaataagtggcggccagacctagaggaagagtatgaagatcaggaaggcaacatctacaacaagaagacctacactgacctgcagcgtcaaggcctgatctagggctcctgctggttaaagttgtcgggatttgttcagaacttatctcatgtagttgtaactctgaaaatattggcccatctggcatacattttatgtaataacatgattctccggaactcatgtgcttttcccggttgtcatggttgtctcgtgtgtctgtttgcccagcttggtcgtccgtagctatgttatgttttatataatcgtaaatgtgttattgtattaagcacaagttggtgtttgcatcacgtaaaacatatttttataaaaaaattagaaaaaaataaaactaggctgtttttggtcta

SEQ ID NO: 36910 - DNA, 1652 bp, Zea Mays
ttcagttctcctcccagacgggcccaaatctatcgcaaacaggcctcgtctcgtcctcgtcctcgtccgccgccaaatcgaacccccccaaaccctagctacccggcgcaacgtccccttcccgcctctccgcggcgctgcgtgacacccggcctccgctacgaaacaccggggcgggtgtagcctagcgggcgggccatggcgtcaacggtgctggaggcgacgcgggcggcccatgaggatctggagaggctggagcggctcgcggtgagcgagctgcaacgggagcccgctaacccgcgtgaccgcctctttcagtcccaccgcgtccgccacatgctcgacctcgtcgtctccacctccggcaagctcgtggaaatttacgaggacaaggacaatgctaggaaggatgagatcaacactcatcttactgcacccacgcaaagtggactgtttagcaagtactatgaaaggctcaaagagatccgtgaatatcatcggcggaacccatctgcccgctttgttagtacaactgatgactatgaagagcttctaaaggaggaaccagttattgaattcactggcgaggaaacttttggccgttaccttgacttgcatgagctttataatgagttcataaattccaagttcggaacactgatggaatattcagcttatgttggctgtttctcccagacggacaagatctcacatagtcataaagctaccagaaaatacagagaatacttggaacatattttggaatatctgacatcatttctgtatcgcacagagccattgcaagacattgataagatttttttaaagctggagagtgaattcgaggaacaatgggccaatgaaggaatacttggatgggggaataaagggacagaaaaagagtctgaaatagatctcgattactacagcacagttgaagaacttgttgagcttggcccagaaaaattaaaacaggctttagctgctcgaggtttgaagagtggcggtactgttcaacagcgtgcagatcgtcttttcttgttgaaggttacaccgttggaacaactagataggaagcattttgccaaagttccacatactaaagatggctcaaacacagctcctaatggtaatgctttcaaggaggatatgaagaaagaaattgcattgatggaagtgaagatgaaacgtctttgtgagctgctagatgaggcctttgtaaggacaaaggaaaatgcggagaagaagcttactttgacatatgaagagatggaagcagaacgggaagaggaggaggtacaagttgacactgagagtgatgacgaagagcaacaaatctacaatcctctcaagttgccgatgggttgggatggcaaacctatcccctactggctgtacaagctacatggccttgggcaggaattcaagtgtgagatatgtggaaaccatagctattgggggcgaagggcttatgagcgtcatttcaaggaatggcgtcatcagcatgggatgcgatgccttggcattcccaatactaagaatttcaatgaaattacatccatcgagaaaaaacgaccggaaaagacacttgttttctctgtgggccatgactccgtcacgtgaagaatctgaaccgtggtgagatttggtga

SEQ ID NO: 36911 - DNA, 886 bp, Zea Mays
cgagcctcgagggctctgataggacatgtgaattcccagcaaacaaggagctccaacgttaccctaacccgagcagccatcctagtcttggtttaggtccaacaagctcattgaggtagctgctcatgaacttcctaactgaggtagctgctcatttgctaactaagctgtatctaggttgtacatgccctgacggaatgggcccagctactttgaattcgcagtcgcagtcgtgtgctggggaccagtcattcgcacttctgcaagttggcaaggaagagagatctgaacgacaagggagaagacaaacttgcccctaccgatggaaggcagggagacgctacctgcttatataagcaacagtggttatcacaagtatctttgtgtgtgtatatatatagtattaatttcgcaatatatacgcgcagagaaacagaaatcttttcgcagggacaaacgcagctcgctgcttgccgggcgacgagattctctacctgtcaggtcccctgatgtgcacgtgacacgcccgtggacatcggtgcgtcgcctctgctacgcggccaaatcggatcaagcgacacatgttgagtggaacatttttctcaaaggctataagcacatacactaggccttctcaaccgttgttagcctatgagaaattgagaaccacgtacccgtaatttatactccacccccatctgccaagaaaaagacaattctaacatatctagtcaaaccatcataaatcggttaagtttaacaaaaaaaactatcaataactatgctattaaataagtattattggattatttataaaatttatatattaatacacctatatggtatcacaaataatgatactcgtttgttagaaatgtaattaaat

SEQ ID NO: 36912 - DNA, 964 bp, Zea Mays
ctcgagggctctgataggacatgtgaattcccagcaaacaaggagctccaacgttaccctaacccgagcagccatcctagtcttggtttaggtccaacaagctcattgaggtagctgctcatgaacttcctaactgaggtagctgctcatttgctaactaagctcacaagccgaaccaagctagctcgtgagtcgacttcaagccgagtggagcctccttcagttcgttgagtgggcgatgcgaactcggtcagccaacgagtcgcaccatcgctacagggagaacacgggaggagtcaggggaggaggtggagggcaccatggtaggagtagtagatcggtttggtcaccgcaggatcttctacatcgagggtcgaatctctaaacgacattacaggtgaagacgataggcgacgagagagaaggtgagcctaagtcacatcgccgctgcatgggaggacgggaggcagcaatggaggaggtggtcctcacccgcactgatgcgacaggggaagaggtggaaggtgtcgcagcggagcgagttggacgcgaagcgcgatgtcacgtgtgaatggatgaggtcgacgattgaagtgcaaggagaagagggatattgccaagatatggagcggatggagctgtttacattttgaagaccaagatggggagtgcggttggaagacgaatagtactgacggggcgtaaaaaggtggagcatagtcatttacacctcgctatattaaacaactattctatcttatcttctaatgttatgtgctattttaaacatcgctatattacaaatcctctaatttacatgttgcggacagccatgcgtgcactagctaggtggggcgtcgtgggtttttgaaaatggtgatgattagggcttggttttttgcaacaagatgaatttacacaaggatgaattgctatgcacgcttttaatttggcctaaaaaggc

SEQ ID NO: 36913 - DNA, 1697 bp, Zea Mays
caggcccacgcgtcggtgggttcgagtaagggtttcgtgcgccaccgtcacttccgcccgccatggccgagacctccacgtatcagattctggtgcgtctcctcgacgggcgtaccagatgtctccgcttctccacgcccaccgtttccggcgccgtgctcctcgacgccgtcgcgtcgatctctcgcgttcccgccgccgctctccgcctcgtcaccggcggcatcgacgtatcgccctcttccgtcctcgcctcagcagctgatggccagttcccctatgcgtcagcgctcctccgccttcgaggaggcaagggtggattcggctccctcctcagaggggctgcctccaaagcgggtcagaagaagaccagcaactttgacgcctgccgcgacatcaacggccgccgcctccgccacgtcaacgctgagcgccgcctcgaggaatggaaggccgaagccgccgaccgccagctagaaaagctcgccgagaacttcatcaagaagaaggccaaggaagcgggccgcggtggcggaccctcaaccgctgaggtggacaaatatctagagaagtaccgcaaggatgctgagatctgcgtcaacgtggttgaggaatccgtgcgtgcatcacttggaaagaggaagaccgcacctaagctgccctctggcgcagacgctaagaagcttaagttttggttaggaaagaacaaagtagaagaagatgaaagtgatagtgacactgatgtggatgatgaggacattgaagatcttaagagcgcagatgcaaaatctgtagtagttgatgaaggcaattactcaaatggatgcagaaaaaatgaggagaagcttgatcttggttctgtttctgggtcatcacattcagaaggagagtcttcaggagaaaagtcccaactgacaacaagttcaggagctgaaggtggtgactttgaatctggtgatagtgcagagcttgaggtaggaatgttggatcatcccatttctgttgctgctgcttcagaagaagtgacagcagatgaggataacactgctttagctacttcaaaccaaaataatccagaggtaccacaagttgaagaagtgcggaaagcagacaaggataacactgcttcagctacttcaaaccaaaacaatcaagaggtgccacaagtagaacaacatgttggcatcagcaactcttattcagagccgttggaccttgcaaagtacagttcatctgcagaattggaggtgcttggtctggagaagctaaaaatagagctgcaatctcgcggattaaaatgtggtggaactttacaggagcgtgctgcccgactcttccttctgaagacaactccattggacaagttaccaaagaagctgcttgcaaagactaatgggcggaagtgagaagttgtaccaatatatataaagaagtaccaatgatgcaacgtttaagattttctttgtcaatatatggaaatctgttgtggtgtaatcatgtgttataagctcttggcttggtttgacaattaatgagatgtctgtacgtgctatatgttaaccgttacttggaaggcgctcagtttgggctagcgtttgaattcgttttagtttttgatgttttagtgtatgtttggaacagcttcaccaaccaaaaaaaagtagtaagatttatctggatctattatagagcaaaga

SEQ ID NO: 36914 - DNA, 541 bp, Zea Mays
caaggaacttgctagcagaatttcaagagtagtcatgagtgagaggaaggattcaggacccatcaggccttgtcacatcagggaggcatacagaagattgaagcttgaagggaagatcccacggcgctctgttcctaggctcttccgctagaactgacacacatcaggcaggagtcgggacagatgtgggacaatcgttttccacgtaactgcggacctcgtcatacgtaccatgggaattgaaaacctgtgtactgtaaagttagccccccgttttgacttcatactagccgctgatgcgctgaataacaggtggtggctcctgtcacgagctagatgtcttgaaatgggtttggggaatgatttagcaagaacaaggttaggattacagggtcgggcatgcggctgggacctgcgagacgaggatctattcgaaatgcagtttgttagaatttacttacttgcttaaggctgttttcggtgaatctgtttgacactgtttgaaggatgagtttgaaatagggataaggtacacagcgca

SEQ ID NO: 36915 - DNA, 665 bp, Zea Mays
ctgagatgcaagtggatatttgaactttgaaatcccctgacttgtagctattggcaagcatcactggaagtcaaaagatttctatccctacatcaattgtggtatcaggaatagcaaaaatatttgttggtgagctaattgaaacagcaagagtagtcatgagtgagaggaaggattcaggacccatcaggccttgtcacatcagggaggcatacagaagattgaagcttgaagggaagatcccacggcgctctgttcctaggctcttccgctagaactgacacacatcaggcaggagtcgggacagatgtgggacaatcgttttccacgtaactgcggacctcgtcatacgtaccatgggaattgaaaacctgtgtactgtaaagttagccccccgttttgacttcatactagccgctgatgcgctgaataacaggtggtggctcctgtcacgagctagatgtcttgaaatgggtttggggaatgatttagcaagaacaaggttaggattacagggtcgggcatgcggctgggacctgcgagacgaggatctattcgaaatgcagtttgttagaatttacttacttgcttaaggctgttttcggtgaatctgtttgacactgtttgaaggatgagtttgaaatagggataaggtacacagcgca

SEQ ID NO: 36916 - DNA, 757 bp, Zea Mays
aaatatcatgtttcatacttgtggtttatattccatatagtacataaaaggtgctatactgtcccagtttacacaacagcagatgaaccgttacgagtcattccgaagatccggatttcagaaatctaacatgaaaaggctattggcaagcatcactggaagtcaaaagatttctatccctacatcaattgtggtatcaggaatagcaaaaatatttgttggtgagctaattgaaacagcaagagtagtcatgagtgagaggaaggattcaggacccatcaggccttgtcacatcagggaggcatacagaagattgaagcttgaagggaagatcccacggcgctctgttcctaggctcttccgctagaactgacacacatcaggcaggagtcgggacagatgtgggacaatcgttttccacgtaactgcggacctcgtcatacgtaccatgggaattgaaaacctgtgtactgtaaagttagccccccgttttgacttcatactagccgctgatgcgctgaataacaggtggtggctcctgtcacgagctagatgtcttgaaatgggtttggggaatgatttagcaagaacaaggttaggattacagggtcgggcatgcggctgggacctgcgagacgaggatctattcgaaatgcagtttgttagaatttacttacttgcttaaggctgttttcggtgaatctgtttgacactgtttgaaggatgagtttgaaatagggataaggtacacagcgca

SEQ ID NO: 36917 - DNA, 2612 bp, Zea Mays
ctcatgcgtctgctattgttgccttttgatttgaactactggagcatctattgaagaagcaatcaacagcttggaaattgatgctagcacgaaggcaagcaatgtcaacttgcctgctaagaaagacgcaagttcttcagatgcagtatcttgcatttcctccggcgatgcagctagtactgccaaggaaagtgaaatgaaccgagaaacttcttttggggaccaagggatgtattactatgggtattattatcctggttcatacggaggatgggatgagaatggctactttgttggatataatggcgtagaggtgcacccagcagtggttcaaactgacaatggttcatatctgtgtcatcttccgggatatgaaaatggatatgcttcttatagtcaggttgttcctggaggcattgctagtgtggatggtcaatatgtcagcaaagaaccatattattccactgcacttccaattcaggatcctaggacacctggcatttttgctcagccaattgcttacagaactgaactagcatctgcatactcatgggacccttctttcgttcttctggatggggttcagggacatccagttggtgtgcatcaaacaaattatgctgcaagaccaaaatattcttttaataagcatgttattccttcttcgaaagccacccgcagtgcaaaatccgcagcagatactgtcaaaggctcatcatcagctctagaaactgtaacaaatgctgtcaatagcagcccaccatcaaagagtgcaaataaggtactttctcaatcctgcaaaacattgatcttgccatcttggcccttgccccataaatgtgaaaacttactttcacatgcttgttctaatgctagacacctggtgcttccataacaaaaggatatcttccatatagcaagtctgtgatgcacactaataaccaagaaaaaaacagtgtttatcaaagcaaaggcatcaatgtgaaagaaagtggcagaagctggaacagccgagagaagcttgggagaagtaagctaaatggacagggtgattctgaatctaatgagaacaaccataccgataacctgaaacatagtttgagccatcggtctgatgttgttggattgtcaagtgcaggggatgccaatgctagcataccttcacctgttgcaataagcaaaaatgcatgcaatctttcagatttcgttacaaagtatgaacaagctctattctttgtaattaagtcctacagtgaagatgatattcacaagagtgttaagtacaatgtctgggcaagtactcctaatggaaataaaaggcttgacaatgcctatagggttgcacaggaaaggatagcagaaaaaggaaccaaatgtcctgttttccttttcttctcagttaatgcaagtggtcagttctgtggcgtggctgagatggttggtccagtagatttcaacaggaacatgaacttctggcaacaggacaagtggaatggtttcttctcggtaaaatggcacattatcaaggatgttcccaatccacaatttcgccatataattttggagaataatgagaataaacctgtgacaaacagcagggacacacaagaggtcaatttttcacaaggtacagagatgttgaacattttcaagaacttcacatgtaaaacatcaatactggatgactttgacttctatgaaaatcggcagaaagtaatgcaggacagaagaggcaagctgcttactacatcgtttgatcacccattgccaaaagctgaaaaatctccagaaattaaaagccaaacacaattgataagtggcccagaagttggtagagccaagagtgatgaggggcagggcaacaatgttgggatggtacttgatacaaccaagaaaaatgaggagcagagcagcaatgttccagaaatactcgatgcagcctgtagtaacaaggagcaacccaacaaaattgcaatagaaggatgatgcctcggctagttggtctgggaaaacgagatagcctctggaactgacttcaacctgaaatgataagtttgatgtgtgcaatatcaagaaaccaccattggtcatgggttctcttccattatctcatggaagcggggaaagggaaaaaatgaagcaaaggagctgtcttcccacgagaattgttcgatgactgggaaaaaaggttctaggactcatttaggttgaggaccctagtgctaaggcattagagcgccctccatgtctattttttccccatcttggagggtcctttcttttgtcgtgttgtgtctttttttctcttctttttttctattatactgcggctgatgtccaaagaagccagtctgccttatgggtgggtgtgctttaagggaatgtttgttgctttgtgggttgtcctctaggatgtggtatgttttgtttgttttctttaatctgtgcacttgttctagagactgacatagaagaaaagagaaaaaaagattgtgagggattaggaattaattacagtaacattatcttatgtctctgtttcttccattatcaagaaaagggaacaaaaaggattttaaaagctgttgatgtgtacttcgccgataccattt

SEQ ID NO: 36918 - DNA, 2706 bp, Zea Mays
caaccccacaaggcagccgttctccactctccatctcgaggatcaaaagttcaaaacaacagagaccgaaactcgccatccaccagacagaaaaagcttccagctcccctcgccgaaactcgccgccgtctcctcgccttctgcctcgccaccggtcccgtcgcggtttcacacgcatccgtccggtggacggagcaggctaggttgccggctgcccccggtcgtccctccttcgccgtcgagctggaggacacgcgtagcaacgccgggttcttctgcggcgagctgtggtgtggcctcatggagcccaagggcgagttggctcagaagcgtatccttccttctcgtttcgctcacccctattgaagaagcaatcaacagcttggaaattgatgctagcacgaaggcaagcaatgtcaacttgcctgctaagaaagacgcaagttcttcagatgcagtatcttgcatttcctccggcgatgcagctagtactgccaaggaaagtgaaatgaaccgagaaacttcttttggggaccaagggatgtattactatgggtattattatcctggttcatacggaggatgggatgagaatggctactttgttggatataatggcgtagaggtgcacccagcagtggttcaaactgacaatggttcatatctgtgtcatcttccgggatatgaaaatggatatgcttcttatagtcaggttgttcctggaggcattgctagtgtggatggtcaatatgtcagcaaagaaccatattattccactgcacttccaattcaggatcctaggacacctggcatttttgctcagccaattgcttacagaactgaactagcatctgcatactcatgggacccttctttcgttcttctggatggggttcagggacatccagttggtgtgcatcaaacaaattatgctgcaagaccaaaatattcttttaataagcatgttattccttcttcgaaagccacccgcagtgcaaaatccgcagcagatactgtcaaaggctcatcatcagctctagaaactgtaacaaatgctgtcaatagcagcccaccatcaaagagtgcaaataagacacctggtgcttccataacaaaaggatatcttccatatagcaagtctgtgatgcacactaataaccaagaaaaaaacagtgtttatcaaagcaaaggcatcaatgtgaaagaaagtggcagaagctggaacagccgagagaagcttgggagaagtaagctaaatggacagggtgattctgaatctaatgagaacaaccataccgataacctgaaacatagtttgagccatcggtctgatgttgttggattgtcaagtgcaggggatgccaatgctagcataccttcacctgttgcaataagcaaaaatgcatgcaatctttcagatttcgttacaaaggttgcacaggaaaggatagcagaaaaaggaaccaaatgtcctgttttccttttcttctcagttaatgcaagtggtcagttctgtggcgtggctgagatggttggtccagtagatttcaacaggaacatgaacttctggcaacaggacaagtggaatggtttcttctcggtaaaatggcacattatcaaggatgttcccaatccacaatttcgccatataattttggagaataatgagaataaacctgtgacaaacagcagggacacacaagaggtcaatttttcacaaggtacagagatgttgaacattttcaagaacttcacatgtaaaacatcaatactggatgactttgacttctatgaaaatcggcagaaagtaatgcaggacagaagaggcaagctgcttactacatcgtttgatcacccattgccaaaagctgaaaaatctccagaaattaaaagccaaacacaattgataagtggcccagaagttggtagagccaagagtgatgaggggcagggcaacaatgttgggatggtacttgatacaaccaagaaaaatgaggagcagagcagcaatgttccagaaatactcgatgcagcctgtagtaacaaggagcaacccaacaaaattgcaatagaaggatgatgcctcggctagttggtctgggaaaacgagatagcctctggaactgacttcaacctgaaatgataagtttgatgtgtgcaatatcaagaaaccaccattggtcatgggttctcttccattatctcatggaagcggggaaagggaaaaaatgaagcaaaggagctgtcttcccacgagaattgttcgatgactgggaaaaaaggttctaggactcatttaggttgaggaccctagtgctaaggcattagagcgccctccatgtctattttttccccatcttggagggtcctttcttttgtcgtgttgtgtctttttttctcttctttttttctattatactgcggctgatgtccaaagaagccagtctgccttatgggtgggtgtgctttaagggaatgtttgttgctttgtgggttgtcctctaggatgtggtatgttttgtttgttttctttaatctgtgcacttgttctagagactgacatagaagaaaagagaaaaaaagattgtgagggattaggaattaattacagtaacattatcttatgtctctgtttcttccattatcaagaaaagggaacaaaaaggattttaaaagctgttgatgtgtacttcgccgataccattt

SEQ ID NO: 36919 - DNA, 2799 bp, Zea Mays
caaccccacaaggcagccgttctccactctccatctcgaggatcaaaagttcaaaacaacagagaccgaaactcgccatccaccagacagaaaaagcttccagctcccctcgccgaaactcgccgccgtctcctcgccttctgcctcgccaccggtcccgtcgcggtttcacacgcatccgtccggtggacggagcaggctaggttgccggctgcccccggtcgtccctccttcgccgtcgagctggaggacacgcgtagcaacgccgggttcttctgcggcgagctgtggtgtggcctcatggagcccaagggcgagttggctcagaagcgtatccttccttctcgtttcgctcacccgtacgctattgaagaagcaatcaacagcttggaaattgatgctagcacgaaggcaagcaatgtcaacttgcctgctaagaaagacgcaagttcttcagatgcagtatcttgcatttcctccggcgatgcagctagtactgccaaggaaagtgaaatgaaccgagaaacttcttttggggaccaagggatgtattactatgggtattattatcctggttcatacggaggatgggatgagaatggctactttgttggatataatggcgtagaggtgcacccagcagtggttcaaactgacaatggttcatatctgtgtcatcttccgggatatgaaaatggatatgcttcttatagtcaggttgttcctggaggcattgctagtgtggatggtcaatatgtcagcaaagaaccatattattccactgcacttccaattcaggatcctaggacacctggcatttttgctcagccaattgcttacagaactgaactagcatctgcatactcatgggacccttctttcgttcttctggatggggttcagggacatccagttggtgtgcatcaaacaaattatgctgcaagaccaaaatattcttttaataagcatgttattccttcttcgaaagccacccgcagtgcaaaatccgcagcagatactgtcaaaggctcatcatcagctctagaaactgtaacaaatgctgtcaatagcagcccaccatcaaagagtgcaaataagacacctggtgcttccataacaaaaggatatcttccatatagcaagtctgtgatgcacactaataaccaagaaaaaaacagtgtttatcaaagcaaaggcatcaatgtgaaagaaagtggcagaagctggaacagccgagagaagcttgggagaagtaagctaaatggacagggtgattctgaatctaatgagaacaaccataccgataacctgaaacatagtttgagccatcggtctgatgttgttggattgtcaagtgcaggggatgccaatgctagcataccttcacctgttgcaataagcaaaaatgcatgcaatctttcagatttcgttacaaagtatgaacaagctctattctttgtaattaagtcctacagtgaagatgatattcacaagagtgttaagtacaatgtctgggcaagtactcctaatggaaataaaaggcttgacaatgcctatagggttgcacaggaaaggatagcagaaaaaggaaccaaatgtcctgttttccttttcttctcagttaatgcaagtggtcagttctgtggcgtggctgagatggttggtccagtagatttcaacaggaacatgaacttctggcaacaggacaagtggaatggtttcttctcggtaaaatggcacattatcaaggatgttcccaatccacaatttcgccatataattttggagaataatgagaataaacctgtgacaaacagcagggacacacaagaggtcaatttttcacaaggtacagagatgttgaacattttcaagaacttcacatgtaaaacatcaatactggatgactttgacttctatgaaaatcggcagaaagtaatgcaggacagaagagccaaaagctgaaaaatctccagaaattaaaagccaaacacaattgataagtggcccagaagttggtagagccaagagtgatgaggggcagggcaacaatgttgggatggtacttgatacaaccaagaaaaatgaggagcagagcagcaatgttccagaaatactcgatgcagcctgtagtaacaaggagcaacccaacaaaattgcaatagaaggatgatgcctcggctagttggtctgggaaaacgagatagcctctggaactgacttcaacctgaaatgataagtttgatgtgtgcaatatcaagaaaccaccattggtcatgggttctcttccattatctcatggaagcggggaaagggaaaaaatgaagcaaaggagctgtcttcccacgagaattgttcgatgactgggaaaaaaggttctaggactcatttaggttgaggaccctagtgctaaggcattagagcgccctccatgtctattttttccccatcttggagggtcctttcttttgtcgtgttgtgtctttttttctcttctttttttctattatactgcggctgatgtccaaagaagccagtctgccttatgggtgggtgtgctttaagggaatgtttgttgctttgtgggttgtcctctaggatgtggtatgttttgtttgttttctttaatctgtgcacttgttctagagactgacatagaagaaaagagaaaaaaagattgtgagggattaggaattaattacagtaacattatcttatgtctctgtttcttccattatcaagaaaagggaacaaaaaggattttaaaagctgttgatgtgtacttcgccgataccattt

SEQ ID NO: 36920 - DNA, 2406 bp, Zea Mays
caaccccacaaggcagccgttctccactctccatctcgaggatcaaaagttcaaaacaacagagaccgaaactcgccatccaccagacagaaaaagcttccagctcccctcgccgaaactcgccgccgtctcctcgccttctgcctcgccaccggtcccgtcgcggtttcacacgcatccgtcgtactggccttcttcttccctcgtcgttcaccagttctcgcgcgctcaaccatgtgccatgcctaactggcgcctcgtttatctcgccctgcagcggtggacggagcaggctaggttgccggctgcccccggtcgtccctccttcgccgtcgagctggaggacacgcgtagcaacgccgggttcttctgcggcgagctgtggtgtggcctcatggagcccaagggcgagttggctcagaagcgtatccttccttctcgtttcgctcacccgtacgctattgaagaagcaatcaacagcttggaaattgatgctagcacgaaggcaagcaatgtcaacttgcctgctaagaaagacgcaagttcttcagatgcagtatcttgcatttcctccggcgatgcagctagtactgccaaggaaagtgaaatgaaccgagaaacttcttttggggaccaagggatgtattactatgggtattattatcctggttcatacggaggatgggatgagaatggctactttgttggatataatggcgtagaggtgcacccagcagtggttcaaactgacaatggttcatatctgtgtcatcttccgggatatgaaaatggatatgcttcttatagtcaggttgttcctggaggcattgctagtgtggatggtcaatatgtcagcaaagaaccatattattccactgcacttccaattcaggatcctaggacacctggcatttttgctcagccaattgcttacagaactgaactagcatctgcatactcatgggacccttctttcgttcttctggatggggttcagggacatccagttggtgtgcatcaaacaaattatgctgcaagaccaaaatattcttttaataagcatgttattccttcttcgaaagccacccgcagtgcaaaatccgcagcagatactgtcaaaggctcatcatcagctctagaaactgtaacaaatgctgtcaatagcagcccaccatcaaagagtgcaaataaggttaatgcaagtggtcagttctgtggcgtggctgagatggttggtccagtagatttcaacaggaacatgaacttctggcaacaggacaagtggaatggtttcttctcggtaaaatggcacattatcaaggatgttcccaatccacaatttcgccatataattttggagaataatgagaataaacctgtgacaaacagcagggacacacaagaggtcaatttttcacaaggtacagagatgttgaacattttcaagaacttcacatgtaaaacatcaatactggatgactttgacttctatgaaaatcggcagaaagtaatgcaggacagaagaggcaagctgcttactacatcgtttgatcacccattgccaaaagctgaaaaatctccagaaattaaaagccaaacacaattgataagtggcccagaagttggtagagccaagagtgatgaggggcagggcaacaatgttgggatggtacttgatacaaccaagaaaaatgaggagcagagcagcaatgttccagaaatactcgatgcagcctgtagtaacaaggagcaacccaacaaaattgcaatagaaggatgatgcctcggctagttggtctgggaaaacgagatagcctctggaactgacttcaacctgaaatgataagtttgatgtgtgcaatatcaagaaaccaccattggtcatgggttctcttccattatctcatggaagcggggaaagggaaaaaatgaagcaaaggagctgtcttcccacgagaattgttcgatgactgggaaaaaaggttctaggactcatttaggttgaggaccctagtgctaaggcattagagcgccctccatgtctattttttccccatcttggagggtcctttcttttgtcgtgttgtgtctttttttctcttctttttttctattatactgcggctgatgtccaaagaagccagtctgccttatgggtgggtgtgctttaagggaatgtttgttgctttgtgggttgtcctctaggatgtggtatgttttgtttgttttctttaatctgtgcacttgttctagagactgacatagaagaaaagagaaaaaaagattgtgagggattaggaattaattacagtaacattatcttatgtctctgtttcttccattatcaagaaaagggaacaaaaaggattttaaaagctgttgatgtgtacttcgccgataccattt

SEQ ID NO: 36921 - DNA, 2617 bp, Zea Mays
caaccccacaaggcagccgttctccactctccatctcgaggatcaaaagttcaaaacaacagagaccgaaactcgccatccaccagacagaaaaagcttccagctcccctcgccgaaactcgccgccgtctcctcgccttctgcctcgccaccggtcccgtcgcggtttcacacgcatccgtccggtggacggagcaggctaggttgccggctgcccccggtcgtccctccttcgccgtcgagctggaggacacgcgtagcaacgccgggttcttctgcggcgagctgtggtgtggcctcatggagcccaagggcgagttggctcagaagcctattgaagaagcaatcaacagcttggaaattgatgctagcacgaaggcaagcaatgtcaacttgcctgctaagaaagacgcaagttcttcagatgcagtatcttgcatttcctccggcgatgcagctagtactgccaaggaaagtgaaatgaaccgagaaacttcttttggggaccaagggatgtattactatgggtattattatcctggttcatacggaggatgggatgagaatggctactttgttggatataatggcgtagaggtgcacccagcagtggttcaaactgacaatggttcatatctgtgtcatcttccgggatatgaaaatggatatgcttcttatagtcaggttgttcctggaggcattgctagtgtggatggtcaatatgtcagcaaagaaccatattattccactgcacttccaattcaggatcctaggacacctggcatttttgctcagccaattgcttacagaactgaactagcatctgcatactcatgggacccttctttcgttcttctggatggggttcagggacatccagttggtgtgcatcaaacaaattatgctgcaagaccaaaatattcttttaataagcatgttattccttcttcgaaagccacccgcagtgcaaaatccgcagcagatactgtcaaaggctcatcatcagctctagaaactgtaacaaatgctgtcaatagcagcccaccatcaaagagtgcaaataagacacctggtgcttccataacaaaaggatatcttccatatagcaagtctgtgatgcacactaataaccaagaaaaaaacagtgtttatcaaagcaaaggcatcaatgtgaaagaaagtggcagaagctggaacagccgagagaagcttgggagaagtaagctaaatggacagggtgattctgaatctaatgagaacaaccataccgataacctgaaacatagtttgagccatcggtctgatgttgttggattgtcaagtgcaggggatgccaatgctagcataccttcacctgttgcaataagcaaaaatgcatgcaatctttcagatttcgttacaaagttaatgcaagtggtcagttctgtggcgtggctgagatggttggtccagtagatttcaacaggaacatgaacttctggcaacaggacaagtggaatggtttcttctcggtaaaatggcacattatcaaggatgttcccaatccacaatttcgccatataattttggagaataatgagaataaacctgtgacaaacagcagggacacacaagaggtcaatttttcacaaggtacagagatgttgaacattttcaagaacttcacatgtaaaacatcaatactggatgactttgacttctatgaaaatcggcagaaagtaatgcaggacagaagaggcaagctgcttactacatcgtttgatcacccattgccaaaagctgaaaaatctccagaaattaaaagccaaacacaattgataagtggcccagaagttggtagagccaagagtgatgaggggcagggcaacaatgttgggatggtacttgatacaaccaagaaaaatgaggagcagagcagcaatgttccagaaatactcgatgcagcctgtagtaacaaggagcaacccaacaaaattgcaatagaaggatgatgcctcggctagttggtctgggaaaacgagatagcctctggaactgacttcaacctgaaatgataagtttgatgtgtgcaatatcaagaaaccaccattggtcatgggttctcttccattatctcatggaagcggggaaagggaaaaaatgaagcaaaggagctgtcttcccacgagaattgttcgatgactgggaaaaaaggttctaggactcatttaggttgaggaccctagtgctaaggcattagagcgccctccatgtctattttttccccatcttggagggtcctttcttttgtcgtgttgtgtctttttttctcttctttttttctattatactgcggctgatgtccaaagaagccagtctgccttatgggtgggtgtgctttaagggaatgtttgttgctttgtgggttgtcctctaggatgtggtatgttttgtttgttttctttaatctgtgcacttgttctagagactgacatagaagaaaagagaaaaaaagattgtgagggattaggaattaattacagtaacattatcttatgtctctgtttcttccattatcaagaaaagggaacaaaaaggattttaaaagctgttgatgtgtacttcgccgataccattt

SEQ ID NO: 36922 - DNA, 2805 bp, Zea Mays
caagcaaccccacaaggcagccgttctccactctccatctcgaggatcaaaagttcaaaacaacagagaccgaaactcgccatccaccagacagaaaaagcttccagctcccctcgccgaaactcgccgccgtctcctcgccttctgcctcgccaccggtcccgtcgcggtttcacacgcatccgtccggtggacggagcaggctaggttgccggctgcccccggtcgtccctccttcgccgtcgagctggaggacacgcgtagcaacgccgggttcttctgcggcgagctgtggtgtggcctcatggagcccaagggcgagttggctcagaagcctattgaagaagcaatcaacagcttggaaattgatgctagcacgaaggcaagcaatgtcaacttgcctgctaagaaagacgcaagttcttcagatgcagtatcttgcatttcctccggcgatgcagctagtactgccaaggaaagtgaaatgaaccgagaaacttcttttggggaccaagggatgtattactatgggtattattatcctggttcatacggaggatgggatgagaatggctactttgttggatataatggcgtagaggtgcacccagcagtggttcaaactgacaatggttcatatctgtgtcatcttccgggatatgaaaatggatatgcttcttatagtcaggttgttcctggaggcattgctagtgtggatggtcaatatgtcagcaaagaaccatattattccactgcacttccaattcaggatcctaggacacctggcatttttgctcagccaattgcttacagaactgaactagcatctgcatactcatgggacccttctttcgttcttctggatggggttcagggacatccagttggtgtgcatcaaacaaattatgctgcaagaccaaaatattcttttaataagcatgttattccttcttcgaaagccacccgcagtgcaaaatccgcagcagatactgtcaaaggctcatcatcagctctagaaactgtaacaaatgctgtcaatagcagcccaccatcaaagagtgcaaataagacacctggtgcttccataacaaaaggatatcttccatatagcaagtctgtgatgcacactaataaccaagaaaaaaacagtgtttatcaaagcaaaggcatcaatgtgaaagaaagtggcagaagctggaacagccgagagaagcttgggagaagtaagctaaatggacagggtgattctgaatctaatgagaacaaccataccgataacctgaaacatagtttgagccatcggtctgatgttgttggattgtcaagtgcaggggatgccaatgctagcataccttcacctgttgcaataagcaaaaatgcatgcaatctttcagatttcgttacaaagtatgaacaagctctattctttgtaattaagtcctacagtgaagatgatattcacaagagtgttaagtacaatgtctgggcaagtactcctaatggaaataaaaggcttgacaatgcctatagggttgcacaggaaaggatagcagaaaaaggaaccaaatgtcctgttttccttttcttctcagttaatgcaagtggtcagttctgtggcgtggctgagatggttggtccagtagatttcaacaggaacatgaacttctggcaacaggacaagtggaatggtttcttctcggtaaaatggcacattatcaaggatgttcccaatccacaatttcgccatataattttggagaataatgagaataaacctgtgacaaacagcagggacacacaagaggtcaatttttcacaaggtacagagatgttgaacattttcaagaacttcacatgtaaaacatcaatactggatgactttgacttctatgaaaatcggcagaaagtaatgcaggacagaagaggcaagctgcttactacatcgtttgatcacccattgccaaaagctgaaaaatctccagaaattaaaagccaaacacaattgataagtggcccagaagttggtagagccaagagtgatgaggggcagggcaacaatgttgggatggtacttgatacaaccaagaaaaatgaggagcagagcagcaatgttccagaaatactcgatgcagcctgtagtaacaaggagcaacccaacaaaattgcaatagaaggatgatgcctcggctagttggtctgggaaaacgagatagcctctggaactgacttcaacctgaaatgataagtttgatgtgtgcaatatcaagaaaccaccattggtcatgggttctcttccattatctcatggaagcggggaaagggaaaaaatgaagcaaaggagctgtcttcccacgagaattgttcgatgactgggaaaaaaggttctaggactcatttaggttgaggaccctagtgctaaggcattagagcgccctccatgtctattttttccccatcttggagggtcctttcttttgtcgtgttgtgtctttttttctcttctttttttctattatactgcggctgatgtccaaagaagccagtctgccttatgggtgggtgtgctttaagggaatgtttgttgctttgtgggttgtcctctaggatgtggtatgttttgtttgttttctttaatctgtgcacttgttctagagactgacatagaagaaaagagaaaaaaagattgtgagggattaggaattaattacagtaacattatcttatgtctctgtttcttccattatcaagaaaagggaacaaaaaggattttaaaagctgttgatgtgtacttcgccgataccattt

SEQ ID NO: 36923 - DNA, 2731 bp, Zea Mays
gaaacctgcaactctgcaagcaaccccacaaggcagccgttctccactctccatctcgaggatcaaaagttcaaaacaacagagaccgaaactcgccatccaccagacagaaaaagcttccagctcccctcgccgaaactcgccgccgtctcctcgccttctgcctcgccaccggtcccgtcgcggtttcacacgcatccgtccggtggacggagcaggctaggttgccggctgcccccggtcgtccctccttcgccgtcgagctggaggacacgcgtagcaacgccgggttcttctgcggcgagctgtggtgtggcctcatggagcccaagggcgagttggctcagaagcgtatccttccttctcgtttcgctcacccgtacgctattgaagaagcaatcaacagcttggaaattgatgctagcacgaaggcaagcaatgtcaacttgcctgctaagaaagacgcaagttcttcagatgcagtatcttgcatttcctccggcgatgcagctagtactgccaaggaaagtgaaatgaaccgagaaacttcttttggggaccaagggatgtattactatgggtattattatcctggttcatacggaggatgggatgagaatggctactttgttggatataatggcgtagaggtgcacccagcagtggttcaaactgacaatggttcatatctgtgtcatcttccgggatatgaaaatggatatgcttcttatagtcaggttgttcctggaggcattgctagtgtggatggtcaatatgtcagcaaagaaccatattattccactgcacttccaattcaggatcctaggacacctggcatttttgctcagccaattgcttacagaactgaactagcatctgcatactcatgggacccttctttcgttcttctggatggggttcagggacatccagttggtgtgcatcaaacaaattatgctgcaagaccaaaatattcttttaataagcatgttattccttcttcgaaagccacccgcagtgcaaaatccgcagcagatactgtcaaaggctcatcatcagctctagaaactgtaacaaatgctgtcaatagcagcccaccatcaaagagtgcaaataagacacctggtgcttccataacaaaaggatatcttccatatagcaagtctgtgatgcacactaataaccaagaaaaaaacagtgtttatcaaagcaaaggcatcaatgtgaaagaaagtggcagaagctggaacagccgagagaagcttgggagaagtaagctaaatggacagggtgattctgaatctaatgagaacaaccataccgataacctgaaacatagtttgagccatcggtctgatgttgttggattgtcaagtgcaggggatgccaatgctagcataccttcacctgttgcaataagcaaaaatgcatgcaatctttcagatttcgttacaaaggttgcacaggaaaggatagcagaaaaaggaaccaaatgtcctgttttccttttcttctcagttaatgcaagtggtcagttctgtggcgtggctgagatggttggtccagtagatttcaacaggaacatgaacttctggcaacaggacaagtggaatggtttcttctcggtaaaatggcacattatcaaggatgttcccaatccacaatttcgccatataattttggagaataatgagaataaacctgtgacaaacagcagggacacacaagaggtcaatttttcacaaggtacagagatgttgaacattttcaagaacttcacatgtaaaacatcaatactggatgactttgacttctatgaaaatcggcagaaagtaatgcaggacagaagaggcaagctgcttactacatcgtttgatcacccattgccaaaagctgaaaaatctccagaaattaaaagccaaacacaattgataagtggcccagaagttggtagagccaagagtgatgaggggcagggcaacaatgttgggatggtacttgatacaaccaagaaaaatgaggagcagagcagcaatgttccagaaatactcgatgcagcctgtagtaacaaggagcaacccaacaaaattgcaatagaaggatgatgcctcggctagttggtctgggaaaacgagatagcctctggaactgacttcaacctgaaatgataagtttgatgtgtgcaatatcaagaaaccaccattggtcatgggttctcttccattatctcatggaagcggggaaagggaaaaaatgaagcaaaggagctgtcttcccacgagaattgttcgatgactgggaaaaaaggttctaggactcatttaggttgaggaccctagtgctaaggcattagagcgccctccatgtctattttttccccatcttggagggtcctttcttttgtcgtgttgtgtctttttttctcttctttttttctattatactgcggctgatgtccaaagaagccagtctgccttatgggtgggtgtgctttaagggaatgtttgttgctttgtgggttgtcctctaggatgtggtatgttttgtttgttttctttaatctgtgcacttgttctagagactgacatagaagaaaagagaaaaaaagattgtgagggattaggaattaattacagtaacattatcttatgtctctgtttcttccattatcaagaaaagggaacaaaaaggattttaaaagctgttgatgtgtacttcgccgataccattt

SEQ ID NO: 36924 - DNA, 3961 bp, Zea Mays
gagccagaggtagtaaatttcggtttctaccaccacttttgctcacctttgttgttgccttgtgtgcgggtgttggtggtgctacttgtttcagtactgttcttcattatgggtgacatagtggtcttcatatttatatccaggttgctttccttatataccgcccagtgatgcggctttttaagagcactaatggaggtgacacttgttggcctcttgatgataacgaggaaggagaatctgtatcatctgatgatcttatcttacatcttgactcgtttcaggaaccaatcatgtggtcagatcttcttaacgcagtccagtcaattttgccagcaaaagcttggaacagtctttcaccagacctatatgctgctttctggggcttaacactctatgatcttcactttccaaaagaccgttatgatacagaaatcaagaagctgcacgagaatctcaaacaattggaggacaactcagataattctagcattgcaatttcaagacgtaagaaggacaaggagagaatccaagatttacttgacagactgaacagtgaatctcagaagcaccagcagcacgttgcatctgtggtccaaaggttagctcgtgaaaaggataagtggttgagctccagtccggatgcaatgaaaatcaacatggaattcttgcagcgctgcatattcccacgatgtgtttttagtatgcaagatgcagtgtattgtgctacatttgtccaaacactacactcccttgggactcccttctttaacacagtcaatcatatcgatgttcttgtctgtaaaaccctacagccaatgatatgctgttgcacagaatttgaagctggcaggcttggaagattttttcatgatacgttgaagatggcctactattggaagagtgatgaatctgtctatgagcgtgaatgtgcgaacaaacctggttttgcagtgtacttcagatacccaaacagccagcgtgtgtcctacagtcagtttgttcgggttcattggaagtggagttcaagaatcaccaaagcacttaatcaatgtatggaatcaaaagaatacatggaaattcgaaatgcccttattgtccttacgaagatttctagtgtcttcccggtgattcgtaaaagtggtgtcaatcttgagaaacgggtggctaaactaaaaggggatgaaagagaagatcttaaagttctagccactggtgtagctgctgctttagctgctcgcaagagttcttggctatctgaagaagagtttggcgggggtcacattgatctgaagccagcaacagcaagatctgtgcttggaaaccagtcagcagatctctcgatggcaaaagatcaaaatgcccgtgcaaagtctgtagagaataggcatgaaaggtcagagggtgctatgaagcctgacgttcagcaaaagaagagcactgtggcttcaaatggatctgatattctaatacaatcttcctccgtacaagggaaatcttcagtggttgcacgtgcaatggatgagcctccaaaacctgtgtctgatgagggggttaaagtttctacaaaatctacttcagaatttgagacaagggcaacacaaaagcgtgctggcaatgctgggaaggtaatgaagcatgatgttgcaaaggaagatgcaaaagctgggaaacctacaagctggaatgtaaatcaacaagtctccactgttgatagagaagtgtctcatgcagctgatgctgcccaagaaaccagtaccactattagcaatggtaacttgcatccagcgccgcataaggtttcatcatcttctcaaagaaatgcagttacacataatggagcagccaatccctctgttgagtctactgatatgattgactctcctgtgagacagcaaaaaagaccgccggttgaggagcaagatagatcaggtaaacggaggaagggagaaaatgaacccgatttgagtgaacaccatgtagacaaggaaaagagtttggactcacgtggtggagataagtttcgttcagtggatcatgagaagagtgctaatgaggaacaaaatttaagagcgggcaaaataaaagaaaaatctgatgataaatatgacagagatcctagggaaaaattagatcggggtgaaaggcgtcgtggggaagatgccattgagagatcaacagatagattgtcggacaggagagaacgttccattgaaaggatgcaagagagaggtacagataaagcccttgaaaaaggtagagaggatagaaataaggatgagaggaataaagttaaatatgctgaaccttcggtggaccggacacattcttctgatgaacgattccgagggcaaagtttgccaccgcccccacctcttcccgcaagttttgtaccccaatcagttggcgccaaccgacgtgaagaagatgctgaccgaaggggtgggagctccaggcatgttcaaaggtcatctcctaggcacgatgagaaagaaaggaggcagtcagaggagaatatttcgtcatttcaggatgatgggaagcacagaagagaggaagatattcgtgatagaaagcgtgaggacagggatactttatcaaacaaggtagatgacagggatagggaaaaggggacttctttgaaagaagacagtgatcctagtaatgtttctaaacggagaaagatcaagcgagaacagactttagaagctggggaatatgcaccttctgctccacagcctccctcccatggatctggcagctcacaattgtctgacatacgagaaagagaaaggaaaggggtaatttcacagcatcgtatttcacacgctgatgaccttcctaggacacatggcaaggacatgacaagcaagtcaagtcgtcgagagtctgaccaataggaataaggtgaaaaatcatacccagaaccataccattctgagctgttgggcggtacatcatcatcatccactggctgcagtagcacttgatgtttggagagtgggtcatgatcataagagcacctgcggaggcaacagaggtaggagcacctgctgcctgcactagtgtgtcttctggagctagaagacttcgatcttttgtctcgttccatgcctccctttccctattgatccatccttgcagagattaaggatgtgaagcagatggagcaggatcaatgggggtagagctgggcattggttggggatcagttggggaaagagggtctctccgcccaggataatgatgcaggggaggacgattgtgcatgctcattgtcatggatggctcggggtgagggaggcgaaggtggccaggagaaaagcacactggatcctgctgtggtgcaaaatgaagcccctggtccatggaaatgacatgggtgccccaacacagtatgggtgttttcttgtcctgttggagcccgagaaacatttctcaggggagaaacaatatctacctatcttctttaactgtttttccacgtcagcaaaacatctatatggcaagataatcaatgttatggaaactaccatcgacacttttgggactgtcctaagaagcctcaaactaggccaatatgacaagttcttgtacagaagatttgcaaagaaagaacaaaaactatgaccaacgatccacatatccaactcattatcaaatgccctcgagaactttggctcttgccatacaccatagatggcctcatctctaatgtttaggtgttaagactagggctgtgatgagaccttgatgaacttctcactaaaatgatgtatctttagccaaatgttggttgctgtagtagttttggtaggaaattgcccaattttccatctaccatggcaatgatgagtggggccttgactggtggtaaccgcatgtcatgcggtgtttttggcaagccctggctttgtcgttactcgtactagatttgaaagcaaacccctctgcaacagca

SEQ ID NO: 36925 - DNA, 2865 bp, Zea Mays
catatttatatccaggttgctttccttatataccgcccagtgatgcggctttttaagagcactaatggaggtgacacttgttggcctcttgatgataacgaggaaggagaatctgtatcatctgatgatcttatcttacatcttgactcgtttcaggaaccaatcatgtggtcagatcttcttaacgcagtccagtcaattttgccagcaaaagcttggaacagtctttcaccagacctatatgctgctttctggggcttaacactctatgatcttcactttccaaaagaccgttatgatacagaaatcaagaagctgcacgagaatctcaaacaattggaggacaactcagataattctagcattgcaatttcaagacgtaagaaggacaaggagagaatccaagatttacttgacagactgaacagtgaatctcagaagcaccagcagcacgttgcatctgtggtccaaaggttagctcgtgaaaaggataagtggttgagctccagtccggatgcaatgaaaatcaacatggaattcttgcagcgctgcatattcccacgatgtgtttttagtatgcaagatgcagtgtattgtgctacatttgtccaaacactacactcccttgggactcccttctttaacacagtcaatcatatcgatgttcttgtctgtaaaaccctacagccaatgatatgctgttgcacagaatttgaagctggcaggcttggaagattttttcatgatacgttgaagatggcctactattggaagagtgatgaatctgtctatgagcgtgaatgtgcgaacaaacctggttttgcagtgtacttcagatacccaaacagccagcgtgtgtcctacagtcagtttgttcgggttcattggaagtggagttcaagaatcaccaaagcacttaatcaatgtatggaatcaaaagaatacatggaaattcgaaatgcccttattgtccttacgaagatttctagtgtcttcccggtgattcgtaaaagtggtgtcaatcttgagaaacgggtggctaaactaaaaggggatgaaagagaagatcttaaagttctagccactggtgtagctgctgctttagctgctcgcaagagttcttggctatctgaagaagagtttggcgggggtcacattgatctgaagccagcaacagcaagatctgtgcttggaaaccagtcagcagatctctcgatggcaaaagatcaaaatgcccgtgcaaagtctgtagagaataggcatgaaagtggttgcacgtgcaatggatgagcctccaaaacctgtgtctgatgagggggttaaagtttctacaaaatctacttcagaatttgagacaagggcaacacaaaagcgtgctggcaatgctgggaaggtaatgaagcatgatgttgcaaaggaagatgcaaaagctgggaaacctacaagctggaatgtaaatcaacaagtctccactgttgatagagaagtgtctcatgcagctgatgctgcccaagaaaccagtaccactattagcaatggtaacttgcatccagcgccgcataaggtttcatcatcttctcaaagaaatgcagttacacataatggagcagccaatccctctgttgagtctactgatatgattgactctcctgtgagacagcaaaaaagaccgccggttgaggagcaagatagatcaggtaaacggaggaagggagaaaatgaacccgatttgagtgaacaccatgtagacaaggaaaagagtttggactcacgtggtggagataagtttcgttcagtggatcatgagaagagtgctaatgaggaacaaaatttaagagcgggcaaaataaaagaaaaatctgatgataaatatgacagagatcctagggaaaaattagatcggggtgaaaggcgtcgtggggaagatgccattgagagatcaacagatagattgtcggacaggagagaacgttccattgaaaggatgcaagagagaggtacagataaagcccttgaaaaaggtagagaggatagaaataaggatgagaggaataaagttaaatatgctgaaccttcggtggaccggacacattcttctgatgaacgattccgagggcaaagtttgccaccgcccccacctcttcccgcaagttttgtaccccaatcagttggcgccaaccgacgtgaagaagatgctgaccgaaggggtgggagctccaggcatgttcaaaggtcatctcctaggcacgatgagaaagaaaggaggcagtcagaggagaatatttcgtcatttcaggatgatgggaagcacagaagagaggaagatattcgtgatagaaagcgtgaggacagggatactttatcaaacaaggtagatgacagggatagggaaaaggggacttctttgaaagaagacagtgatcctagtaatgtttctaaacggagaaagatcaagcgagaacagactttagaagctggggaatatgcaccttctgctccacagcctccctcccatggatctggcagctcacaattgtctgacatacgagaaagagaaaggaaaggggtaatttcacagcatcgtatttcacacgctgatgaccttcctaggacacatggcaaggacatgacaagcaagtcaagtcgtcgagagtctgaccagtgagtttaataaagaatattttttttgttcaaatgtgcactgcgcagttcctaacaaaaatcttttccactttgcgatttgctctttgttttctgttttcttggtttgttggattttgttgacaaaatcaaagtcataatatcttagctttgattacattctcacaaaaaaactcgaactgggggataagaaagcaccccaga

SEQ ID NO: 36926 - DNA, 368 bp, Zea Mays
gggcattgaacttgttgtcctggagtacaccgagaacatgacagaggaacaggttgatgctatggcaggaagtgagactttgcggcagcaagcttcactgttcggagcaacaagaaactataaggtgttgagtaagtccacaaacaggctaagggattcgttgcttccaaaagatgagcccaaacttgcagttcctatgttactgcttattgcccagcatcgatccaagtaagatttttattaacttggtggggccattatcaggcatcttgcctttgttccatgtgtttgttccaaaccatgcaaatggcgatgcagaaatataaatggcgtgattgctaatgatttaccatcaaaggaagtacgta

SEQ ID NO: 36927 - DNA, 443 bp, Zea Mays
ctgaaagccttttgcagtatcttgttaatcaatgaagaagggggtgggcattgaacttgttgtcctggaggagctcattcagcaaatggcgaatgtgcagtacaccgagaacatgacagaggaacaggttgatgctatggcaggaagtgagactttgcggcagcaagcttcactgttcggagcaacaagaaactataaggtgttgagtaagtccacaaacaggctaagggattcgttgcttccaaaagatgagcccaaacttgcagttcctatgttactgcttattgcccagcatcgatccaagtaagatttttattaacttggtggggccattatcaggcatcttgcctttgttccatgtgtttgttccaaaccatgcaaatggcgatgcagaaatataaatggcgtgattgctaatgatttaccatcaaaggaagtacgta

SEQ ID NO: 36928 - DNA, 1341 bp, Zea Mays
ttttttcacaaatgaagcattatatgaagacacagaaagaactttaatcagaatcgtaagagcaagttttgaccattgctagtttggttttattgaatcgcttgggagcatttttttcaaaaggataggggtaatactttccaatttagtttcttggatggaaaaaaattgaacagcagctctcatcaattttgtctcaccgcgagacatttagaatcttcgttcaaccccctgatattccaattcaacacattccagcttcttgagttgtgatccattcacaccaaactttgatagcataaaccatcccacacatgaatgacacattcacgtggcgctcgccgtaagaaatccgaagacggtaaagaaaaaaccagataaagcacaaatcaatatgccggcacagatcaatatctaagtagtaaaataaacgccaacagtgcataatcataaggttcaacgacataactgtttcccccagcaaccaaaataaacaagagtattttgttaacatcatcacgcttctggtccattagtcatggagaacatgcagaatcctgtcaccagcgttgccttcagcattacccaaggaggggtaatgaagcagcgccctcagcgatgcctcctcaggtagcatgccgcaacggtcaacaaccaccttctgcaaggtggaagcatgaatctctggatagataccaataaagtctgtaatatcttggatagaaggaaatttaacagggcatgggaagttgagaccggacacatcatcaagcatggggggcatatggtggccctagtgtcaaaggagactttgaagcccagcatacgggccttgatcctctcacttcttcttggttggatggtttgcagttttctggtatactcgttcttaacaggacgactgctcttctttcgatttttcttagcccgataccccaatcttctctggtaaaccttttggatcacctgccacttctttatctggtcttggtggctccatccaaaaatgtccgggggtgggcaatcaacaggggcaacatcagatagcagatcatccgaagtcctcggagtaggaagtgccaagatcaagcagggatattcagaattctcctccacctcatcaatctgcactgaggaggaaccagcaacaatgacttgagaatccgaagggtgaaagttgatgctagcatattagcccaccaggccaacgactgaaggtgaggcatagatgcaaacatgattcttctgaagccaatggacacaaaaggagcaactggagccgaaggggacgcgacgccaaagcatgaggaggtggcagaggcggtggagcgagcggcagcg

SEQ ID NO: 36929 - DNA, 949 bp, Zea Mays
aaaaaacacaaggccttaagccttccgttgtgctccgcgaggaaagcgaggaggcggccggttcggtgctgagtgctgagttgttgaccaacgggaagtccagtacccaagcggagccaccaaggaaaggaggaatggaagccaccggcgcagcctcgcagccctcggcgccgcagacaactcacccggcggtggcgccgctggccttcctactggggaagtggcgcggggaaggcgagggcagcttccccaccatatcctccttccgccagtgatctcgtacacgcagaagacgtggaagacggcgtctggcgagccgatgcacgccgagagcgggtactggcggccccgccctgacggctccgtcgacgtggtcatcgctcagagcactggcctcgccgaggtccagaagggttcatttgatgctgaaaagaaaacagtgacactccaaagcgaactcgtagggaatgcatcaaaggtgaagcagatcacgagaacttttcaggtggcagatggggagctctcgtacgtcgttcagatggcaacgatcacaactagcctacagccacatctcaaggcccttcttaggaggatttgaagttgaccggcaaaatctcctacaacgacgtcgctgcggctaaccacaaccgagggacacctgtaatacagagcatacttctggtgattactacgtagttattagtgaatgaacttacaggttaaataaagctcattttcaaaaacagaggttccgctgataggaactaccgtatatgtaaacggcttaccattcagcccatgctccacaaatcgagattattattttttcagtttttttttgctttttattgtttattcctccttagcatgcattgtgagaacacacatcactacgtttctcaagattacgtgcagaaccaccacagaccacaccgacggcaatccagag

SEQ ID NO: 36930 - DNA, 1342 bp, Zea Mays
atgtcgaacagagctgtgggacattgggcgagcaaattctcggtgtggcaaggtggctcagagccaggggaagagtgggtagcagtgcgcaggacgagagcaccatcggagaacggggccgtggggcttggggcgcgtggattctcggcgctggcatgcgactcagtgccgaggccgcggggaatgggggcgggggggggggagcaggagtggcagtcgtggcgggacgagcgggcggaagcacatccaaagagtgcgttaattagtactagtattactcatacggcgagccaaggatgtcgaggaccaaagtcggcatcagcgggggccgggaagggcgcgaatggtcagtcggtggtgcagcggctgcaatcggagctgttggcgctgttgatgggcgacgacccaggcgtgtcggcgttccctggggcgacaacatgctccactagacctgtttgcaccactcccgcaaaaagtatactggcatatcaagggaacggcgatgttgggaagcaaagagaggatgactcccttgcatgcgaattcatcactattgtgtggcaagactactttgtgtagggaccagtcagcatgcttggtgtcacatgtgttctttctgagaccctctgctgcagttgtagacaaaatccgttcgcaagtcaggtatgttgtgcactgcgcaagatcatgggtgtcgagcggttcgcgcgtgcaccggctggacgtgctctagcaccgccagagtgagaagctgcgacagctcgtggatcgaacaaggcctagaaggtgatcgccaccttaagcactatctgacgatgagatgcagaaaaaacagtgagaagtccatagaggaagaggattcgatggagggatcaagaaaaattaaacgcgaaccttcatcgccgctgcaaggtagctttatacaagcagaaggagaagggttctttggcggaggctatacatgccacggtttggaatttgtcaatggtcatacagagaatccattgatgagaagcctaaatcattgggccggagacagcagtgcgatgagggccaatcccttacaataattgctggtcgactaccaagcaagtcaagcacgcgtaggttgcagtgcagctcatacgtaagagagatttacatggtcgttggagttattttgaagtactatggagtggacagttcagagatgtatatatataaaaatttgtttccctaccgtaggatatgccaaatcacctcagctggcggttttcgctataaaatgttgcaacaagttggtactctaaccaccagttcaaagaataatctcgagcaagttaatcatgcatatggcgtgtga

SEQ ID NO: 36931 - DNA, 1233 bp, Zea Mays
gtagacaaaatccggtgcgcacccatcaacaccaggtcgaggcaattacaaacttttgtagaaattgtgaccagcacactgtttccaagccagtgcccacaatatttctttactgtttccccctaggatgattcaaaaatagttgccatgataaaaaaaattgttggagactcattcgaccaactattcaagatgaaagtggtgacattgaatattcgatctgtgtgtctttcccttcctcccgttgtgtgtggtcttgttgctgatatgaagattttggtttccttgcctcactagaacactatcctttcaaagaaataggaacaattaagcttaaaatgcaaggtgtctgtagcggctgtccaagttcatctgtcacattgaagtctgggatagaaaacatgcttatgcactatgggcctgtttggtttggtcctcaacggatctgtcaggcccagacagcgtcccaagccattgattttggacgcctgagggctacgatggaatgcctggcaggcatctgcctgggaggctgcaatccaaatgtgccctatgtgcctcatgtgatgtgaagcaatttaatatgttctttgctgatgatatttcctaatgcttgttgttcaaaaatcaatgttctctatttaataactggaatgtgaagtgatttactttgttcttgctgtagttccttaatgcatatagctcaaaagatgttctctgttaggtaactagaatggttgtcatttgggaaatcaactcctattgcaattgttctctatgatgggttttccttaattatccatctattctactgggtgtttgtggttcaaaaaacaatgttctctatttgataactagaatgtgaattgatttattctgttcttgttgttgttccttaatgcccgtggctcaaaagatgttctctgctagataactagaatggttgtcatttgggaaataaattcctattgcaattgttatctatgatggggtttccttaattatccatatattctactgggttttccttaattgtcaattgatccaactattctattctcgttggtagttcgcaagtcaggtatgttgtgcactgcgcaagatcatgggtgtcgagcggttcgcgcgtgcaccggctggacgtgctctagcaccgccagagtgagaagctgcgacagctcgtggatcgaacaaggcctagaagaaaaaacagtgagaagtccatagaggaag

SEQ ID NO: 36932 - DNA, 1638 bp, Zea Mays
cacaatgcacaaaccgaccccgcccagcaccagcagactccctcccacacatcgagaccacagaccagcggcggcgacccaaccaaccaagcacaaagcaccgcgcgacaagacgacaaggctcccggaaaagagagaaaaaacaggcgagagaaattcgttaaaaatcctcccggtcggccacttttattaccagcactctagcagcaagtcgtcgctcccaccccacctcaccatctccactccaaacaaggggaaggcgagcgacagacaaacccaccctatcgcccctcctctgtctcctctcttgcccacccgccccaatgtcgccgcccctcgagccccacgactacatcggcctctccgccgtggccgcggccgcgccgccgaccccgaccccgacctcctcctcctcttcgtcctcctcgccggccccccgtctcacccttcgcctcggcctgccgggctccgagtcccccgaccgcgaccgggactgctgcgaggacgtcgccgccacgctctccctcggcccgctgccggcggccgccgccgtctccgccaagcgcgccttcccggaccccgcccagcgccccggcgcttccaaggctagcgacgccaagcagcaggcttcccccgccgcgccgccggccgccaaagcgcaggtggttggatggccgcccgtgcgcaactaccggaagaataccctcgccgccgcgaccgcctccaggagcaaggcgccggcggaggaggccgcgtccggagctgggcccatgtacgtgaaggtgagcatggatggcgcgccctacctcaggaaggtggacatcaagatgtactccagctacgaggacctctccctggcgctcgagaagatgttcagctgcttcatcgctggtcaaagtggtctgcataaatcatcgagcaaagacaggctcactaatggctcaaaggtggatgctctcaaagatcaggagtatgtccttacatatgaggataaggatgcagactggatgcttgtcggtgatcttccctgggattattttacctctatctgccggaagctcaaaatcatgaggggctctgatgctgttggaatagctccacgaaccgtcgagcagacaggtcagaacaaataagctttggcctttgcctgcatccaaggaagacatctgagctagctgggagactatgttgaaggctgaagcctgaaatagttgccgggaatcgtcaaaacccgtcaagtgtttagtgtagttttcacgtgtccttgagacatgtgcatttgtatgtctgtgacgtgatccgttagatcgtgcaatcgtaggttgctgttcttgtgccctttgaaggccagacagatcagggagctctctgcttccttagtgcacttgctttgcagcattccttgttattctactctgaaatcatacatcatgccacaagaaccgatggttcgtgatgtcaagagagctgccctaattgttccattgtaacctcgtaattgtgttcttccgcaggagaaattggtgctgcactcagcttcctaccacatcaacactagtaccgcacagcaacagcgcatgttacagaggttaactggcatgaaaatgttagaatggacgtaccaaatatcaaggttat

SEQ ID NO: 36933 - DNA, 1664 bp, Zea Mays
cactcccaaattcatttttctaaattaaaaagggggaaagggaaagattatcttctccgtcccctcccccctcccctcccgtacagctgtctgtctcggagcagcgggcagcggcggccggcaggcaatgcaatgaagaaatgctcggcgttggcctcggcgtccgactgatggtagctgttgcccctgcgcctccagttccagccccaccaggcaaaccgccccttcctctctgctcctctctccgccaccgctcctccggctggtggttctccaacggcgacgcccatggaagagacagcaccgccgccaccacgagcagcagggcgacgaggcggaagtggtggtccgaccccgacggcagccaagaagactacggttcctcttctctagaggaggacgagtacggttacggttacgactacgattacgaggatgaggctgcgttccccggatttggaggggctggggagatgttcgacgagccctggttctccaaggtattcaagacgtacggattcatgctaccggtgatgcttgcatccatgtttgctgtaacagggctaaaggcctttctaatggccatggcgatcccgctcggtcagtcggccatatcatttataattgacgctgtatggccaaggagaaaaggcaaccgtgacgacaggtggaggagaccagtccaagaggaggaggaggaggaggaagatttccctagggacgccactgactttgcaacagctgctgttggagctgatgatagcaccaagagcagcagcagtggagatggcggaggcaacaaaagcagcggtggatatggaggatgggatgagcttctggacaacaataacaacactgctgctgcccgggaggcaaagaggagcagcaactcattctcagctggcaacacttattacagcacgaaatcgcggccttcggcgactggggaggcagatgcggattataccgccgctggcggtggcggaagagcggagcagggagtaggagctcctccggaaagaatgagaatgagacgacggcgggtgccgagaacgatggggctgggcagtaccaggtacaagcaggcgccactcttgatgcgcctgttggtggcagtattcccattcctgggatcatggttcagtgtgctctgaactgtgctccttcgttccaaattataagacgttttggttgtcggctttctctagattcatagctttttgctatgtacttggatatacactatgtctacaaacgttataaaagcaatgtgtatagaaatgtcataatttggaacaagcaatgtatatagaaaagtcatgatttggaatggagggagtagtattatatattagcccatgttggctcactcatgaattcacatacaagtaaccagtggcagtaagcaaaagattatgattgtgaaactgccttcatccggtctccaggcagtcgcagaagtttgattcaatcataggctggagccgaatggaatcagaagtgaagctgtggattggaaggaagacaagtgtcgtgaagaagatcgattgattcaggcagtgtgcctgcagcatcagctaagcggaaaagtatgaccaagagtgaagcaagttgttaatcagtaccctactatcacgatatactgcatcttaattgcctcatcc

SEQ ID NO: 36934 - DNA, 3053 bp, Zea Mays
cgtccatatagtgcttggtcttaatccatatttaaatgtctattcatatttaataattggtatcttacaagagatgagataaaaaccttcagataaaaaccagcttcacacccagcccgccgtgcactttcccccgggccttggatttgttgatcttcttggtccgggcggcgctggaggaggcgtcgttctgcggttccgccgtctcgggctgctgctgctgcggctgatcgcctgaccttcgtttcggtttcgtggctgggaggaggaacaggatggcgtcgtggagctcggtgggtgtcaagagcgggcggaggcgatgaatgacgccgtctctcggggatcagcagccggttctggtgagggtccaggtcggtggccttcaagcacttctcgtcgtcgatgaagtgcacgggcaggtcggcgcgcaggcccagcgccacgaggaaatgcttgcgcaggcacgggggctcctgagctcctctctgccggcatcgagcgacggcgtccgcggatgaggcgggatggctccgaatggcggcggtgccgatgcctcgaggagccaggaggaacgtgactgtggacttgtggaggtctcctcctcatcccgcgcacacttgttggcgacggtgtcgtagacggccatctcgactctagagggctcttcttgaagccggacaaggacggcgcagaatggaatgaggagaggagaccgttgccgtcccgcccagtcgttgcgatatttattgagcgacaggataagctcgcgctagactgaactctggtcccactcccaaattcatttttctaaattaaaaagggggaaagggaaagattatcttctccgtcccctcccccctcccctcccgtacagctgtctgtctcggagcagcgggcagcggcggccggcaggcaatgcaatgaagaaatgctcggcgttggcctcggcgtccgactgatggtagctgttgcccctgcgcctccagttccagccccaccaggcaaaccgccccttcctctctgctcctctctccgccaccgctcctccggctggtggttctccaacggcgacgcccatggaagagacagcaccgccgccaccacgagcagcagggcgacgaggcggaagtggtggtccgaccccgacggcagccaagaagactacggttcctcttctctagaggaggacgagtacggttacggttacgactacgattacgaggatgaggctgcgttccccggatttggaggggctggggagatgttcgacgagccctggttctccaaggtctggtacatacgtattgtgtaaaatttctgctcctttccttcctttctggtaccctctgtcaatatgccatcaataatttctattttcctgcgtgcttgaaccttcatagtcatagactcataggtactaatgttacctgtctggacagtggatggggaccatagatcctttgccactcattcttagttataactaaaaatgcttcaaattaaatcaaatcgtcttccatttttttctctctctggtattaattcaagcaactgtataatgcttttgcctggtagatctaattaaaccaaatctctgcttataattctctgattgggatcttaacttacaatcaactaacctagacttgtcagctccagttcatgctgctttccattccatcagtaatgtagcatgcatcagtactgtaatcaatcgatggacgaataattgtgcttcattgttgtagtgactaatcaaatggcctgctgctttctgtacttgtgagtaggtattcaagacgtacggattcatgctaccggtgatgcttgcatccatgtttgctgtaacagggctaaaggcctttctaatggccatggcgatcccgctcggtcagtcggccatatcatttataattgacgctgtatggccaaggagaaaaggcaaccgtgacgacaggtggaggagaccagtccaagaggaggaggaggaggaggaagatttccctagggacgccactgactttgcaacaggtggtcgaggcagatacagcagcagctattatgaggggaggagagggaggcagagctaccagtcaagtgtctctaacgattttgctgatgctgcctcagctgctgttggagctgatgatagcaccaagagcagcagcagtggagatggcggaggcaacaaaagcagcggtggatatggaggatgggatgagcttctggacaacaataacaacactgctgctgcccgggaggcaaagaggagcagcaactcattctcagctggcaacacttattacagcacgaaatcgcggccttcggcgactggggaggcagatgcggattataccgccgctggcggtggcggaagagcggagcagggagtaggagctcctccggaaagaatgagaatgagacgacggcgggtgccgagaacgatggggctgggcagtaccaggtacaagcaggcgccactcttgatgcgcctgttggtggcagtattcccattcctgggatcatggttcagtgtgctctgaactgtgctccttcgttccaaattataagacgttttggttgtcggctttctctagattcatagctttttgctatgtacttggatatacactatgtctacaaacgttataaaagcaatgtgtatagaaatgtcataatttggaacaagcaatgtatatagaaaagtcatgatttggaatggagggagtagtattatatattagcccatgttggctcactcatgaattcacatacaagtaaccagtggcagtaagcaaaagattatgattgtgaaactgccttcatccggtctccaggcagtcgcagaagtttgattcaatcataggctggagccgaatggaatcagaagtgaagctgtggattggaaggaagacaagtgtcgtgaagaagatcgattgattcaggcagtgtgcctgcagcatcagctaagcggaaaagtatgaccaagagtgaagcaagttgttaatcagtaccctactatcacgatatactgcatcttaattgcctcatcc

SEQ ID NO: 36935 - DNA, 1374 bp, Zea Mays
cactcccaaattcatttttctaaattaaaaagggggaaagggaaagattatcttctccgtcccctcccccctcccctcccgtacagctgtctgtctcggagcagcgggcagcggcggccggcaggcaatgcaatgaagaaatgctcggcgttggcctcggcgtccgactgatggtagctgttgcccctgcgcctccagttccagccccaccaggcaaaccgccccttcctctctgctcctctctccgccaccgctcctccggctggtggttctccaacggcgacgcccatggaagagacagcaccgccgccaccacgagcagcagggcgacgaggcggaagtggtggtccgaccccgacggcagccaagaagactacggttcctcttctctagaggaggacgagtacggttacggttacgactacgattacgaggatgaggctgcgttccccggatttggaggggctggggagatgttcgacgagccctggttctccaagggctaaaggcctttctaatggccatggcgatcccgctcggtcagtcggccatatcatttataattgacgctgtatggccaaggagaaaaggcaaccgtgacgacaggtggaggagaccagtccaagaggaggaggaggaggaggaagatttccctagggacgccactgactttgcaacaggtggtcgaggcagatacagcagcagctattatgaggggaggagagggaggcagagctaccagtcaagtgtctctaacgattttgctgatgctgcctcagctgctgttggagctgatgatagcaccaagagcagcagcagtggagatggcggaggcaacaaaagcagcggtggatatggaggatgggatgagcttctggacaacaataacaacactgctgctgcccgggaggcaaagaggagcagcaactcattctcagctggcaacacttattacagcacgaaatcgcggccttcggcgactggggaggcagatgcggattataccgccgctggcggtggcggaagagcggagcagggagtaggagctcctccggaaagaatgagaatgagacgacggcgggtgccgagaacgatggggctgggcagtaccaggtacaagcaggcgccactcttgatgcgcctgttggtggcagtattcccattcctgggatcatggttcagtgtgctctgaactgtgctccttcgttccaaattataagacgttttggttgtcggctttctctagattcatagctttttgctatgtacttggatatacactatgtctacaaacgttataaaagcaatgtgtatagaaatgtcataatttggaacaagcaatgtatatagaaaagtcatgatttggaatggagg

SEQ ID NO: 36936 - DNA, 2480 bp, Zea Mays
ccaggcaaaacaaaaaggcgctagagctgtttgtgttgctttatggcgcggagcgggtgtgaggctgcagtgcctgggtggagctcgcgtggtccctgcagcggccgcaatgcctgccccacgcgcctgaccatgcattccaggctgctcaagaggctcgcgaagaggatcatgtgacggcaccttgccgtcgtttcgaccatcgcgcgcctgcgggacggggaagcatgcggaggatggatggcttcatctcgtcgtcgttggcgctcgtcgtgctggcgcttcatcttagcgtggatggctgctcggcggtcaaccttgaagggtcgatactgctcaaattccagtcaagagtggaggaggatccgtatggcgccatggtaggctggagcccgcgcgacagcgatccctgcagttggaacggcgtgcgctgcgttgatggcagagttgtaacgttaaacctgaaggatctctcattaagaggcaccctaggtccagagctaggaactcttagccatctgagggctcttgtactctccaataacttattcagtggatcaatacctaaggaattgagtgctcttacaatgttggagatactggatttaagcaacaacaacttgagtggggaagttccacaagagattgcagaaatgcaatcacttaggcagttattgctttccaataactgctttcagtggcctctgacccaacattcctatgggaactacgatcaggaaaatgatttcaatatttatgataatcttgggaggggtaatatgaatcgaagagctgagaatgggttggaatctggttcttcttcacaagagaacaaaaaggacactagcaacctttctggtaatccaactcaacttccttcacaacacgaaccaagaaatacagcatcacaccttacccagcgcaggttacttcaagatagcaatcttgctgcaccttctcctgcaaatgcccttgttccagctgctgttcctgttccttccactggaactgaactacctccgaagaagatcaagaaacaaggtccatcaaatggctttatgtcattgtactgccactggtcgcacttcttatgtttggcatcgcatgtatgcttttgctatgccgcaccaagtcagggacaacaataggtccatggaagacagggctcagtggccagctccaaaaggcatttgtaacaggagtaccaaagttgcaacgctctgagctggaaggtgcgtgtgaggatttcagtaatattgtggcaagctacccacaatacactgtctacaagggaaccttatcaagtggtgtggagatagctgttgtatcaaccatgattatctctagcaaagattggtcaaaacattcggaagggcgattcaggaagaagactcactgtcgcgaatcaatcataagaattatatcaatctgcttggatactgtgaggaggaagagcctttcatgcggatgatggtgatggaatatgctcccaatggaacgctatatgaacacctccatgtcgagggatttgatcctattgattggaatggtaggatgagggtaattatgggagtcgcatactgcacgctacacatgcatgagctcagccctcctataacacatccagacataaagtcaagtgctatattgctatctgaggatggagctgcaaagatagtagacatgagcgtttggcatgaagtatattccagagaaaacgtgcccaacgatgacgacttagttgatcacccggaacgagtagctgcggatccagctgggaacatctacagttttggtctactcatgctggagatcatctcaggaaagcctccatattccaaagaaaagggttcgcttttgaacttggctttggagtgcattagggataaccgaaacatgtcttgtttgcttgatcctaacttgaaggatcacaaagaaaaggacctagaaatcatatgtgatttgctctatgaatgcatccaaagcgatccgaagaagagaccaaccatgagggaggtcaccactagattgcgagaagtactgtcaatttcgcctgaggctgcaacgccccggttatctccactctggtgggcagagcttgagatcctttcagttgaagcaagctagcgaaaatgttctttgtttgcagcaacgaggtacttgtgcatattgtaatgcaaccctgtacatccctgttgtatgttttcatcttgtgttgtaactttggtgtctgcgtgctacaattttccctccccagtgaattcagttgcctggtatgttttctcatttgttcctcgctttccctatgtatactaaacatacatggtgtgaaagtagaaaataaaaaacgcttcatgccgtccaagggctgaatgtaatcagcaaatgtatagtgttccatagttttctttgattcaataactagtaattagtgttttggaggttattaagttacattattccaacaaaggttcaaggac

SEQ ID NO: 36937 - DNA, 2510 bp, Zea Mays
ccaggcaaaacaaaaaggcgctagagctgtttgtgttgctttatggtgattgcaagtttcctctgctccccatcgcccttttctctggcgcctctgactctctgagctgttcccgtctgtttcctcttgcacgcaggcgcggagcgggtgtgaggctgcagtgcctgggtggagctcgcgtggtccctgcagcggccgcaatgcctgccccacgcgcctgaccatgcattccaggctgctcaagaggctcgcgaagaggatcatgtgacggcaccttgccgtcgtttcgaccatcgcgcgcctgcgggacggggaagcatgcggaggatggatggcttcatctcgtcgtcgttggcgctcgtcgtgctggcgcttcatcttagcgtggatggctgctcggcggtcaaccttgaagggtcgatactgctcaaattccagtcaagagtggaggaggatccgtatggcgccatggtaggctggagcccgcgcgacagcgatccctgcagttggaacggcgtgcgctgcgttgatggcagagttgtaacgttaaacctgaaggatctctcattaagaggcaccctaggtccagagctaggaactcttagccatctgagggctctattgctttccaataactgctttcagtggcctctgacccaacattcctatgggaactacgatcaggaaaatgatttcaatatttatgataatcttgggaggggtaatatgaatcgaagagctgagaatgggttggaatctggttcttcttcacaagagaacaaaaaggacactagcaacctttctggtaatccaactcaacttccttcacaacacgaaccaagaaatacagcatcacaccttacccagcgcaggttacttcaagatagcaatcttgctgcaccttctcctgcaaatgcccttgttccagctgctgttcctgttccttccactggaactggttcgttttcagcatttagtcccaacaatgcacctgtaccagctgtaaattcaccaagtagtccaccgatggtccccagaactacctccgaagaagatcaagaaacaaggtccatcaaatggctttatgtcattgtactgccactggtcgcacttcttatgtttggcatcgcatgtatgcttttgctatgccgcaccaagtcagggacaacaataggtccatggaagacagggctcagtggccagctccaaaaggcatttgtaacaggagtaccaaagttgcaacgctctgagctggaaggtgcgtgtgaggatttcagtaatattgtggcaagctacccacaatacactgtctacaagggaaccttatcaagtggtgtggagatagctgttgtatcaaccatgattatctctagcaaagattggtcaaaacattcggaagggcgattcaggaagaagatagactcactgtcgcgaatcaatcataagaattatatcaatctgcttggatactgtgaggaggaagagcctttcatgcggatgatggtgatggaatatgctcccaatggaacgctatatgaacacctccatgtcgagggatttgatcctattgattggaatggtaggatgagggtaattatgggagtcgcatactgcacgctacacatgcatgagctcagccctcctataacacatccagacataaagtcaagtgctatattgctatctgaggatggagctgcaaagatagtagacatgagcgtttggcatgaagtatattccagagaaaacgtgcccaacgatgacgacttagttgatcacccggaacgagtagctgcggatccagctgggaacatctacagttttggtctactcatgctggagatcatctcaggaaagcctccatattccaaagaaaagggttcgcttttgaacttggctttggagtgcattagggataaccgaaacatgtcttgtttgcttgatcctaacttgaaggatcacaaagaaaaggacctagaaatcatatgtgatttgctctatgaatgcatccaaagcgatccgaagaagagaccaaccatgagggaggtcaccactagattgcgagaagtactgtcaatttcgcctgaggctgcaacgccccggttatctccactctggtgggcagagcttgagatcctttcagttgaagcaagctagcgaaaatgttctttgtttgcagcaacgaggtacttgtgcatattgtaatgcaaccctgtacatccctgttgtatgttttcatcttgtgttgtaactttggtgtctgcgtgctacaattttccctccccagtgaattcagttgcctggtatgttttctcatttgttcctcgctttccctatgtatactaaacatacatggtgtgaaagtagaaaataaaaaacgcttcatgccgtccaagggctgaatgtaatcagcaaatgtatagtgttccatagttttctttgattcaataactagtaattagtgttttggaggttattaagttacattattccaacaaaggttcaaggac

SEQ ID NO: 36938 - DNA, 2533 bp, Zea Mays
ctccgttccctcacccgctgccgtgcgcggagcgggtgtgaggctgcagtgcctgggtggagctcgcgtggtccctgcagcggccgcaatgcctgccccacgcgcctgaccatgcattccaggctgctcaagaggctcgcgaagaggatcatgtgacggcaccttgccgtcgtttcgaccatcgcgcgcctgcgggacggggaagcatgcggaggatggatggcttcatctcgtcgtcgttggcgctcgtcgtgctggcgcttcatcttagcgtggatggctgctcggcggtcaaccttgaagggtcgatactgctcaaattccagtcaagagtggaggaggatccgtatggcgccatggtaggctggagcccgcgcgacagcgatccctgcagttggaacggcgtgcgctgcgttgatggcagagttgtaacgttaaacctgaaggatctctcattaagaggcaccctaggtccagagctaggaactcttagccatctgagggctcttgtactctccaataacttattcagtggatcaatacctaaggaattgagtgctcttacaatgttggagatactggatttaagcaacaacaacttgagtggggaagttccacaagagattgcagaaatgcaatcacttaggcagttattgctttccaataactgctttcagtggcctctgacccaacattcctatgggaactacgatcaggaaaatgatttcaatatttatgataatcttgggaggggtaatatgaatcgaagagctgagaatgggttggaatctggttcttcttcacaagagaacaaaaaggacactagcaacctttctgctcaacttccttcacaacacgaaccaagaaatacagcatcacaccttacccagcgcaggttacttcaagatagcaatcttgctgcaccttctcctgcaaatgcccttgttccagctgctgttcctgttccttccactggaactggttcgttttcagcatttagtcccaacaatgcacctgtaccagctgtaaattcaccaagtagtccaccgatggtccccagaactacctccgaagaagatcaagaaacaaggtccatcaaatggctttatgtcattgtactgccactggtcgcacttcttatgtttggcatcgcatgtatgcttttgctatgccgcaccaagtcagggacaacaataggtccatggaagacagggctcagtggccagctccaaaaggcatttgtaacaggagtaccaaagttgcaacgctctgagctggaaggtgcgtgtgaggatttcagtaatattgtggcaagctacccacaatacactgtctacaagggaaccttatcaagtggtgtggagatagctgttgtatcaaccatgattatctctagcaaagattggtcaaaacattcggaagggcgattcaggaagaagatagactcactgtcgcgaatcaatcataagaattatatcaatctgcttggatactgtgaggaggaagagcctttcatgcggatgatggtgatggaatatgctcccaatggaacgctatatgaacacctccatgtcgagggatttgatcctattgattggaatggtaggatgagggtaattatgggagtcgcatactgcacgctacacatgcatgagctcagccctcctataacacatccagacataaagtcaagtgctatattgctatctgaggatggagctgcaaagatagtagacatgagcgtttggcatgaagtatattccagagaaaacgtgcccaacgatgacgacttagttgatcacccggaacgagtagctgcggatccagctgggaacatctacagttttggtctactcatgctggagatcatctcaggaaagcctccatattccaaagaaaagggttcgcttttgaacttggctttggagtgcattagggataaccgaaacatgtcttgtttgcttgatcctaacttgaaggatcacaaagaaaaggacctagaaatcatatgtgatttgctctatgaatgcatccaaagcgatccgaagaagagaccaaccatgagggaggtcaccactagattgcgagaagtactgtcaatttcgcctgaggctgcaacgccccggttatctccactctggtgggcagagcttgagatcctttcagttgaagcaagctagcgaaaatgttctttgtttgcagcaacgaggtacttgtgcatattgtaatgcaaccctgtacatccctgttgtatgttttcatcttgtgttgtaactttggtgtctgcgtgctacaattttccctccccagtgaattcagttgcctggtatgttttctcatttgttcctcgctttccctatgtatactaaacatacatggtgtgaaagtagaaaataaaaaacgcttcatgccgtccaagggctgaatgtaatcagcaaatgtatagtgttccatagttttctttgattcaataactagtaattagtgttttggaggttattaagttacattattccaacaaaggttcaaggac

SEQ ID NO: 36939 - DNA, 2595 bp, Zea Mays
ctctcttccccatctccttctcctccgttccctcacccgctgccgtgcgcggagcgggtgtgaggctgcagtgcctgggtggagctcgcgtggtccctgcagcggccgcaatgcctgccccacgcgcctgaccatgcattccaggctgctcaagaggctcgcgaagaggatcatgtgacggcaccttgccgtcgtttcgaccatcgcgcgcctgcgggacggggaagcatgcggaggatggatggcttcatctcgtcgtcgttggcgctcgtcgtgctggcgcttcatcttagcgtggatggctgctcggcggtcaaccttgaagggtcgatactgctcaaattccagtcaagagtggaggaggatccgtatggcgccatggtaggctggagcccgcgcgacagcgatccctgcagttggaacggcgtgcgctgcgttgatggcagagttgtaacgttaaacctgaaggatctctcattaagaggcaccctaggtccagagctaggaactcttagccatctgagggctcttgtactctccaataacttattcagtggatcaatacctaaggaattgagtgctcttacaatgttggagatactggatttaagcaacaacaacttgagtggggaagttccacaagagattgcagaaatgcaatcacttaggcagttattgctttccaataactgctttcagtggcctctgacccaacattcctatgggaactacgatcaggaaaatgatttcaatatttatgataatcttgggaggggtaatatgaatcgaagagctgagaatggtttttttttgatcttgatcggatcgttctaggttggaatctggttcttcttcacaagagaacaaaaaggacactagcaacctttctggtaatccaactcaacttccttcacaacacgaaccaagaaatacagcatcacaccttacccagcgcaggttacttcaagatagcaatcttgctgcaccttctcctgcaaatgcccttgttccagctgctgttcctgttccttccactggaactggttcgttttcagcatttagtcccaacaatgcacctgtaccagctgtaaattcaccaagtagtccaccgatggtccccagaactacctccgaagaagatcaagaaacaaggtccatcaaatggctttatgtcattgtactgccactggtcgcacttcttatgtttggcatcgcatgtatgcttttgctatgccgcaccaagtcagggacaacaataggtccatggaagacagggctcagtggccagctccaaaaggcatttgtaacaggagtaccaaagttgcaacgctctgagctggaaggtgcgtgtgaggatttcagtaatattgtggcaagctacccacaatacactgtctacaagggaaccttatcaagtggtgtggagatagctgttgtatcaaccatgattatctctagcaaagattggtcaaaacattcggaagggcgattcaggaagaagatagactcactgtcgcgaatcaatcataagaattatatcaatctgcttggatactgtgaggaggaagagcctttcatgcggatgatggtgatggaatatgctcccaatggaacgctatatgaacacctccatgtcgagggatttgatcctattgattggaatggtaggatgagggtaattatgggagtcgcatactgcacgctacacatgcatgagctcagccctcctataacacatccagacataaagtcaagtgctatattgctatctgaggatggagctgcaaagatagtagacatgagcgtttggcatgaagtatattccagagaaaacgtgcccaacgatgacgacttagttgatcacccggaacgagtagctgcggatccagctgggaacatctacagttttggtctactcatgctggagatcatctcaggaaagcctccatattccaaagaaaagggttcgcttttgaacttggctttggagtgcattagggataaccgaaacatgtcttgtttgcttgatcctaacttgaaggatcacaaagaaaaggacctagaaatcatatgtgatttgctctatgaatgcatccaaagcgatccgaagaagagaccaaccatgagggaggtcaccactagattgcgagaagtactgtcaatttcgcctgaggctgcaacgccccggttatctccactctggtgggcagagcttgagatcctttcagttgaagcaagctagcgaaaatgttctttgtttgcagcaacgaggtacttgtgcatattgtaatgcaaccctgtacatccctgttgtatgttttcatcttgtgttgtaactttggtgtctgcgtgctacaattttccctccccagtgaattcagttgcctggtatgttttctcatttgttcctcgctttccctatgtatactaaacatacatggtgtgaaagtagaaaataaaaaacgcttcatgccgtccaagggctgaatgtaatcagcaaatgtatagtgttccatagttttctttgattcaataactagtaattagtgttttggaggttattaagttacattattccaacaaaggttcaaggac

SEQ ID NO: 36940 - DNA, 2595 bp, Zea Mays
ccgctgtttccctccccctcccgcccgtcctctctcttccccatctccttctcctccgttccctcacccgctgccgtgcgcggagcgggtgtgaggctgcagtgcctgggtggagctcgcgtggtccctgcagcggccgcaatgcctgccccacgcgcctgaccatgcattccaggctgctcaagaggctcgcgaagaggatcatgtgacggcaccttgccgtcgtttcgaccatcgcgcgcctgcgggacggggaagcatgcggaggatggatggcttcatctcgtcgtcgttggcgctcgtcgtgctggcgcttcatcttagcgtggatggctgctcggcggtcaaccttgaagggtcgatactgctcaaattccagtcaagagtggaggaggatccgtatggcgccatggtaggctggagcccgcgcgacagcgatccctgcagttggaacggcgtgcgctgcgttgatggcagagttgtaacgttaaacctgaaggatctctcattaagaggcaccctaggtccagagctaggaactcttagccatctgagggctcttgtactctccaataacttattcagtggatcaatacctaaggaattgagtgctcttacaatgttggagatactggatttaagcaacaacaacttgagtggggaagttccacaagagattgcagaaatgcaatcacttaggcagttattgctttccaataactgctttcagtggcctctgacccaacattcctatgggaactacgatcaggaaaatgatttcaatatttatgataatcttgggaggggtaatatgaatcgaagagctgagaatgggttggaatctggttcttcttcacaagagaacaaaaaggacactagcaacctttctggtaatccaactcaacttccttcacaacacgaaccaagaaatacagcatcacaccttacccagcgcaggttacttcaagatagcaatcttgctgcaccttctcctgcaaatgcccttgttccagctgctgttcctgttccttccactggaactggttcgttttcagcatttagtcccaacaatgcacctgtaccagctgtaaattcaccaagtagtccaccgatggtccccagaactacctccgaagaagatcaagaaacaaggtccatcaaatggctttatgtcattgtactgccactggtcgcacttcttatgtttggcatcgcatgtatgcttttgctatgccgcaccaagtcagggacaacaataggtccatggaagacagggctcagtggccagctccaaaaggcatttgtaacaggagtaccaaagttgcaacgctctgagctggaaggtgcgtgtgaggatttcagtaatattgtggcaagctacccacaatacactgtctacaagggaaccttatcaagtggtgtggagatagctgttgtatcaaccatgattatctctagcaaagattggtcaaaacattcggaagggcgattcaggaagaagatagactcactgtcgcgaatcaatcataagaattatatcaatctgcttggatactgtgaggaggaagagcctttcatgcggatgatggtgatggaatatgctcccaatggaacgctatatgaacacctccatgtcgagggatttgatcctattgattggaatggtaggatgagggtaattatgggagtcgcatactgcacgctacacatgcatgagctcagccctcctataacacatccagacataaagtcaagtgctatattgctatctgaggatggagctgcaaagatagtagacatgagcgtttggcatgaagtatattccagagaaaacgtgcccaacgatgacgacttagttgatcacccggaacgagtagctgcggatccagctgggaacatctacagttttggtctactcatgctggagatcatctcaggaaagcctccatattccaaagaaaagggttcgcttttgaacttggctttggagtgcattagggataaccgaaacatgtcttgtttgcttgatcctaacttgaaggatcacaaagaaaaggacctagaaatcatatgtgatttgctctatgaatgcatccaaagcgatccgaagaagagaccaaccatgagggaggtcaccactagattgcgagaagtactgtcaatttcgcctgaggctgcaacgccccggttatctccactctggtgggcagagcttgagatcctttcagttgaagcaagctagcgaaaatgttctttgtttgcagcaacgaggtacttgtgcatattgtaatgcaaccctgtacatccctgttgtatgttttcatcttgtgttgtaactttggtgtctgcgtgctacaattttccctccccagtgaattcagttgcctggtatgttttctcatttgttcctcgctttccctatgtatactaaacatacatggtgtgaaagtagaaaataaaaaacgcttcatgccgtccaagggctgaatgtaatcagcaaatgtatagtgttccatagttttctttgattcaataactagtaattagtgttttggaggttattaagttacattattccaacaaaggttcaaggac

SEQ ID NO: 36941 - DNA, 2180 bp, Zea Mays
cgaggagctccgagcgactaagggatccacgcatccagccgccggccgccaggccgcggcgccccgaaccacggaaacctgaaggatctctcattaagaggcaccctaggtccagagctaggaactcttagccatctgagggctcttgtactctccaataacttattcagtggatcaatacctaaggaattgagtgctcttacaatgttggagatactggatttaagcaacaacaacttgagtggggaagttccacaagagattgcagaaatgcaatcacttaggcagttattgctttccaataactgctttcagtggcctctgacccaacattcctatgggaactacgatcaggaaaatgatttcaatatttatgataatcttgggaggggtaatatgaatcgaagagctgagaatgggttggaatctggttcttcttcacaagagaacaaaaaggacactagcaacctttctggtaatccaactcaacttccttcacaacacgaaccaagaaatacagcatcacaccttacccagcgcaggttacttcaagatagcaatcttgctgcaccttctcctgcaaatgcccttgttccagctgctgttcctgttccttccactggaactggttcgttttcagcatttagtcccaacaatgcacctgtaccagctgtaaattcaccaagtagtccaccgatggtccccagaactacctccgaagaagatcaagaaacaaggtccatcaaatggctttatgtcattgtactgccactggtcgcacttcttatgtttggcatcgcatgtatgcttttgctatgccgcaccaagtcagggacaacaataggtccatggaagacagggctcagtggccagctccaaaaggcatttgtaacaggagtaccaaagttgcaacgctctgagctggaaggtgcgtgtgaggatttcagtaatattgtggcaagctacccacaatacactgtctacaagggaaccttatcaagtggtgtggagatagctgttgtatcaaccatgattatctctagcaaagattggtcaaaacattcggaagggcgattcaggaagaagatagactcactgtcgcgaatcaatcataagaattatatcaatctgcttggatactgtgaggaggaagagcctttcatgcggatgatggtgatggaatatgctcccaatggaacgctatatgaacacctccatgtcgagggatttgatcctattgattggaatggtaggatgagggtaattatgggagtcgcatactgcacgctacacatgcatgagctcagccctcctataacacatccagacataaagtcaagtgctatattgctatctgaggatggagctgcaaagatagtagacatgagcgtttggcatgaagtatattccagagaaaacgtgcccaacgatgacgacttagttgatcacccggaacgagtagctgcggatccagctgggaacatctacagttttggtctactcatgctggagatcatctcaggaaagcctccatattccaaagaaaagggttcgcttttgaacttggctttggagtgcattagggataaccgaaacatgtcttgtttgcttgatcctaacttgaaggatcacaaagaaaaggacctagaaatcatatgtgatttgctctatgaatgcatccaaagcgatccgaagaagagaccaaccatgagggaggtcaccactagattgcgagaagtactgtcaatttcgcctgaggctgcaacgccccggttatctccactctggtgggcagagcttgagatcctttcagttgaagcaagctagcgaaaatgttctttgtttgcagcaacgaggtacttgtgcatattgtaatgcaaccctgtacatccctgttgtatgttttcatcttgtgttgtaactttggtgtctgcgtgctacaattttccctccccagtgaattcagttgcctggtatgttttctcatttgttcctcgctttccctatgtatactaaacatacatggtgtgaaagtagaaaataaaaaacgcttcatgccgtccaagggctgaatgtaatcagcaaatgtatagtgttccatagttttctttgattcaataactagtaattagtgttttggaggttattaagttacattattccaacaaaggttcaaggac

SEQ ID NO: 36942 - DNA, 2204 bp, Zea Mays
ccaccgtccccgccacgacggatcgcaagctggcgaggagctccgagcgactaagggatccacgcatccagccgccggccgccaggccgcggcgccccgaaccacggaaacctgaaggatctctcattaagaggcaccctaggtccagagctaggaactcttagccatctgagggctcttgtactctccaataacttattcagtggatcaatacctaaggaattgagtgctcttacaatgttggagatactggatttaagcaacaacaacttgagtggggaagttccacaagagattgcagaaatgcaatcacttaggcagttattgctttccaataactgctttcagtggcctctgacccaacattcctatgggaactacgatcaggaaaatgatttcaatatttatgataatcttgggaggggtaatatgaatcgaagagctgagaatgggttggaatctggttcttcttcacaagagaacaaaaaggacactagcaacctttctgctcaacttccttcacaacacgaaccaagaaatacagcatcacaccttacccagcgcaggttacttcaagatagcaatcttgctgcaccttctcctgcaaatgcccttgttccagctgctgttcctgttccttccactggaactggttcgttttcagcatttagtcccaacaatgcacctgtaccagctgtaaattcaccaagtagtccaccgatggtccccagaactacctccgaagaagatcaagaaacaaggtccatcaaatggctttatgtcattgtactgccactggtcgcacttcttatgtttggcatcgcatgtatgcttttgctatgccgcaccaagtcagggacaacaataggtccatggaagacagggctcagtggccagctccaaaaggcatttgtaacaggagtaccaaagttgcaacgctctgagctggaaggtgcgtgtgaggatttcagtaatattgtggcaagctacccacaatacactgtctacaagggaaccttatcaagtggtgtggagatagctgttgtatcaaccatgattatctctagcaaagattggtcaaaacattcggaagggcgattcaggaagaagatagactcactgtcgcgaatcaatcataagaattatatcaatctgcttggatactgtgaggaggaagagcctttcatgcggatgatggtgatggaatatgctcccaatggaacgctatatgaacacctccatgtcgagggatttgatcctattgattggaatggtaggatgagggtaattatgggagtcgcatactgcacgctacacatgcatgagctcagccctcctataacacatccagacataaagtcaagtgctatattgctatctgaggatggagctgcaaagatagtagacatgagcgtttggcatgaagtatattccagagaaaacgtgcccaacgatgacgacttagttgatcacccggaacgagtagctgcggatccagctgggaacatctacagttttggtctactcatgctggagatcatctcaggaaagcctccatattccaaagaaaagggttcgcttttgaacttggctttggagtgcattagggataaccgaaacatgtcttgtttgcttgatcctaacttgaaggatcacaaagaaaaggacctagaaatcatatgtgatttgctctatgaatgcatccaaagcgatccgaagaagagaccaaccatgagggaggtcaccactagattgcgagaagtactgtcaatttcgcctgaggctgcaacgccccggttatctccactctggtgggcagagcttgagatcctttcagttgaagcaagctagcgaaaatgttctttgtttgcagcaacgaggtacttgtgcatattgtaatgcaaccctgtacatccctgttgtatgttttcatcttgtgttgtaactttggtgtctgcgtgctacaattttccctccccagtgaattcagttgcctggtatgttttctcatttgttcctcgctttccctatgtatactaaacatacatggtgtgaaagtagaaaataaaaaacgcttcatgccgtccaagggctgaatgtaatcagcaaatgtatagtgttccatagttttctttgattcaataactagtaattagtgttttggaggttattaagttacattattccaacaaaggttcaaggac

SEQ ID NO: 36943 - DNA, 2708 bp, Zea Mays
cgaaagtcctgaaccagccgcgaatcgcgagtcgagactcgcgaggcgcgcgcgcctgccgttctccgcctcgggtcgccgccggtagccggccaccgtccccgccacgacggatcgcaagctggcgaggagctccgagcgactaagggatccacgcatccagccgccggccgccaggccgcggcgccccgaaccacgggcgcggagcgggtgtgaggctgcagtgcctgggtggagctcgcgtggtccctgcagcggccgcaatgcctgccccacgcgcctgaccatgcattccaggctgctcaagaggctcgcgaagaggatcatgtgacggcaccttgccgtcgtttcgaccatcgcgcgcctgcgggacggggaagcatgcggaggatggatggcttcatctcgtcgtcgttggcgctcgtcgtgctggcgcttcatcttagcgtggatggctgctcggcggtcaaccttgaagggtcgatactgctcaaattccagtcaagagtggaggaggatccgtatggcgccatggtaggctggagcccgcgcgacagcgatccctgcagttggaacggcgtgcgctgcgttgatggcagagttgtaacgttaaacctgaaggatctctcattaagaggcaccctaggtccagagctaggaactcttagccatctgagggctcttgtactctccaataacttattcagtggatcaatacctaaggaattgagtgctcttacaatgttggagatactggatttaagcaacaacaacttgagtggggaagttccacaagagattgcagaaatgcaatcacttaggcagttattgctttccaataactgctttcagtggcctctgacccaacattcctatgggaactacgatcaggaaaatgatttcaatatttatgataatcttgggaggggtaatatgaatcgaagagctgagaatgggttggaatctggttcttcttcacaagagaacaaaaaggacactagcaacctttctgctcaacttccttcacaacacgaaccaagaaatacagcatcacaccttacccagcgcaggttacttcaagatagcaatcttgctgcaccttctcctgcaaatgcccttgttccagctgctgttcctgttccttccactggaactggttcgttttcagcatttagtcccaacaatgcacctgtaccagctgtaaattcaccaagtagtccaccgatggtccccagaactacctccgaagaagatcaagaaacaaggtccatcaaatggctttatgtcattgtactgccactggtcgcacttcttatgtttggcatcgcatgtatgcttttgctatgccgcaccaagtcagggacaacaataggtccatggaagacagggctcagtggccagctccaaaaggcatttgtaacaggagtaccaaagttgcaacgctctgagctggaaggtgcgtgtgaggatttcagtaatattgtggcaagctacccacaatacactgtctacaagggaaccttatcaagtggtgtggagatagctgttgtatcaaccatgattatctctagcaaagattggtcaaaacattcggaagggcgattcaggaagaagatagactcactgtcgcgaatcaatcataagaattatatcaatctgcttggatactgtgaggaggaagagcctttcatgcggatgatggtgatggaatatgctcccaatggaacgctatatgaacacctccatgtcgagggatttgatcctattgattggaatggtaggatgagggtaattatgggagtcgcatactgcacgctacacatgcatgagctcagccctcctataacacatccagacataaagtcaagtgctatattgctatctgaggatggagctgcaaagatagtagacatgagcgtttggcatgaagtatattccagagaaaacgtgcccaacgatgacgacttagttgatcacccggaacgagtagctgcggatccagctgggaacatctacagttttggtctactcatgctggagatcatctcaggaaagcctccatattccaaagaaaagggttcgcttttgaacttggctttggagtgcattagggataaccgaaacatgtcttgtttgcttgatcctaacttgaaggatcacaaagaaaaggacctagaaatcatatgtgatttgctctatgaatgcatccaaagcgatccgaagaagagaccaaccatgagggaggtcaccactagattgcgagaagtactgtcaatttcgcctgaggctgcaacgccccggttatctccactctggtgggcagagcttgagatcctttcagttgaagcaagctagcgaaaatgttctttgtttgcagcaacgaggtacttgtgcatattgtaatgcaaccctgtacatccctgttgtatgttttcatcttgtgttgtaactttggtgtctgcgtgctacaattttccctccccagtgaattcagttgcctggtatgttttctcatttgttcctcgctttccctatgtatactaaacatacatggtgtgaaagtagaaaataaaaaacgcttcatgccgtccaagggctgaatgtaatcagcaaatgtatagtgttccatagttttctttgattcaataactagtaattagtgttttggaggttattaagttacattattccaacaaaggttcaaggac

SEQ ID NO: 36944 - DNA, 2968 bp, Zea Mays
ctactatttctctaaatcatcaatttaagaagttctttcgggtgaagttgctctaagcacgaaaacgcacactagaaactcctctcgtttgcgcgtccccacctggccggcgcaggccccaccgcacgtctcttgaggccttgtttgtttgggtcggattggtgagtcggaataattcccggccggattgcttctctaatttatataaactttgattagccggaatgattccgggtacaatccgacgcaaacgaaagtcctgaaccagccgcgaatcgcgagtcgagactcgcgaggcgcgcgcgcctgccgttctccgcctcgggtcgccgccggtagccggccaccgtccccgccacgacggatcgcaagctggcgaggagctccgagcgactaagggatccacgcatccagccgccggccgccaggccgcggcgccccgaaccacgggcgcggagcgggtgtgaggctgcagtgcctgggtggagctcgcgtggtccctgcagcggccgcaatgcctgccccacgcgcctgaccatgcattccaggctgctcaagaggctcgcgaagaggatcatgtgacggcaccttgccgtcgtttcgaccatcgcgcgcctgcgggacggggaagcatgcggaggatggatggcttcatctcgtcgtcgttggcgctcgtcgtgctggcgcttcatcttagcgtggatggctgctcggcggtcaaccttgaagggtcgatactgctcaaattccagtcaagagtggaggaggatccgtatggcgccatggtaggctggagcccgcgcgacagcgatccctgcagttggaacggcgtgcgctgcgttgatggcagagttgtaacgttaaacctgaaggatctctcattaagaggcaccctaggtccagagctaggaactcttagccatctgagggctcttgtactctccaataacttattcagtggatcaatacctaaggaattgagtgctcttacaatgttggagatactggatttaagcaacaacaacttgagtggggaagttccacaagagattgcagaaatgcaatcacttaggcagttattgctttccaataactgctttcagtggcctctgacccaacattcctatgggaactacgatcaggaaaatgatttcaatatttatgataatcttgggaggggtaatatgaatcgaagagctgagaatgggttggaatctggttcttcttcacaagagaacaaaaaggacactagcaacctttctggtaatccaactcaacttccttcacaacacgaaccaagaaatacagcatcacaccttacccagcgcaggttacttcaagatagcaatcttgctgcaccttctcctgcaaatgcccttgttccagctgctgttcctgttccttccactggaactggttcgttttcagcatttagtcccaacaatgcacctgtaccagctgtaaattcaccaagtagtccaccgatggtccccagaactacctccgaagaagatcaagaaacaaggtccatcaaatggctttatgtcattgtactgccactggtcgcacttcttatgtttggcatcgcatgtatgcttttgctatgccgcaccaagtcagggacaacaataggtccatggaagacagggctcagtggccagctccaaaaggcatttgtaacaggagtaccaaagttgcaacgctctgagctggaaggtgcgtgtgaggatttcagtaatattgtggcaagctacccacaatacactgtctacaagggaaccttatcaagtggtgtggagatagctgttgtatcaaccatgattatctctagcaaagattggtcaaaacattcggaagggcgattcaggaagaagatagactcactgtcgcgaatcaatcataagaattatatcaatctgcttggatactgtgaggaggaagagcctttcatgcggatgatggtgatggaatatgctcccaatggaacgctatatgaacacctccatgtcgagggatttgatcctattgattggaatggtaggatgagggtaattatgggagtcgcatactgcacgctacacatgcatgagctcagccctcctataacacatccagacataaagtcaagtgctatattgctatctgaggatggagctgcaaagatagtagacatgagcgtttggcatgaagtatattccagagaaaacgtgcccaacgatgacgacttagttgatcacccggaacgagtagctgcggatccagctgggaacatctacagttttggtctactcatgctggagatcatctcaggaaagcctccatattccaaagaaaagggttcgcttttgaacttggctttggagtgcattagggataaccgaaacatgtcttgtttgcttgatcctaacttgaaggatcacaaagaaaaggacctagaaatcatatgtgatttgctctatgaatgcatccaaagcgatccgaagaagagaccaaccatgagggaggtcaccactagattgcgagaagtactgtcaatttcgcctgaggctgcaacgccccggttatctccactctggtgggcagagcttgagatcctttcagttgaagcaagctagcgaaaatgttctttgtttgcagcaacgaggtacttgtgcatattgtaatgcaaccctgtacatccctgttgtatgttttcatcttgtgttgtaactttggtgtctgcgtgctacaattttccctccccagtgaattcagttgcctggtatgttttctcatttgttcctcgctttccctatgtatactaaacatacatggtgtgaaagtagaaaataaaaaacgcttcatgccgtccaagggctgaatgtaatcagcaaatgtatagtgttccatagttttctttgattcaataactagtaattagtgttttggaggttattaagttacattattccaacaaaggttcaaggac

SEQ ID NO: 36945 - DNA, 1289 bp, Zea Mays
agcagatcgggtctgctccagatatatcatggcacgagcgagctcctcacgccaggtaatagcaaaggcacgtgtgccaattgtgaagtttgtggaaagaaagagtggaatagcttttgacatcagctttgatatagatggtggcccacaggcagcagatttcatcaaggatgctgtgaagaagttgcctgctttaagacctttatgtatgattctgaaagtttttctgcatcagagagagctcaacgaggtctataccggtggaattggatcatatgctcttcttacgatgttgattacacatttacagttggtctggggaggaaaagatattctcgggtatcatcggtccaaggagcacaatctgggaattcttttggtcaggttttttgatttttatggacgcaagttgaacaactgggatgtcggagtatcatgcaattcttcaaggacctttttcttgaagagtgataaagactttatgaatcatgaccggccacatcttttagcgattcaggatcctatggcaccagataatgatatcggaaagaattcctttaactactttaagattcagttctccttgaccggaaaggctggaacaatgaagatatgttagcggaaccctgggagccgatcacccaacagtttgacaccgagaatgatgcagtatacaattggcatgtgatagacgaggatgaaccattgcccagaaatagtcaatccacatccgaggacactagttcgtcaccatctaaaaaacggaagtccccaaaatcaagacggaaatcgcgaaagaagtcgaaggctactgcctcaggcagtagtgatgttgcaaatgggttcagaaaggatagatcatccaagcgggaagcgggaagcagcaaacggaggaaagggccaaaggagtacgacagattcacgaatacactcccaaagtacacacatgttagcaagtggtaacttatagcatttatagtctggtcgcaaaggtccagcaatttgacagtgagaagagtatcatgtcacattatggcatgcgatgtgaatgacggaagtcatcagcagcaccagaagcgccatcgcatggtttgcttgttggtctgtttaattgctgtactttacgtaacagagatcacactagattaaatgatgttttggttattttatttatgctgcagcagttttggcgactagcttgtattctttttgtaacggtatgggttggtgacgatgagattatgtacgttcaaacatatttaattgatggtctgatggccttaatcact

SEQ ID NO: 36946 - DNA, 2057 bp, Zea Mays
gcaagggcaaacgagccgttctctcccccgcgccgccgacgcaagcagccgccacggagatggaggccgaggcgtccgtccccgccacggactacgtctacgacgcgctcccgggcctgcacctggccttctcaccggaggagacgctcgatgacgccgccgcggggcaggacgaggacgatgcgaccgcgacatacgccgtcttccgcaacgagataacggaggctggagatgtgctcgcggacatccctgctgcggacttcttctcactcgacgtctccacctctgcctccgtcgagcccgagcccgagcccgagccgccatccccggcgcccacagctgccgcggcaacgccctctatctcccgtgctttggaggaccagccgccgcagggctcggagcgcgcgtggttcaggggagggaggcggttcaggagccccatgcttcagctacacaaggagatcctggacttctgtgattttatctcaccttctactgaagagcaatcttcacgagcagctgctgtgcaagatgtctctgatgttgtcaaacatatatggccacagtgtggaagtttttggatctttcaggacaggtctctatctaccaacaagtgatatagatgttgtgatatttgaatccagagttaagactcctcaagttggtctatatgctcttgcaaaagcattatcccagaaaggtgttgctaaaaaaatacaggtaatagcaaaggcacgtgtgccaattgtgaagtttgtggaaagaaagagtggaatagcttttgacatcagctttgatatagatggtggcccacaggcagcagatttcatcaaggatgctgtgaagaagttgcctgctttaagacctttatgtatgattctgaaagtttttctgcatcagagagagctcaacgaggtctataccggtggaattggatcatatgctcttcttacgatgttgattacacatttacagttggtctggggaggaaaagatattctcgggtatcatcggtccaaggagcacaatctgggaattcttttggtcaggttttttgatttttatggacgcaagttgaacaactgggatgtcggagtatcatgcaattcttcaaggacctttttcttgaagagtgataaagactttatgaatcatgaccggccacatcttttagcgattcaggatcctatggcaccagataatgatatcggaaagaattcctttaactactttaaggtgaaatcagcattttccaaggcgtactctgtgttaactgatgcaaacttgtttattagtttgggacataataggagcattctgggtaccattgtgagaccagattcagttctccttgaccggaaaggctggaacaatgaagatatgttagcggaaccctgggagccgatcacccaacagtttgacaccgagaatgatgcagtatacaattggcatgtgatagacgaggatgaaccattgcccagaaatagtcaatccacatccgaggacactagttcgtcaccatctaaaaaacggaagtccccaaaatcaagacggaaatcgcgaaagaagtcgaaggctactgcctcaggcagtagtgatgttgcaaatgggttcagaaaggatagatcatccaagcgggaagcgggaagcagcaaacggaggaaagggccaaaggagtacgacagattcacgaatacactcccaaagtacacacatgttagcaagtggtaacttatagcatttatagtctggtcgcaaaggtccagcaatttgacagtgagaagagtatcatgtcacattatggcatgcgatgtgaatgacggaagtcatcagcagcaccagaagcgccatcgcatggtttgcttgttggtctgtttaattgctgtactttacgtaacagagatcacactagattaaatgatgttttggttattttatttatgctgcagcagttttggcgactagcttgtattctttttgtaacggtatgggttggtgacgatgagattatgtacgttcaaacatatttaattgatggtctgatggccttaatcact

SEQ ID NO: 36947 - DNA, 2068 bp, Zea Mays
gcggaaacgaagcaagggcaaacgagccgttctctcccccgcgccgccgacgcaagcagccgccacggagatggaggccgaggcgtccgtccccgccacggactacgtctacgacgcgctcccgggcctgcacctggccttctcaccggaggagacgctcgatgacgccgccgcggggcaggacgaggacgatgcgaccgcgacatacgccgtcttccgcaacgagataacggaggctggagatgtgctcgcggacatccctgctgcggacttcttctcactcgacgtctccacctctgcctccgtcgagcccgagcccgagcccgagccgccatccccggcgcccacagctgccgcggcaacgccctctatctcccgtgctttggaggaccagccgccgcagggctcggagcgcgcgtggttcaggggagggaggcggttcaggagccccatgcttcagctacacaaggagatcctggacttctgtgattttatctcaccttctactgaagagcaatcttcacgagcagctgctgtgcaagatgtctctgatgttgtcaaacatatatggccacagtgcaaggtggaagtttttggatctttcaggacaggtctctatctaccaacaagtgatatagatgttgtgatatttgaatccagagttaagactcctcaagttggtctatatgctcttgcaaaagcattatcccagaaaggtgttgctaaaaaaatacaggtaatagcaaaggcacgtgtgccaattgtgaagtttgtggaaagaaagagtggaatagcttttgacatcagctttgatatagatggtggcccacaggcagcagatttcatcaaggatgctgtgaagaagttgcctgctttaagacctttatgtatgattctgaaagtttttctgcatcagagagagctcaacgaggtctataccggtggaattggatcatatgctcttcttacgatgttgattacacatttacagttggtctggggaggaaaagatattctcgggtatcatcggtccaaggagcacaatctgggaattcttttggttttttgatttttatggacgcaagttgaacaactgggatgtcggagtatcatgcaattcttcaaggacctttttcttgaagagtgataaagactttatgaatcatgaccggccacatcttttagcgattcaggatcctatggcaccagataatgatatcggaaagaattcctttaactactttaaggtgaaatcagcattttccaaggcgtactctgtgttaactgatgcaaacttgtttattagtttgggacataataggagcattctgggtaccattgtgagaccagattcagttctccttgaccggaaaggctggaacaatgaagatatgttagcggaaccctgggagccgatcacccaacagtttgacaccgagaatgatgcagtatacaattggcatgtgatagacgaggatgaaccattgcccagaaatagtcaatccacatccgaggacactagttcgtcaccatctaaaaaacggaagtccccaaaatcaagacggaaatcgcgaaagaagtcgaaggctactgcctcaggcagtagtgatgttgcaaatgggttcagaaaggatagatcatccaagcgggaagcgggaagcagcaaacggaggaaagggccaaaggagtacgacagattcacgaatacactcccaaagtacacacatgttagcaagtggtaacttatagcatttatagtctggtcgcaaaggtccagcaatttgacagtgagaagagtatcatgtcacattatggcatgcgatgtgaatgacggaagtcatcagcagcaccagaagcgccatcgcatggtttgcttgttggtctgtttaattgctgtactttacgtaacagagatcacactagattaaatgatgttttggttattttatttatgctgcagcagttttggcgactagcttgtattctttttgtaacggtatgggttggtgacgatgagattatgtacgttcaaacatatttaattgatggtctgatggccttaatcact

SEQ ID NO: 36948 - DNA, 2104 bp, Zea Mays
cgcgaagcgacgaacgcgtggcctcggccgtcaccgtcagcgcggaaacgaagcaagggcaaacgagccgttctctcccccgcgccgccgacgcaagcagccgccacggagatggaggccgaggcgtccgtccccgccacggactacgtctacgacgcgctcccgggcctgcacctggccttctcaccggaggagacgctcgatgacgccgccgcggggcaggacgaggacgatgcgaccgcgacatacgccgtcttccgcaacgagataacggaggctggagatgtgctcgcggacatccctgctgcggacttcttctcactcgacgtctccacctctgcctccgtcgagcccgagcccgagcccgagccgccatccccggcgcccacagctgccgcggcaacgccctctatctcccgtgctttggaggaccagccgccgcagggctcggagcgcgcgtggttcaggggagggaggcggttcaggagccccatgcttcagctacacaaggagatcctggacttctgtgattttatctcaccttctactgaagagcaatcttcacgagcagctgctgtgcaagatgtctctgatgttgtcaaacatatatggccacagtgcaaggtggaagtttttggatctttcaggacaggtctctatctaccaacaagtgatatagatgttgtgatatttgaatccagagttaagactcctcaagttggtctatatgctcttgcaaaagcattatcccagaaaggtgttgctaaaaaaatacaggtaatagcaaaggcacgtgtgccaattgtgaagtttgtggaaagaaagagtggaatagcttttgacatcagctttgatatagatggtggcccacaggcagcagatttcatcaaggatgctgtgaagaagttgcctgctttaagacctttatgtatgattctgaaagtttttctgcatcagagagagctcaacgaggtctataccggtggaattggatcatatgctcttcttacgatgttgattacacatttacagttggtctggggaggaaaagatattctcgggtatcatcggtccaaggagcacaatctgggaattcttttggtcaggttttttgatttttatggacgcaagttgaacaactgggatgtcggagtatcatgcaattcttcaaggacctttttcttgaagagtgataaagactttatgaatcatgaccggccacatcttttagcgattcaggatcctatggcaccagataatgatatcggaaagaattcctttaactactttaagcattttccaaggcgtactctgtgttaactgatgcaaacttgtttattagtttgggacataataggagcattctgggtaccattgtgagaccagattcagttctccttgaccggaaaggctggaacaatgaagatatgttagcggaaccctgggagccgatcacccaacagtttgacaccgagaatgatgcagtatacaattggcatgtgatagacgaggatgaaccattgcccagaaatagtcaatccacatccgaggacactagttcgtcaccatctaaaaaacggaagtccccaaaatcaagacggaaatcgcgaaagaagtcgaaggctactgcctcaggcagtagtgatgttgcaaatgggttcagaaaggatagatcatccaagcgggaagcgggaagcagcaaacggaggaaagggccaaaggagtacgacagattcacgaatacactcccaaagtacacacatgttagcaagtggtaacttatagcatttatagtctggtcgcaaaggtccagcaatttgacagtgagaagagtatcatgtcacattatggcatgcgatgtgaatgacggaagtcatcagcagcaccagaagcgccatcgcatggtttgcttgttggtctgtttaattgctgtactttacgtaacagagatcacactagattaaatgatgttttggttattttatttatgctgcagcagttttggcgactagcttgtattctttttgtaacggtatgggttggtgacgatgagattatgtacgttcaaacatatttaattgatggtctgatggccttaatcact

SEQ ID NO: 36949 - DNA, 2151 bp, Zea Mays
gcgcgcatcagaagccctaaatccatggaccatggctcgcgaagcgacgaacgcgtggcctcggccgtcaccgtcagcgcggaaacgaagcaagggcaaacgagccgttctctcccccgcgccgccgacgcaagcagccgccacggagatggaggccgaggcgtccgtccccgccacggactacgtctacgacgcgctcccgggcctgcacctggccttctcaccggaggagacgctcgatgacgccgccgcggggcaggacgaggacgatgcgaccgcgacatacgccgtcttccgcaacgagataacggaggctggagatgtgctcgcggacatccctgctgcggacttcttctcactcgacgtctccacctctgcctccgtcgagcccgagcccgagcccgagccgccatccccggcgcccacagctgccgcggcaacgccctctatctcccgtgctttggaggaccagccgccgcagggctcggagcgcgcgtggttcaggggagggaggcggttcaggagccccatgcttcagctacacaaggagatcctggacttctgtgattttatctcaccttctactgaagagcaatcttcacgagcagctgctgtgcaagatgtctctgatgttgtcaaacatatatggccacagtgcaaggtggaagtttttggatctttcaggacaggtctctatctaccaacaagtgatatagatgttgtgatatttgaatccagagttaagactcctcaagttggtctatatgctcttgcaaaagcattatcccagaaaggtgttgctaaaaaaatacaggtaatagcaaaggcacgtgtgccaattgtgaagtttgtggaaagaaagagtggaatagcttttgacatcagctttgatatagatggtggcccacaggcagcagatttcatcaaggatgctgtgaagaagttgcctgctttaagacctttatgtatgattctgaaagtttttctgcatcagagagagctcaacgaggtctataccggtggaattggatcatatgctcttcttacgatgttgattacacatttacagttggtctggggaggaaaagatattctcgggtatcatcggtccaaggagcacaatctgggaattcttttggtcaggttttttgatttttatggacgcaagttgaacaactgggatgtcggagtatcatgcaattcttcaaggacctttttcttgaagagtgataaagactttatgaatcatgaccggccacatcttttagcgattcaggatcctatggcaccagataatgatatcggaaagaattcctttaactactttaaggtgaaatcagcattttccaaggcgtactctgtgttaactgatgcaaacttgtttattagtttgggacataataggagcattctgggtaccattgtgagaccagattcagttctccttgaccggaaaggctggaacaatgaagatatgttagcggaaccctgggagccgatcacccaacagtttgacaccgagaatgatgcagtatacaattggcatgtgatagacgaggatgaaccattgcccagaaatagtcaatccacatccgaggacactagttcgtcaccatctaaaaaacggaagtccccaaaatcaagacggaaatcgcgaaagaagtcgaaggctactgcctcaggcagtagtgatgttgcaaatgggttcagaaaggatagatcatccaagcgggaagcgggaagcagcaaacggaggaaagggccaaaggagtacgacagattcacgaatacactcccaaagtacacacatgttagcaagtggtaacttatagcatttatagtctggtcgcaaaggtccagcaatttgacagtgagaagagtatcatgtcacattatggcatgcgatgtgaatgacggaagtcatcagcagcaccagaagcgccatcgcatggtttgcttgttggtctgtttaattgctgtactttacgtaacagagatcacactagattaaatgatgttttggttattttatttatgctgcagcagttttggcgactagcttgtattctttttgtaacggtatgggttggtgacgatgagattatgtacgttcaaacatatttaattgatggtctgatggccttaatcact

SEQ ID NO: 36950 - DNA, 1952 bp, Zea Mays
acgtcgaccagtacgtcgaaaaggaacacgtcgcccccatttcccacccgctttctccccctttggcctccccccctctctctctctcatctcctgccgataagaagcttcgccgccgtctcctctttctccgtcctagcaaaatcctccccgtattgagagccaaagaagaaaaaaaaaaaaggcaggaggccggcgaactacgcgaggaaaaattttctttcccgggaggctcgggagtcggacacgccacacgctttggtcaaaatcgtttccggttgttagcgcggctgctgctgccgctgctgtcgggggcgagcaggaaggggagcgaacgagcttgggcagctcaagaagaggggacgggggagggagcctgtggaaggcacctgagtacgcgtgaaggagcccgcgcgagagtaggggggaaaccaaatcgagagacatggactcggagcactggatctcgcgcctggccgccgccaagcgttactacgcggcgcagctcggccgcgtcgacgatgtgcccgggatggggacggaagaggtggagatggaggtggaggacgacggggacatggagatggagttggagatggcgctggagctcggggacgcgacgtggccggaggtcgcctgcccctactgctacgaggaccatgacgtcgcatccctctgcatccacctcgaggaggaccacccctacgagccccacgccgcgccctgccccatttgctcccaaaggattacaagggatatgcttaaccatatcaccatgcaacatggttacttgttcaagaatggtcacagatcccgtagatttattgttccagagagccatgcgatttcattattgagtcgagatctacgtggtactcatttacaggctcttctagggggtggtcatggccacagatcaaataacgcagtgaccacaaacatttccagtgatcctcttctttcatcgtttggcctgagcttctcagcatctgatgcaccagaaccatcaaaatcagcatcttctattccagacggtaccgcaatacgtaaggagacaccagttcagccttgggaatcaaggtatatattactcctgatataagtttgctagattctttatggaccacatttacgattgttctccataaatttgaagctattttattaattacttgcatatctgctgaaaacgatctcatgatgaacctattgcatcttctgttctcctttagtcctttctattatccaattacctttacattggtttcttaatatatgctattgcctgaggtttggagttgcagtatgatagttcagacttccgcaaccaacgaactcttctctttcaatggaaataatcttagtcttaaattgaattcattgagcaagcggttctttgatatttccagcacctctgcttaaaactaaatcacaagaagggtacactgacagtattgattcatctctcacgagcgaggaaagggagcaaaagcggaaacaggccaccgggagggcaacctttgtgcaaggcctagtgatgtctactctattcggagattgatcgctcaagcagccctaggttcttgcacttgctagatcggctctttctcctgcctggtccgtcgtcagatagtgctccacccggttcggactctgatggcagggaaaattcgccccaggaaacttagccgcgttcacctttttttttttcagaaaagtgcgccgttgattctagcatgatgcagcttgatttaagctagctgttgctgtacctgtacctttgtttttatcaatttatcggccagcaattcttatctgtaactcactggtacatcgtgttcgttaccaacatacatggtagctgtggcatctgcttacacaatgcaagaaaagacttgaaaattgctgctttcgtgaaggccccaaaaccacgcttgtccacgtgaacgcga

SEQ ID NO: 36951 - DNA, 1502 bp, Zea Mays
acgtcgaccagtacgtcgaaaaggaacacgtcgcccccatttcccacccgctttctccccctttggcctccccccctctctctctctcatctcctgccgataagaagcttcgccgccgtctcctctttctccgtcctagcaaaatcctccccgtattgagagccaaagaagaaaaaaaaaaaaggcaggaggccggcgaactacgcgaggaaaaattttctttcccgggaggctcgggagtcggacacgccacacgctttggtcaaaatcgtttccggttgttagcgcggctgctgctgccgctgctgtcgggggcgagcaggaaggggagcgaacgagcttgggcagctcaagaagaggggacgggggagggagcctgtggaaggcacctgagtacgcgtgaaggagcccgcgcgagagtaggggggaaaccaaatcgagagacatggactcggagcactggatctcgcgcctggccgccgccaagcgttactacgcggcgcagctcggccgcgtcgacgatgtgcccgggatggggacggaagaggtggagatggaggtggaggacgacggggacatggagatggagttggagatggcgctggagctcggggacgaccacccctacgagccccacgccgcgccctgccccatttgctcccaaaggattacaagggatatgcttaaccatatcaccatgcaacatggttacttgttcaagaatggtcacagatcccgtagatttattgttccagagagccatgcgatttcattattgagtcgagatctacgtggtactcatttacaggctcttctagggggtggtcatggccacagatcaaataacgcagtgaccacaaacatttccagtgatcctcttctttcatcgtttggcctgagcttctcagcatctgatgcaccagaaccatcaaaatcagcatcttctattccagacggtaccgcaatacgtaaggagacaccagttcagccttgggaatcaagtattgattcatctctcacgagcgaggaaagggagcaaaagcggaaacaggccaccgggagggcaacctttgtgcaaggcctagtgatgtctactctattcggagattgatcgctcaagcagccctaggttcttgcacttgctagatcggctctttctcctgcctggtccgtcgtcagatagtgctccacccggttcggactctgatggcagggaaaattcgccccaggaaacttagccgcgttcacctttttttttttcagaaaagtgcgccgttgattctagcatgatgcagcttgatttaagctagctgttgctgtacctgtacctttgtttttatcaatttatcggccagcaattcttatctgtaactcactggtacatcgtgttcgttaccaacatacatggtagctgtggcatctgcttacacaatgcaagaaaagacttgaaaattgctgctttcgtgaaggccccaaaaccacgcttgtccacgtgaacgcga

SEQ ID NO: 36952 - DNA, 1666 bp, Zea Mays
acgtcgaccagtacgtcgaaaaggaacacgtcgcccccatttcccacccgctttctccccctttggcctccccccctctctctctctcatctcctgccgataagaagcttcgccgccgtctcctctttctccgtcctagcaaaatcctccccgtattgagagccaaagaagaaaaaaaaaaaaggcaggaggccggcgaactacgcgaggaaaaattttctttcccgggaggctcgggagtcggacacgccacacgctttggtcaaaatcgtttccggttgttagcgcggctgctgctgccgctgctgtcgggggcgagcaggaaggggagcgaacgagcttgggcagctcaagaagaggggacgggggagggagcctgtggaaggcacctgagtacgcgtgaaggagcccgcgcgagagtaggggggaaaccaaatcgagagacatggactcggagcactggatctcgcgcctggccgccgccaagcgttactacgcggcgcagctcggccgcgtcgacgatgtgcccgggatggggacggaagaggtggagatggaggtggaggacgacggggacatggagatggagttggagatggcgctggagctcggggacgcgacgtggccggaggtcgcctgcccctactgctacgaggaccatgacgtcgcatccctctgcatccacctcgaggaggaccacccctacgagccccacgccgcgccctgccccatttgctcccaaaggattacaagggatatgcttaaccatatcaccatgcaacatggttacttgttcaagaatggtcacagatcccgtagatttattgttccagagagccatgcgatttcattattgagtcgagatctacgtgtgatcctcttctttcatcgtttggcctgagcttctcagcatctgatgcaccagaaccatcaaaatcagcatcttctattccagacggtaccgcaatacgtaaggagacaccagttcagccttgggaatcaaggtttggagttgcagtatgatagttcagacttccgcaaccaacgaactcttctctttcaatggaaataatcttagtcttaaattgaattcattgagcaagcggttctttgatatttccagcacctctgcttaaaactaaatcacaagaagggtacactgacagtattgattcatctctcacgagcgaggaaagggagcaaaagcggaaacaggccaccgggagggcaacctttgtgcaaggcctagtgatgtctactctattcggagattgatcgctcaagcagccctaggttcttgcacttgctagatcggctctttctcctgcctggtccgtcgtcagatagtgctccacccggttcggactctgatggcagggaaaattcgccccaggaaacttagccgcgttcacctttttttttttcagaaaagtgcgccgttgattctagcatgatgcagcttgatttaagctagctgttgctgtacctgtacctttgtttttatcaatttatcggccagcaattcttatctgtaactcactggtacatcgtgttcgttaccaacatacatggtagctgtggcatctgcttacacaatgcaagaaaagacttgaaaattgctgctttcgtgaaggccccaaaaccacgcttgtccacgtgaacgcga

SEQ ID NO: 36953 - DNA, 2079 bp, Zea Mays
atggacttgtgtggccatggtgggaggtgttggcttgccagagaacgagaaaggaaagaccgaggaaggaggggggcctttgattctttattggctgccctcgatacacgtggcacccgggaggcacagctgcattcaatgttgcaagtgatcgagccaaccttcaaggaagctattaaaagaaatgtgagtatagaattatctgctggaaggtatccaaagaatggagctactgacatgataagggcaaattatcacagtgaggttggaagctcaagcagtactcctagtgctacatctgacagtataacagcatattctgattcttttaaagtagagcttgggcgtaatgattttgagaagacagctatctcaaaaagggcagatatatttttaaaatggatgtggagggaattctacaatcaggaattgacatgtgccatgaaatacggcaagaaaagatgctctgaattgttgcattcgtgtaattgctgctatcagatttacctagcagaagaaaggcactgttcttcttgccataagactttcaaatccatttacaatttttctgatcatacaacacaatgcgaagagaaacagagaacagaacctttctggaacatgcaaaacactgattattctgtcccaataggaatggcatatataccatcagaagcacttcaaccattttggactgatgtgtatcgaaaatcttggagtgtgaagctgtacactaccaaatctattgctgaaatattccagcttttgactgttctggaaggtgcaataagaccagattgcctctcttctgattttgaaacaaatggatagagatgatggaggtttcatgaaatttccgtcaaggtatacagttgctaagagcaaacaagaaacaacacctgaaacagctggtttggatctgtatgatggaaggtggcttcctggtagtggccgtaggggtcgtggacgtggaagtagaggaggtagcaggggaggcagaggtcgaagtcgaggtggaaggatcccaagaggtgttagcagctcatcaaggatcgagttcaagggtggtattgttgcttctgataaagcgccaaggaagaatgtacgccgagggcgtggtcgtggtcgtggtcgtagacgtggacgtcgaactgtgaggcctcggcagccatctgttggcagagccagatcaattccaaaggaaaatttgttgggaagctttagcatgcttagcagctcaaaggctgctaccattgaggagtctccacgaagctctggcgcagacgagtggggcttggagaccagaacgacatacactgaatgtgatgagaacagctctggatcacagtcagaagataacgaggaaaatggccagcccatggatgatgattatgaagatcaagttccagattactcaataggctattctaccggctcgaggcaccatgtaatgatgtccatgatggaccatgatagtgacgaggaggatgaagatgctgaaggtgatgagaatgtggaagaagatgcagaccttgcagttgacgatgccgatgttgagatggacgaagatgatgaaattggtgatgatggagaggatggtggcgttggaggggagatgaatgcggatgaggatccggatgctacttcatattcatccgattacagcgactaagaaagcagaaataagggaaccttatcccagattcctccctcggcatggaatgcatgtagtaccgagtaggcattcccccccgttgtgagccaaaagggagcttagatgcttaggttcgaaggagcgaggaactgttttttaggcaccgcaggttttaatagaatttctgacgcattcgacgaagtgtttggttgtaccgtggtagttgtgttactggggaattccccgagttattatacaatgtgttaagacaaaatactgtcatatcgcatctggttgccatgcgtctaactggttcacggttttaccgttattgtagtccctctccacatattagagcatctccaacaacgtgacctataaaaataccttataatttaaaaataagtaaattttatagaatttag

SEQ ID NO: 36954 - DNA, 2237 bp, Zea Mays
atggacttgtgtggccatggtgggaggtgttggcttgccagagaacgagaaaggaaagaccgaggaaggaggggggcctttgattctttattggctgccctcgatacacgtggcacccgggaggcacagctgcattcaatgttgcaagtgatcgagccaaccttcaaggaagctattaaaagaaatgtgagtatagaattatctgctggaaggtatccaaagaatggagctactgacatgataagggcaaattatcacagtgaggttggaagctcaagcagtactcctagtgctacatctgacagtataacagcatattctgattcttttaaagtagagcttgggcgtaatgattttgagaagacagctatctcaaaaagggcagatatatttttaaaatggatgtggagggaattctacaatcaggaattgacatgtgccatgaaatacggcaagaaaagatgctctgaattgttgcattcgtgtaattgctgctatcagatttacctagcagaagaaaggcactgttcttcttgccataagactttcaaatccatttacaatttttctgatcatacaacacaatgcgaagagaaacagagaacagaacctttctggaacatgcaaaacactgattattctgtcccaataggaatggtattactcaagcttcagttagtttcgattgaggcatatataccatcagaagcacttcaaccattttggactgatgtgtatcgaaaatcttggagtgtgaagctgtacactaccaaatctattgctgaaatattccagcttttgactgttctggaaggtgcaataagaccagattgcctctcttctgattttgaaacaagtgagtgtctaaactcacaggttggatctgcttctgtccttccatgggttcccgacactacttcagctgttatgctccgaatgttagaccttgactcagctattttgtatgttcaaaatcaaaagatggatagagatgatggaggtttcatgaaatttccgtcaaggtatacagttgctaagagcaaacaagaaacaacacctgaaacagctggtttggatctgtatgatggaaggtggcttcctggtagtggccgtaggggtcgtggacgtggaagtagaggaggtagcaggggaggcagaggtcgaagtcgaggtggaaggatcccaagaggtgttagcagctcatcaaggatcgagttcaagggtggtattgttgcttctgataaagcgccaaggaagaatgtacgccgagggcgtggtcgtggtcgtggtcgtagacgtggacgtcgaactgtgaggcctcggcagccatctgttggcagagccagatcaattccaaaggaaaatttgttgggaagctttagcatgcttagcagctcaaaggctgctaccattgaggagtctccacgaagctctggcgcagacgagtggggcttggagaccagaacgacatacactgaatgtgatgagaacagctctggatcacagtcagaagataacgaggaaaatggccagcccatggatgatgattatgaagatcaagttccagattactcaataggctattctaccggctcgaggcaccatgtaatgatgtccatgatggaccatgatagtgacgaggaggatgaagatgctgaaggtgatgagaatgtggaagaagatgcagaccttgcagttgacgatgccgatgttgagatggacgaagatgatgaaattggtgatgatggagaggatggtggcgttggaggggagatgaatgcggatgaggatccggatgctacttcatattcatccgattacagcgactaagaaagcagaaataagggaaccttatcccagattcctccctcggcatggaatgcatgtagtaccgagtaggcattcccccccgttgtgagccaaaagggagcttagatgcttaggttcgaaggagcgaggaactgttttttaggcaccgcaggttttaatagaatttctgacgcattcgacgaagtgtttggttgtaccgtggtagttgtgttactggggaattccccgagttattatacaatgtgttaagacaaaatactgtcatatcgcatctggttgccatgcgtctaactggttcacggttttaccgttattgtagtccctctccacatattagagcatctccaacaacgtgacctataaaaataccttataatttaaaaataagtaaattttatagaatttag

SEQ ID NO: 36955 - DNA, 5209 bp, Zea Mays
catagtttgtcagcaactcagcatccatgtttgttcttactgagggcgagggagggtacttactgggaggtgaaagggatgatattatggcaacgttccagagcaacaaaagcagcctgtgcgatcttatgatgcggagatattttcttggcatgatcaaaaactcttaaaggcttcagcatttttacctaatatggaatccccatttgttccaaattcgtttactgggaagagaaaatcaccagttggtaattcagccatagttcaacctcatgttggatcacgggctgttcatgagtatcagttccttcctgagcaaccaagtgatacatatgagagggcaacccgatctcactactatgacactccagtggaagtttcaaatgctaggataccttctatcacatcaggatcacaacttctccatggatctgaggaggctgcgcctagttatgcttttcaaggtcacacatctggttctagcctgttgcctccgtccagcaggccccaagtgtttccagcagcaccaacagattatgagatgactcagtctaatagcaaccttagttctgttcctgttgaaggacagtttgatatttctcaggttgctgcatttgaaaacccacctgtatcatctgaaataatagcttatcatgatgaagatacttctcgcgtggaaagaaaacgaaaacatagtgaagaagcaaagattgcaaaggaagttgaagctcacgaaagacgaattaggaaggagcttgagaaacaagatatgttgaataaaaagagagaggagcaaaggcgcaaggaaatggagagacttgatcgtgagagaagaaaagaggaggagagattactgcgtgagaggcagcgagaagaagagaggttccaaagagagcaaaggcgcgaacatgagcgtatggagaagtttttgcagaagcaatctagacgagcagagaaacaaaggcaaaaggaggaactccgaaaagaaaaagaagcagcaaggcaaaaggctgccaatgaaagggctactgcacgtaggattgcacgggagtatatggaactggtggaagatgagcgtttggaatcaatggaattagctgctcaaaacaaagggttgccctcaatgctgtatcttgacagcgacacattgcagcagcttgattcctttcgaggcatgctaagtcaatttcctcctacaacggtgagaatgaagttgccattttctataaagccttggactggatccgaggataacgttggaaaccttttgatgtattcatataatttcatctcaggagacattttgctaactggattgcaggtgtggaaattcttaattactttcactgatgttctgggtctttgtccagttacacttgatgagtttgttcagtctcttcatgattatgattcaaggttgttgggggaactgcatattgctctgctgagatccattataaaggatattgaggatgttgctagaactccatcaattgcactgggggtgaatccaggaggtggccatccacaaattgttgaaggggcatatgcctggggattcaatatacgtagctggcaacgccatcttaatcttcttacatggcctgagatattaagacagtttgctttatctgctggttttggacctcaattaaagaaaaggaccgtagaagattcttactatcgtaatgataatgagggtcatgatggtgagaatgttatattgacgattcgaaatggtacagcagcagtgaatgctgctgctaagatgaaagaaagaggttacaccaatcgccgtagatcccgccaccgtctcactcctggaactgtaaaatttgccgctttccacgtgctttcgcttgaagggagcaatggtctcacaatattggaagtagcagaaaaaattcagaaatctggattgagagacctcacaacaagcaagacacctgaggcatccatagctgctgccttgtctagggatacaaagctttttgagagaactgctccttcaacatattgtgtgaagtcgccttatagaaaagatccggctgattctgaggctgtgttgtcagcagcgcgtgaaagaattagggcttttcagaatgtgctttctgactctgaagctgaaaaggaggtagatgaagctgagagggatgatgattctgactgcgatgatggtgatgatgaccctgatggtgatgatgtgaatactgaggtggaagacgacaaggatcctcttcttgctgtcaagtcacaagatgaagtaccgagtacaactacagttattggcataaaggccaatttagatggtgtgggtaatgcattgaactcatcaagtagttttactaaatcagcaaaaggcgctcctctcccttctttaggcaggtccaatgcagcagatacttctaatgatttgcctcttggagtctcatcagctaatcatgaagtagtacctgatgattctgaaaatacacaaattgatgaaagcaatcaagccgagccttgggtacgtgcactagcagaaggtgactactgtgaccttagtgttgaagaacgccttaacgcactggttgctcttgttggtgttgccactgaagggaactctattcgtgctgtacttgaggagcgtttggagttagcaaatgccttaaagaagcaaatgtgggcagaagcgcaacttgacaagaggcgtttcaaggaagaatttactagcagagtacaatataactctgacatgggtttgaagcctgatatatatcaagaaaacaacgtgacagagattacttcaactccagcgtgtgatgcttatagagagaatgatgaacatgtcgggacaatcaacaattgtgagatgcttgatcagcataatcagggtaatgctggtagtctaccttatgagagaaatggcgtatgccaggaaatcctcgcaaccccagatacttcgtatgttcagcagtatgcttatgctgataaaaggcgatctcagttgaaatcgtacattggtcaccgggcagagcagctttatgtttacagatccttgcccctaggtcaggatcggcggcgaaacaggtattggcagtttacaacttcagcatcaccaaatgaccctggctcaggaagaatcttttttgaatccaaagatggatattggagagttatcgactcagaggaggcctttgattctttattggctgccctcgatacacgtggcacccgggaggcacagctgcattcaatgttgcaagtgatcgagccaaccttcaaggaagctattaaaagaaatgtgagtatagaattatctgctggaaggtatccaaagaatggagctactgacatgataagggcaaattatcacagtgaggttggaagctcaagcagtactcctagtgctacatctgacagtataacagcatattctgattcttttaaagtagagcttgggcgtaatgattttgagaagacagctatctcaaaaagggcagatatatttttaaaatggatgtggagggaattctacaatcaggaattgacatgtgccatgaaatacggcaagaaaagatgctctgaattgttgcattcgtgtaattgctgctatcagatttacctagcagaagaaaggcactgttcttcttgccataagactttcaaatccatttacaatttttctgatcatacaacacaatgcgaagagaaacagagaacagaacctttctggaacatgcaaaacactgattattctgtcccaataggaatggtattactcaagcttcagttagtttcgattgaggcatatataccatcagaagcacttcaaccattttggactgatgtgtatcgaaaatcttggagtgtgaagctgtacactaccaaatctattgctgaaatattccagcttttgactgttctggaaggtgcaataagaccagattgcctctcttctgattttgaaacaaatggatagagatgatggaggtttcatgaaatttccgtcaaggtatacagttgctaagagcaaacaagaaacaacacctgaaacagctggtttggatctgtatgatggaaggtggcttcctggtagtggccgtaggggtcgtggacgtggaagtagaggaggtagcaggggaggcagaggtcgaagtcgaggtggaaggatcccaagaggtgttagcagctcatcaaggatcgagttcaagggtggtattgttgcttctgataaagcgccaaggaagaatgtacgccgagggcgtggtcgtggtcgtggtcgtagacgtggacgtcgaactgtgaggcctcggcagccatctgttggcagagccagatcaattccaaaggaaaatttgttgggaagctttagcatgcttagcagctcaaaggctgctaccattgaggagtctccacgaagctctggcgcagacgagtggggcttggagaccagaacgacatacactgaatgtgatgagaacagctctggatcacagtcagaagataacgaggaaaatggccagcccatggatgatgattatgaagatcaagttccagattactcaataggctattctaccggctcgaggcaccatgtaatgatgtccatgatggaccatgatagtgacgaggaggatgaagatgctgaaggtgatgagaatgtggaagaagatgcagaccttgcagttgacgatgccgatgttgagatggacgaagatgatgaaattggtgatgatggagaggatggtggcgttggaggggagatgaatgcggatgaggatccggatgctacttcatattcatccgattacagcgactaagaaagcagaaataagggaaccttatcccagattcctccctcggcatggaatgcatgtagtaccgagtaggcattcccccccgttgtgagccaaaagggagcttagatgcttaggttcgaaggagcgaggaactgttttttaggcaccgcaggttttaatagaatttctgacgcattcgacgaagtgtttggttgtaccgtggtagttgtgttactggggaattccccgagttattatacaatgtgttaagacaaaatactgtcatatcgcatctggttgccatgcgtctaactggttcacggttttaccgttattgtagtccctctccacatattagagcatctccaacaacgtgacctataaaaataccttataatttaaaaataagtaaattttatagaatttag

SEQ ID NO: 36956 - DNA, 5320 bp, Zea Mays
gcaaggcgagcctcgccccaactagatctacccccatagtttgtcagcaactcagcatccatgtttgttcttactgagggcgagggagggtacttactgggaggtgaaagggatgatattatggcaacgttccagagcaacaaaagcagcctgtgcgatcttatgatgcggagatattttcttggcatgatcaaaaactcttaaaggcttcagcatttttacctaatatggaatccccatttgttccaaattcgtttactgggaagagaaaatcaccagttggtaattcagccatagttcaacctcatgttggatcacgggctgttcatgagtatcagttccttcctgagcaaccaagtgatacatatgagagggcaacccgatctcactactatgacactccagtggaagtttcaaatgctaggataccttctatcacatcaggatcacaacttctccatggatctgaggaggctgcgcctagttatgcttttcaaggtcacacatctggttctagcctgttgcctccgtccagcaggccccaagtgtttccagcagcaccaacagattatgagatgactcagtctaatagcaaccttagttctgttcctgttgaaggacagtttgatatttctcaggttgctgcatttgaaaacccacctgtatcatctgaaataatagcttatcatgatgaagatacttctcgcgtggaaagaaaacgaaaacatagtgaagaagcaaagattgcaaaggaagttgaagctcacgaaagacgaattaggaaggagcttgagaaacaagatatgttgaataaaaagagagaggagcaaaggcgcaaggaaatggagagacttgatcgtgagagaagaaaagaggaggagagattactgcgtgagaggcagcgagaagaagagaggttccaaagagagcaaaggcgcgaacatgagcgtatggagaagtttttgcagaagcaatctagacgagcagagaaacaaaggcaaaaggaggaactccgaaaagaaaaagaagcagcaaggcaaaaggctgccaatgaaagggctactgcacgtaggattgcacgggagtatatggaactggtggaagatgagcgtttggaatcaatggaattagctgctcaaaacaaagggttgccctcaatgctgtatcttgacagcgacacattgcagcagcttgattcctttcgaggcatgctaagtcaatttcctcctacaacggtgagaatgaagttgccattttctataaagccttggactggatccgaggataacgttggaaaccttttgatggtgtggaaattcttaattactttcactgatgttctgggtctttgtccagttacacttgatgagtttgttcagtctcttcatgattatgattcaaggttgttgggggaactgcatattgctctgctgagatccattataaaggatattgaggatgttgctagaactccatcaattgcactgggggtgaatccaggaggtggccatccacaaattgttgaaggggcatatgcctggggattcaatatacgtagctggcaacgccatcttaatcttcttacatggcctgagatattaagacagtttgctttatctgctggttttggacctcaattaaagaaaaggaccgtagaagattcttactatcgtaatgataatgagggtcatgatggtgagaatgttatattgacgattcgaaatggtacagcagcagtgaatgctgctgctaagatgaaagaaagaggttacaccaatcgccgtagatcccgccaccgtctcactcctggaactgtaaaatttgccgctttccacgtgctttcgcttgaagggagcaatggtctcacaatattggaagtagcagaaaaaattcagaaatctggattgagagacctcacaacaagcaagacacctgaggcatccatagctgctgccttgtctagggatacaaagctttttgagagaactgctccttcaacatattgtgtgaagtcgccttatagaaaagatccggctgattctgaggctgtgttgtcagcagcgcgtgaaagaattagggcttttcagaatgtgctttctgactctgaagctgaaaaggaggtagatgaagctgagagggatgatgattctgactgcgatgatggtgatgatgaccctgatggtgatgatgtgaatactgaggtggaagacgacaaggatcctcttcttgctgtcaagtcacaagatgaagtaccgagtacaactacagttattggcataaaggccaatttagatggtgtgggtaatgcattgaactcatcaagtagttttactaaatcagcaaaaggcgctcctctcccttctttaggcaggtccaatgcagcagatacttctaatgatttgcctcttggagtctcatcagctaatcatgaagtagtacctgatgattctgaaaatacacaaattgatgaaagcaatcaagccgagccttgggtacgtgcactagcagaaggtgactactgtgaccttagtgttgaagaacgccttaacgcactggttgctcttgttggtgttgccactgaagggaactctattcgtgctgtacttgaggagcgtttggagttagcaaatgccttaaagaagcaaatgtgggcagaagcgcaacttgacaagaggcgtttcaaggaagaatttactagcagagtacaatataactctgacatgggtttgaagcctgatatatatcaagaaaacaacgtgacagagattacttcaactccagcgtgtgatgcttatagagagaatgatgaacatgtcgggacaatcaacaattgtgagatgcttgatcagcataatcagggtaatgctggtagtctaccttatgagagaaatggcgtatgccaggaaatcctcgcaaccccagatacttcgtatgttcagcagtatgcttatgctgataaaaggcgatctcagttgaaatcgtacattggtcaccgggcagagcagctttatgtttacagatccttgcccctaggtcaggatcggcggcgaaacaggtattggcagtttacaacttcagcatcaccaaatgaccctggctcaggaagaatcttttttgaatccaaagatggatattggagagttatcgactcagaggaggcctttgattctttattggctgccctcgatacacgtggcacccgggaggcacagctgcattcaatgttgcaagtgatcgagccaaccttcaaggaagctattaaaagaaatgtgagtatagaattatctgctggaaggtatccaaagaatggagctactgacatgataagggcaaattatcacagtgaggttggaagctcaagcagtactcctagtgctacatctgacagtataacagcatattctgattcttttaaagtagagcttgggcgtaatgattttgagaagacagctatctcaaaaagggcagatatatttttaaaatggatgtggagggaattctacaatcaggaattgacatgtgccatgaaatacggcaagaaaagatgctctgaattgttgcattcgtgtaattgctgctatcagatttacctagcagaagaaaggcactgttcttcttgccataagactttcaaatccatttacaatttttctgatcatacaacacaatgcgaagagaaacagagaacagaacctttctggaacatgcaaaacactgattattctgtcccaataggaatggtattactcaagcttcagttagtttcgattgaggcatatataccatcagaagcacttcaaccattttggactgatgtgtatcgaaaatcttggagtgtgaagctgtacactaccaaatctattgctgaaatattccagcttttgactgttctggaaggtgcaataagaccagattgcctctcttctgattttgaaacaagtgagtgtctaaactcacaggttggatctgcttctgtccttccatgggttcccgacactacttcagctgttatgctccgaatgttagaccttgactcagctattttgtatgttcaaaatcaaaagatggatagagatgatggaggtttcatgaaatttccgtcaaggtatacagttgctaagagcaaacaagaaacaacacctgaaacagctggtttggatctgtatgatggaaggtggcttcctggtagtggccgtaggggtcgtggacgtggaagtagaggaggtagcaggggaggcagaggtcgaagtcgaggtggaaggatcccaagaggtgttagcagctcatcaaggatcgagttcaagggtggtattgttgcttctgataaagcgccaaggaagaatgtacgccgagggcgtggtcgtggtcgtggtcgtagacgtggacgtcgaactgtgaggcctcggcagccatctgttggcagagccagatcaattccaaaggaaaatttgttgggaagctttagcatgcttagcagctcaaaggctgctaccattgaggagtctccacgaagctctggcgcagacgagtggggcttggagaccagaacgacatacactgaatgtgatgagaacagctctggatcacagtcagaagataacgaggaaaatggccagcccatggatgatgattatgaagatcaagttccagattactcaataggctattctaccggctcgaggcaccatgtaatgatgtccatgatggaccatgatagtgacgaggaggatgaagatgctgaaggtgatgagaatgtggaagaagatgcagaccttgcagttgacgatgccgatgttgagatggacgaagatgatgaaattggtgatgatggagaggatggtggcgttggaggggagatgaatgcggatgaggatccggatgctacttcatattcatccgattacagcgactaagaaagcagaaataagggaaccttatcccagattcctccctcggcatggaatgcatgtagtaccgagtaggcattcccccccgttgtgagccaaaagggagcttagatgcttaggttcgaaggagcgaggaactgttttttaggcaccgcaggttttaatagaatttctgacgcattcgacgaagtgtttggttgtaccgtggtagttgtgttactggggaattccccgagttattatacaatgtgttaagacaaaatactgtcatatcgcatctggttgccatgcgtctaactggttcacggttttaccgttattgtagtccctctccacatattagagcatctccaacaacgtgacctataaaaataccttataatttaaaaataagtaaattttatagaatttag

SEQ ID NO: 36957 - DNA, 5441 bp, Zea Mays
gggagatcggtgtagctttgcatcaacctccctagaaatagtttgctgcgccgccgcctgtgctataatattttcgttgacatcagaagacaagatcagggaggcagcaaggcgagcctcgccccaactagatctacccccatagtttgtcagcaactcagcatccatgtttgttcttactgagggcgagggagggtacttactgggaggtgaaagggatgatattatggcaacgttccagagcaacaaaagcagcctgtgcgatcttatgatgcggagatattttcttggcatgatcaaaaactcttaaaggcttcagcatttttacctaatatggaatccccatttgttccaaattcgtttactgggaagagaaaatcaccagttggtaattcagccatagttcaacctcatgttggatcacgggctgttcatgagtatcagttccttcctgagcaaccaagtgatacatatgagagggcaacccgatctcactactatgacactccagtggaagtttcaaatgctaggataccttctatcacatcaggatcacaacttctccatggatctgaggaggctgcgcctagttatgcttttcaaggtcacacatctggttctagcctgttgcctccgtccagcaggccccaagtgtttccagcagcaccaacagattatgagatgactcagtctaatagcaaccttagttctgttcctgttgaaggacagtttgatatttctcaggttgctgcatttgaaaacccacctgtatcatctgaaataatagcttatcatgatgaagatacttctcgcgtggaaagaaaacgaaaacatagtgaagaagcaaagattgcaaaggaagttgaagctcacgaaagacgaattaggaaggagcttgagaaacaagatatgttgaataaaaagagagaggagcaaaggcgcaaggaaatggagagacttgatcgtgagagaagaaaagaggaggagagattactgcgtgagaggcagcgagaagaagagaggttccaaagagagcaaaggcgcgaacatgagcgtatggagaagtttttgcagaagcaatctagacgagcagagaaacaaaggcaaaaggaggaactccgaaaagaaaaagaagcagcaaggcaaaaggctgccaatgaaagggctactgcacgtaggattgcacgggagtatatggaactggtggaagatgagcgtttggaatcaatggaattagctgctcaaaacaaagggttgccctcaatgctgtatcttgacagcgacacattgcagcagcttgattcctttcgaggcatgctaagtcaatttcctcctacaacggtgagaatgaagttgccattttctataaagccttggactggatccgaggataacgttggaaaccttttgatgtattcatataatttcatctcaggagacattttgctaactggattgcaggtgtggaaattcttaattactttcactgatgttctgggtctttgtccagttacacttgatgagtttgttcagtctcttcatgattatgattcaaggttgttgggggaactgcatattgctctgctgagatccattataaaggatattgaggatgttgctagaactccatcaattgcactgggggtgaatccaggaggtggccatccacaaattgttgaaggggcatatgcctggggattcaatatacgtagctggcaacgccatcttaatcttcttacatggcctgagatattaagacagtttgctttatctgctggttttggacctcaattaaagaaaaggaccgtagaagattcttactatcgtaatgataatgagggtcatgatggtgagaatgttatattgacgattcgaaatggtacagcagcagtgaatgctgctgctaagatgaaagaaagaggttacaccaatcgccgtagatcccgccaccgtctcactcctggaactgtaaaatttgccgctttccacgtgctttcgcttgaagggagcaatggtctcacaatattggaagtagcagaaaaaattcagaaatctggattgagagacctcacaacaagcaagacacctgaggcatccatagctgctgccttgtctagggatacaaagctttttgagagaactgctccttcaacatattgtgtgaagtcgccttatagaaaagatccggctgattctgaggctgtgttgtcagcagcgcgtgaaagaattagggcttttcagaatgtgctttctgactctgaagctgaaaaggaggtagatgaagctgagagggatgatgattctgactgcgatgatggtgatgatgaccctgatggtgatgatgtgaatactgaggtggaagacgacaaggatcctcttcttgctgtcaagtcacaagatgaagtaccgagtacaactacagttattggcataaaggccaatttagatggtgtgggtaatgcattgaactcatcaagtagttttactaaatcagcaaaaggcgctcctctcccttctttaggcaggtccaatgcagcagatacttctaatgatttgcctcttggagtctcatcagctaatcatgaagtagtacctgatgattctgaaaatacacaaattgatgaaagcaatcaagccgagccttgggtacgtgcactagcagaaggtgactactgtgaccttagtgttgaagaacgccttaacgcactggttgctcttgttggtgttgccactgaagggaactctattcgtgctgtacttgaggagcgtttggagttagcaaatgccttaaagaagcaaatgtgggcagaagcgcaacttgacaagaggcgtttcaaggaagaatttactagcagagtacaatataactctgacatgggtttgaagcctgatatatatcaagaaaacaacgtgacagagattacttcaactccagcgtgtgatgcttatagagagaatgatgaacatgtcgggacaatcaacaattgtgagatgcttgatcagcataatcagggtaatgctggtagtctaccttatgagagaaatggcgtatgccaggaaatcctcgcaaccccagatacttcgtatgttcagcagtatgcttatgctgataaaaggcgatctcagttgaaatcgtacattggtcaccgggcagagcagctttatgtttacagatccttgcccctaggtcaggatcggcggcgaaacaggtattggcagtttacaacttcagcatcaccaaatgaccctggctcaggaagaatcttttttgaatccaaagatggatattggagagttatcgactcagaggaggcctttgattctttattggctgccctcgatacacgtggcacccgggaggcacagctgcattcaatgttgcaagtgatcgagccaaccttcaaggaagctattaaaagaaatgtgagtatagaattatctgctggaaggtatccaaagaatggagctactgacatgataagggcaaattatcacagtgaggttggaagctcaagcagtactcctagtgctacatctgacagtataacagcatattctgattcttttaaagtagagcttgggcgtaatgattttgagaagacagctatctcaaaaagggcagatatatttttaaaatggatgtggagggaattctacaatcaggaattgacatgtgccatgaaatacggcaagaaaagatgctctgaattgttgcattcgtgtaattgctgctatcagatttacctagcagaagaaaggcactgttcttcttgccataagactttcaaatccatttacaatttttctgatcatacaacacaatgcgaagagaaacagagaacagaacctttctggaacatgcaaaacactgattattctgtcccaataggaatggcatatataccatcagaagcacttcaaccattttggactgatgtgtatcgaaaatcttggagtgtgaagctgtacactaccaaatctattgctgaaatattccagcttttgactgttctggaaggtgcaataagaccagattgcctctcttctgattttgaaacaagtgagtgtctaaactcacaggttggatctgcttctgtccttccatgggttcccgacactacttcagctgttatgctccgaatgttagaccttgactcagctattttgtatgttcaaaatcaaaagatggatagagatgatggaggtttcatgaaatttccgtcaaggtatacagttgctaagagcaaacaagaaacaacacctgaaacagctggtttggatctgtatgatggaaggtggcttcctggtagtggccgtaggggtcgtggacgtggaagtagaggaggtagcaggggaggcagaggtcgaagtcgaggtggaaggatcccaagaggtgttagcagctcatcaaggatcgagttcaagggtggtattgttgcttctgataaagcgccaaggaagaatgtacgccgagggcgtggtcgtggtcgtggtcgtagacgtggacgtcgaactgtgaggcctcggcagccatctgttggcagagccagatcaattccaaaggaaaatttgttgggaagctttagcatgcttagcagctcaaaggctgctaccattgaggagtctccacgaagctctggcgcagacgagtggggcttggagaccagaacgacatacactgaatgtgatgagaacagctctggatcacagtcagaagataacgaggaaaatggccagcccatggatgatgattatgaagatcaagttccagattactcaataggctattctaccggctcgaggcaccatgtaatgatgtccatgatggaccatgatagtgacgaggaggatgaagatgctgaaggtgatgagaatgtggaagaagatgcagaccttgcagttgacgatgccgatgttgagatggacgaagatgatgaaattggtgatgatggagaggatggtggcgttggaggggagatgaatgcggatgaggatccggatgctacttcatattcatccgattacagcgactaagaaagcagaaataagggaaccttatcccagattcctccctcggcatggaatgcatgtagtaccgagtaggcattcccccccgttgtgagccaaaagggagcttagatgcttaggttcgaaggagcgaggaactgttttttaggcaccgcaggttttaatagaatttctgacgcattcgacgaagtgtttggttgtaccgtggtagttgtgttactggggaattccccgagttattatacaatgtgttaagacaaaatactgtcatatcgcatctggttgccatgcgtctaactggttcacggttttaccgttattgtagtccctctccacatattagagcatctccaacaacgtgacctataaaaataccttataatttaaaaataagtaaattttatagaatttag

SEQ ID NO: 36958 - DNA, 6366 bp, Zea Mays
aaaaaagggggtttggtttttattggctgcacacaatggcagcagcgatccgaacccaatccccatctccgcagcgcgtgggtaataatcccagttcgagcagtcgccacacgcccgttgctgctgttcctggcttgcggcttcgccaatctccgccacacccctatcctttcccttcttcgtcgcctcacccaccaccccatccgctgcggcggtgttcgtggtgttcaagtaattgtttttggtggtgtcattattccttttcctcctcccagttcaagccatcggtgctgggtattcttcgccacggggatccagccgcacatcgattctcctttttccaccccctcgctccgcgacgcggggtataatagcgactgcgaggcatttggtgcgggcagacgctacgaggtggggtgagaaaagtttctgcgccttgctttgcagaaggtgctcggatctaggtttcaaggccgtcgatcgccgccatggacgccggcggggacgaggacggcgccgggaaggcggcgctggagagcactgccgaggccgcgaccctgccaccggcgtcaacagtggcggtcccgtccccggtcccggcttctgcgcctggggcggccacggggacctcagggtcgggggagaagccggtgaagcggatgatgaagaccccctaccagctcgaggttctggagaagacctatgcggtggagcagtacccgtcggaagctatgcggctggagctgtcggcgaagatagggctgtcggacaggcagctgcaaatgtggttctgccaccgccgcctcaaggaccgcaagccaccgtccaagcggcaacggcgggaggaagagtccgcgctagtaccagtgatgcctccaccgccagtgttaccagcacctgtgatgcctctggcaagcagtgaccttgtggtgggtgctcctgggccgtatgatgagccgctgcacccacttcactcgcgaaggggtgctgggcgtgggcggtcctcagcagtccccaggatttccatgccggatattgggaggaggtattacgagccaccaccaattatgatagcgccgcctatcccgtcgatgcagctcacgcaatatgagctccgtgtgattaattctgtggagtcacagctcggggaaccattgagggaggatggtccagcgcttggcgttaattttgatccccttcctcctggcgcctttggtgcaccgattgttccagagcaacaaaagcagcctgtgcgatcttatgatgcggagatattttcttggcatgatcaaaaactcttaaaggtatatccgtaggaaacttttaaatgcttcagcatttttacctaatatggaatccccatttgttccaaattcgtttactgggaagagaaaatcaccagttggtaattcagccatagttcaacctcatgttggatcacgggctgttcatgagtatcagttccttcctgagcaaccaagtgatacatatgagagggcaacccgatctcactactatgacactccagtggaagtttcaaatgctaggataccttctatcacatcaggatcacaacttctccatggatctgaggaggctgcgcctagttatgcttttcaaggtcacacatctggttctagcctgttgcctccgtccagcaggccccaagtgtttccagcagcaccaacagattatgagatgactcagtctaatagcaaccttagttctgttcctgttgaaggacagtttgatatttctcaggttgctgcatttgaaaacccacctgtatcatctgaaataatagcttatcatgatgaagatacttctcgcgtggaaagaaaacgaaaacatagtgaagaagcaaagattgcaaaggaagttgaagctcacgaaagacgaattaggaaggagcttgagaaacaagatatgttgaataaaaagagagaggagcaaaggcgcaaggaaatggagagacttgatcgtgagagaagaaaagaggaggagagattactgcgtgagaggcagcgagaagaagagaggttccaaagagagcaaaggcgcgaacatgagcgtatggagaagtttttgcagaagcaatctagacgagcagagaaacaaaggcaaaaggaggaactccgaaaagaaaaagaagcagcaaggcaaaaggctgccaatgaaagggctactgcacgtaggattgcacgggagtatatggaactggtggaagatgagcgtttggaatcaatggaattagctgctcaaaacaaagggttgccctcaatgctgtatcttgacagcgacacattgcagcagcttgattcctttcgaggcatgctaagtcaatttcctcctacaacggtgagaatgaagttgccattttctataaagccttggactggatccgaggataacgttggaaaccttttgatgtattcatataatttcatctcaggagacattttgctaactggattgcaggtgtggaaattcttaattactttcactgatgttctgggtctttgtccagttacacttgatgagtttgttcagtctcttcatgattatgattcaaggttgttgggggaactgcatattgctctgctgagatccattataaaggatattgaggatgttgctagaactccatcaattgcactgggggtgaatccaggaggtggccatccacaaattgttgaaggggcatatgcctggggattcaatatacgtagctggcaacgccatcttaatcttcttacatggcctgagatattaagacagtttgctttatctgctggttttggacctcaattaaagaaaaggaccgtagaagattcttactatcgtaatgataatgagggtcatgatggtgagaatgttatattgacgattcgaaatggtacagcagcagtgaatgctgctgctaagatgaaagaaagaggttacaccaatcgccgtagatcccgccaccgtctcactcctggaactgtaaaatttgccgctttccacgtgctttcgcttgaagggagcaatggtctcacaatattggaagtagcagaaaaaattcagaaatctggattgagagacctcacaacaagcaagacacctgaggcatccatagctgctgccttgtctagggatacaaagctttttgagagaactgctccttcaacatattgtgtgaagtcgccttatagaaaagatccggctgattctgaggctgtgttgtcagcagcgcgtgaaagaattagggcttttcagaatgtgctttctgactctgaagctgaaaaggaggtagatgaagctgagagggatgatgattctgactgcgatgatggtgatgatgaccctgatggtgatgatgtgaatactgaggtggaagacgacaaggatcctcttcttgctgtcaagtcacaagatgaagtaccgagtacaactacagttattggcataaaggccaatttagatggtgtgggtaatgcattgaactcatcaagtagttttactaaatcagcaaaaggcgctcctctcccttctttaggcaggtccaatgcagcagatacttctaatgatttgcctcttggagtctcatcagctaatcatgaagtagtacctgatgattctgaaaatacacaaattgatgaaagcaatcaagccgagccttgggtacgtgcactagcagaaggtgactactgtgaccttagtgttgaagaacgccttaacgcactggttgctcttgttggtgttgccactgaagggaactctattcgtgctgtacttgaggagcgtttggagttagcaaatgccttaaagaagcaaatgtgggcagaagcgcaacttgacaagaggcgtttcaaggaagaatttactagcagagtacaatataactctgacatgggtttgaagcctgatatatatcaagaaaacaacgtgacagagattacttcaactccagcgtgtgatgcttatagagagaatgatgaacatgtcgggacaatcaacaattgtgagatgcttgatcagcataatcagggtaatgctggtagtctaccttatgagagaaatggcgtatgccaggaaatcctcgcaaccccagatacttcgtatgttcagcagtatgcttatgctgataaaaggcgatctcagttgaaatcgtacattggtcaccgggcagagcagctttatgtttacagatccttgcccctaggtcaggatcggcggcgaaacaggtattggcagtttacaacttcagcatcaccaaatgaccctggctcaggaagaatcttttttgaatccaaagatggatattggagagttatcgactcagaggaggcctttgattctttattggctgccctcgatacacgtggcacccgggaggcacagctgcattcaatgttgcaagtgatcgagccaaccttcaaggaagctattaaaagaaatgtgagtatagaattatctgctggaaggtatccaaagaatggagctactgacatgataagggcaaattatcacagtgaggttggaagctcaagcagtactcctagtgctacatctgacagtataacagcatattctgattcttttaaagtagagcttgggcgtaatgattttgagaagacagctatctcaaaaagggcagatatatttttaaaatggatgtggagggaattctacaatcaggaattgacatgtgccatgaaatacggcaagaaaagatgctctgaattgttgcattcgtgtaattgctgctatcagatttacctagcagaagaaaggcactgttcttcttgccataagactttcaaatccatttacaatttttctgatcatacaacacaatgcgaagagaaacagagaacagaacctttctggaacatgcaaaacactgattattctgtcccaataggaatggtattactcaagcttcagttagtttcgattgaggcatatataccatcagaagcacttcaaccattttggactgatgtgtatcgaaaatcttggagtgtgaagctgtacactaccaaatctattgctgaaatattccagcttttgactgttctggaaggtgcaataagaccagattgcctctcttctgattttgaaacaaatggatagagatgatggaggtttcatgaaatttccgtcaaggtatacagttgctaagagcaaacaagaaacaacacctgaaacagctggtttggatctgtatgatggaaggtggcttcctggtagtggccgtaggggtcgtggacgtggaagtagaggaggtagcaggggaggcagaggtcgaagtcgaggtggaaggatcccaagaggtgttagcagctcatcaaggatcgagttcaagggtggtattgttgcttctgataaagcgccaaggaagaatgtacgccgagggcgtggtcgtggtcgtggtcgtagacgtggacgtcgaactgtgaggcctcggcagccatctgttggcagagccagatcaattccaaaggaaaatttgttgggaagctttagcatgcttagcagctcaaaggctgctaccattgaggagtctccacgaagctctggcgcagacgagtggggcttggagaccagaacgacatacactgaatgtgatgagaacagctctggatcacagtcagaagataacgaggaaaatggccagcccatggatgatgattatgaagatcaagttccagattactcaataggctattctaccggctcgaggcaccatgtaatgatgtccatgatggaccatgatagtgacgaggaggatgaagatgctgaaggtgatgagaatgtggaagaagatgcagaccttgcagttgacgatgccgatgttgagatggacgaagatgatgaaattggtgatgatggagaggatggtggcgttggaggggagatgaatgcggatgaggatccggatgctacttcatattcatccgattacagcgactaagaaagcagaaataagggaaccttatcccagattcctccctcggcatggaatgcatgtagtaccgagtaggcattcccccccgttgtgagccaaaagggagcttagatgcttaggttcgaaggagcgaggaactgttttttaggcaccgcaggttttaatagaatttctgacgcattcgacgaagtgtttggttgtaccgtggtagttgtgttactggggaattccccgagttattatacaatgtgttaagacaaaatactgtcatatcgcatctggttgccatgcgtctaactggttcacggttttaccgttattgtagtccctctccacatattagagcatctccaacaacgtgacctataaaaataccttataatttaaaaataagtaaattttatagaatttag

SEQ ID NO: 36959 - DNA, 6668 bp, Zea Mays
ccaagaaatccgagcaccagggcagctacccacgctgctaattattccgtcccatccaactctctccatcgatccagatattcctttttaatttcctttcctcgtcgcgcagcagcagcagctcgactgctcgaccacaacagcagctgccgcgcaacacaaaacacactccagactccactctcccacggagaaaaaacaaaacaaaacaaaagaaatacgaagcctgagcctctcagccagcaccccccaggcgaaaagggaacgaacgggggcggagaggaaaaaagggggtttggtttttattggctgcacacaatggcagcagcgatccgaacccaatccccatctccgcagcgcgtgggtaataatcccagttcgagcagtcgccacacgcccgttgctgctgttcctggcttgcggcttcgccaatctccgccacacccctatcctttcccttcttcgtcgcctcacccaccaccccatccgctgcggcggtgttcgtggtgttcaagtaattgtttttggtggtgtcattattccttttcctcctcccagttcaagccatcggtgctgggtattcttcgccacggggatccagccgcacatcgattctcctttttccaccccctcgctccgcgacgcggggtataatagcgactgcgaggcatttggtgcgggcagacgctacgaggtggggtgagaaaagtttctgcgccttgctttgcagaaggtgctcggatctaggtttcaaggccgtcgatcgccgccatggacgccggcggggacgaggacggcgccgggaaggcggcgctggagagcactgccgaggccgcgaccctgccaccggcgtcaacagtggcggtcccgtccccggtcccggcttctgcgcctggggcggccacggggacctcagggtcgggggagaagccggtgaagcggatgatgaagaccccctaccagctcgaggttctggagaagacctatgcggtggagcagtacccgtcggaagctatgcggctggagctgtcggcgaagatagggctgtcggacaggcagctgcaaatgtggttctgccaccgccgcctcaaggaccgcaagccaccgtccaagcggcaacggcgggaggaagagtccgcgctagtaccagtgatgcctccaccgccagtgttaccagcacctgtgatgcctctggcaagcagtgaccttgtggtgggtgctcctgggccgtatgatgagccgctgcacccacttcactcgcgaaggggtgctgggcgtgggcggtcctcagcagtccccaggatttccatgccggatattgggaggaggtattacgagccaccaccaattatgatagcgccgcctatcccgtcgatgcagctcacgcaatatgagctccgtgtgattaattctgtggagtcacagctcggggaaccattgagggaggatggtccagcgcttggcgttaattttgatccccttcctcctggcgcctttggtgcaccgattgttccagagcaacaaaagcagcctgtgcgatcttatgatgcggagatattttcttggcatgatcaaaaactcttaaaggcttcagcatttttacctaatatggaatccccatttgttccaaattcgtttactgggaagagaaaatcaccagttggtaattcagccatagttcaacctcatgttggatcacgggctgttcatgagtatcagttccttcctgagcaaccaagtgatacatatgagagggcaacccgatctcactactatgacactccagtggaagtttcaaatgctaggataccttctatcacatcaggatcacaacttctccatggatctgaggaggctgcgcctagttatgcttttcaaggtcacacatctggttctagcctgttgcctccgtccagcaggccccaagtgtttccagcagcaccaacagattatgagatgactcagtctaatagcaaccttagttctgttcctgttgaaggacagtttgatatttctcaggttgctgcatttgaaaacccacctgtatcatctgaaataatagcttatcatgatgaagatacttctcgcgtggaaagaaaacgaaaacatagtgaagaagcaaagattgcaaaggaagttgaagctcacgaaagacgaattaggaaggagcttgagaaacaagatatgttgaataaaaagagagaggagcaaaggcgcaaggaaatggagagacttgatcgtgagagaagaaaagaggaggagagattactgcgtgagaggcagcgagaagaagagaggttccaaagagagcaaaggcgcgaacatgagcgtatggagaagtttttgcagaagcaatctagacgagcagagaaacaaaggcaaaaggaggaactccgaaaagaaaaagaagcagcaaggcaaaaggctgccaatgaaagggctactgcacgtaggattgcacgggagtatatggaactggtggaagatgagcgtttggaatcaatggaattagctgctcaaaacaaagggttgccctcaatgctgtatcttgacagcgacacattgcagcagcttgattcctttcgaggcatgctaagtcaatttcctcctacaacggtgagaatgaagttgccattttctataaagccttggactggatccgaggataacgttggaaaccttttgatggtgtggaaattcttaattactttcactgatgttctgggtctttgtccagttacacttgatgagtttgttcagtctcttcatgattatgattcaaggttgttgggggaactgcatattgctctgctgagatccattataaaggatattgaggatgttgctagaactccatcaattgcactgggggtgaatccaggaggtggccatccacaaattgttgaaggggcatatgcctggggattcaatatacgtagctggcaacgccatcttaatcttcttacatggcctgagatattaagacagtttgctttatctgctggttttggacctcaattaaagaaaaggaccgtagaagattcttactatcgtaatgataatgagggtcatgatggtgagaatgttatattgacgattcgaaatggtacagcagcagtgaatgctgctgctaagatgaaagaaagaggttacaccaatcgccgtagatcccgccaccgtctcactcctggaactgtaaaatttgccgctttccacgtgctttcgcttgaagggagcaatggtctcacaatattggaagtagcagaaaaaattcagaaatctggattgagagacctcacaacaagcaagacacctgaggcatccatagctgctgccttgtctagggatacaaagctttttgagagaactgctccttcaacatattgtgtgaagtcgccttatagaaaagatccggctgattctgaggctgtgttgtcagcagcgcgtgaaagaattagggcttttcagaatgtgctttctgactctgaagctgaaaaggaggtagatgaagctgagagggatgatgattctgactgcgatgatggtgatgatgaccctgatggtgatgatgtgaatactgaggtggaagacgacaaggatcctcttcttgctgtcaagtcacaagatgaagtaccgagtacaactacagttattggcataaaggccaatttagatggtgtgggtaatgcattgaactcatcaagtagttttactaaatcagcaaaaggcgctcctctcccttctttaggcaggtccaatgcagcagatacttctaatgatttgcctcttggagtctcatcagctaatcatgaagtagtacctgatgattctgaaaatacacaaattgatgaaagcaatcaagccgagccttgggtacgtgcactagcagaaggtgactactgtgaccttagtgttgaagaacgccttaacgcactggttgctcttgttggtgttgccactgaagggaactctattcgtgctgtacttgaggagcgtttggagttagcaaatgccttaaagaagcaaatgtgggcagaagcgcaacttgacaagaggcgtttcaaggaagaatttactagcagagtacaatataactctgacatgggtttgaagcctgatatatatcaagaaaacaacgtgacagagattacttcaactccagcgtgtgatgcttatagagagaatgatgaacatgtcgggacaatcaacaattgtgagatgcttgatcagcataatcagggtaatgctggtagtctaccttatgagagaaatggcgtatgccaggaaatcctcgcaaccccagatacttcgtatgttcagcagtatgcttatgctgataaaaggcgatctcagttgaaatcgtacattggtcaccgggcagagcagctttatgtttacagatccttgcccctaggtcaggatcggcggcgaaacaggtattggcagtttacaacttcagcatcaccaaatgaccctggctcaggaagaatcttttttgaatccaaagatggatattggagagttatcgactcagaggaggcctttgattctttattggctgccctcgatacacgtggcacccgggaggcacagctgcattcaatgttgcaagtgatcgagccaaccttcaaggaagctattaaaagaaatgtgagtatagaattatctgctggaaggtatccaaagaatggagctactgacatgataagggcaaattatcacagtgaggttggaagctcaagcagtactcctagtgctacatctgacagtataacagcatattctgattcttttaaagtagagcttgggcgtaatgattttgagaagacagctatctcaaaaagggcagatatatttttaaaatggatgtggagggaattctacaatcaggaattgacatgtgccatgaaatacggcaagaaaagatgctctgaattgttgcattcgtgtaattgctgctatcagatttacctagcagaagaaaggcactgttcttcttgccataagactttcaaatccatttacaatttttctgatcatacaacacaatgcgaagagaaacagagaacagaacctttctggaacatgcaaaacactgattattctgtcccaataggaatggcatatataccatcagaagcacttcaaccattttggactgatgtgtatcgaaaatcttggagtgtgaagctgtacactaccaaatctattgctgaaatattccagcttttgactgttctggaaggtgcaataagaccagattgcctctcttctgattttgaaacaagtgagtgtctaaactcacaggttggatctgcttctgtccttccatgggttcccgacactacttcagctgttatgctccgaatgttagaccttgactcagctattttgtatgttcaaaatcaaaagatggatagagatgatggaggtttcatgaaatttccgtcaaggtatacagttgctaagagcaaacaagaaacaacacctgaaacagctggtttggatctgtatgatggaaggtggcttcctggtagtggccgtaggggtcgtggacgtggaagtagaggaggtagcaggggaggcagaggtcgaagtcgaggtggaaggatcccaagaggtgttagcagctcatcaaggatcgagttcaagggtggtattgttgcttctgataaagcgccaaggaagaatgtacgccgagggcgtggtcgtggtcgtggtcgtagacgtggacgtcgaactgtgaggcctcggcagccatctgttggcagagccagatcaattccaaaggaaaatttgttgggaagctttagcatgcttagcagctcaaaggctgctaccattgaggagtctccacgaagctctggcgcagacgagtggggcttggagaccagaacgacatacactgaatgtgatgagaacagctctggatcacagtcagaagataacgaggaaaatggccagcccatggatgatgattatgaagatcaagttccagattactcaataggctattctaccggctcgaggcaccatgtaatgatgtccatgatggaccatgatagtgacgaggaggatgaagatgctgaaggtgatgagaatgtggaagaagatgcagaccttgcagttgacgatgccgatgttgagatggacgaagatgatgaaattggtgatgatggagaggatggtggcgttggaggggagatgaatgcggatgaggatccggatgctacttcatattcatccgattacagcgactaagaaagcagaaataagggaaccttatcccagattcctccctcggcatggaatgcatgtagtaccgagtaggcattcccccccgttgtgagccaaaagggagcttagatgcttaggttcgaaggagcgaggaactgttttttaggcaccgcaggttttaatagaatttctgacgcattcgacgaagtgtttggttgtaccgtggtagttgtgttactggggaattccccgagttattatacaatgtgttaagacaaaatactgtcatatcgcatctggttgccatgcgtctaactggttcacggttttaccgttattgtagtccctctccacatattagagcatctccaacaacgtgacctataaaaataccttataatttaaaaataagtaaattttatagaatttag

SEQ ID NO: 36960 - DNA, 6816 bp, Zea Mays
cccaccagaacccagctagccagtcaaaagcacaaaaagcccaccaccgctccgcaaagatcaaaccccaagaaatccgagcaccagggcagctacccacgctgctaattattccgtcccatccaactctctccatcgatccagatattcctttttaatttcctttcctcgtcgcgcagcagcagcagctcgactgctcgaccacaacagcagctgccgcgcaacacaaaacacactccagactccactctcccacggagaaaaaacaaaacaaaacaaaagaaatacgaagcctgagcctctcagccagcaccccccaggcgaaaagggaacgaacgggggcggagaggaaaaaagggggtttggtttttattggctgcacacaatggcagcagcgatccgaacccaatccccatctccgcagcgcgtgggtaataatcccagttcgagcagtcgccacacgcccgttgctgctgttcctggcttgcggcttcgccaatctccgccacacccctatcctttcccttcttcgtcgcctcacccaccaccccatccgctgcggcggtgttcgtggtgttcaagtaattgtttttggtggtgtcattattccttttcctcctcccagttcaagccatcggtgctgggtattcttcgccacggggatccagccgcacatcgattctcctttttccaccccctcgctccgcgacgcggggtataatagcgactgcgaggcatttggtgcgggcagacgctacgaggtggggtgagaaaagtttctgcgccttgctttgcagaaggtgctcggatctaggtttcaaggccgtcgatcgccgccatggacgccggcggggacgaggacggcgccgggaaggcggcgctggagagcactgccgaggccgcgaccctgccaccggcgtcaacagtggcggtcccgtccccggtcccggcttctgcgcctggggcggccacggggacctcagggtcgggggagaagccggtgaagcggatgatgaagaccccctaccagctcgaggttctggagaagacctatgcggtggagcagtacccgtcggaagctatgcggctggagctgtcggcgaagatagggctgtcggacaggcagctgcaaatgtggttctgccaccgccgcctcaaggaccgcaagccaccgtccaagcggcaacggcgggaggaagagtccgcgctagtaccagtgatgcctccaccgccagtgttaccagcacctgtgatgcctctggcaagcagtgaccttgtggtgggtgctcctgggccgtatgatgagccgctgcacccacttcactcgcgaaggggtgctgggcgtgggcggtcctcagcagtccccaggatttccatgccggatattgggaggaggtattacgagccaccaccaattatgatagcgccgcctatcccgtcgatgcagctcacgcaatatgagctccgtgtgattaattctgtggagtcacagctcggggaaccattgagggaggatggtccagcgcttggcgttaattttgatccccttcctcctggcgcctttggtgcaccgattgttccagagcaacaaaagcagcctgtgcgatcttatgatgcggagatattttcttggcatgatcaaaaactcttaaaggcttcagcatttttacctaatatggaatccccatttgttccaaattcgtttactgggaagagaaaatcaccagttggtaattcagccatagttcaacctcatgttggatcacgggctgttcatgagtatcagttccttcctgagcaaccaagtgatacatatgagagggcaacccgatctcactactatgacactccagtggaagtttcaaatgctaggataccttctatcacatcaggatcacaacttctccatggatctgaggaggctgcgcctagttatgcttttcaaggtcacacatctggttctagcctgttgcctccgtccagcaggccccaagtgtttccagcagcaccaacagattatgagatgactcagtctaatagcaaccttagttctgttcctgttgaaggacagtttgatatttctcaggttgctgcatttgaaaacccacctgtatcatctgaaataatagcttatcatgatgaagatacttctcgcgtggaaagaaaacgaaaacatagtgaagaagcaaagattgcaaaggaagttgaagctcacgaaagacgaattaggaaggagcttgagaaacaagatatgttgaataaaaagagagaggagcaaaggcgcaaggaaatggagagacttgatcgtgagagaagaaaagaggaggagagattactgcgtgagaggcagcgagaagaagagaggttccaaagagagcaaaggcgcgaacatgagcgtatggagaagtttttgcagaagcaatctagacgagcagagaaacaaaggcaaaaggaggaactccgaaaagaaaaagaagcagcaaggcaaaaggctgccaatgaaagggctactgcacgtaggattgcacgggagtatatggaactggtggaagatgagcgtttggaatcaatggaattagctgctcaaaacaaagggttgccctcaatgctgtatcttgacagcgacacattgcagcagcttgattcctttcgaggcatgctaagtcaatttcctcctacaacggtgagaatgaagttgccattttctataaagccttggactggatccgaggataacgttggaaaccttttgatgtattcatataatttcatctcaggagacattttgctaactggattgcaggtgtggaaattcttaattactttcactgatgttctgggtctttgtccagttacacttgatgagtttgttcagtctcttcatgattatgattcaaggttgttgggggaactgcatattgctctgctgagatccattataaaggatattgaggatgttgctagaactccatcaattgcactgggggtgaatccaggaggtggccatccacaaattgttgaaggggcatatgcctggggattcaatatacgtagctggcaacgccatcttaatcttcttacatggcctgagatattaagacagtttgctttatctgctggttttggacctcaattaaagaaaaggaccgtagaagattcttactatcgtaatgataatgagggtcatgatggtgagaatgttatattgacgattcgaaatggtacagcagcagtgaatgctgctgctaagatgaaagaaagaggttacaccaatcgccgtagatcccgccaccgtctcactcctggaactgtaaaatttgccgctttccacgtgctttcgcttgaagggagcaatggtctcacaatattggaagtagcagaaaaaattcagaaatctggattgagagacctcacaacaagcaagacacctgaggcatccatagctgctgccttgtctagggatacaaagctttttgagagaactgctccttcaacatattgtgtgaagtcgccttatagaaaagatccggctgattctgaggctgtgttgtcagcagcgcgtgaaagaattagggcttttcagaatgtgctttctgactctgaagctgaaaaggaggtagatgaagctgagagggatgatgattctgactgcgatgatggtgatgatgaccctgatggtgatgatgtgaatactgaggtggaagacgacaaggatcctcttcttgctgtcaagtcacaagatgaagtaccgagtacaactacagttattggcataaaggccaatttagatggtgtgggtaatgcattgaactcatcaagtagttttactaaatcagcaaaaggcgctcctctcccttctttaggcaggtccaatgcagcagatacttctaatgatttgcctcttggagtctcatcagctaatcatgaagtagtacctgatgattctgaaaatacacaaattgatgaaagcaatcaagccgagccttgggtacgtgcactagcagaaggtgactactgtgaccttagtgttgaagaacgccttaacgcactggttgctcttgttggtgttgccactgaagggaactctattcgtgctgtacttgaggagcgtttggagttagcaaatgccttaaagaagcaaatgtgggcagaagcgcaacttgacaagaggcgtttcaaggaagaatttactagcagagtacaatataactctgacatgggtttgaagcctgatatatatcaagaaaacaacgtgacagagattacttcaactccagcgtgtgatgcttatagagagaatgatgaacatgtcgggacaatcaacaattgtgagatgcttgatcagcataatcagggtaatgctggtagtctaccttatgagagaaatggcgtatgccaggaaatcctcgcaaccccagatacttcgtatgttcagcagtatgcttatgctgataaaaggcgatctcagttgaaatcgtacattggtcaccgggcagagcagctttatgtttacagatccttgcccctaggtcaggatcggcggcgaaacaggtattggcagtttacaacttcagcatcaccaaatgaccctggctcaggaagaatcttttttgaatccaaagatggatattggagagttatcgactcagaggaggcctttgattctttattggctgccctcgatacacgtggcacccgggaggcacagctgcattcaatgttgcaagtgatcgagccaaccttcaaggaagctattaaaagaaatgtgagtatagaattatctgctggaaggtatccaaagaatggagctactgacatgataagggcaaattatcacagtgaggttggaagctcaagcagtactcctagtgctacatctgacagtataacagcatattctgattcttttaaagtagagcttgggcgtaatgattttgagaagacagctatctcaaaaagggcagatatatttttaaaatggatgtggagggaattctacaatcaggaattgacatgtgccatgaaatacggcaagaaaagatgctctgaattgttgcattcgtgtaattgctgctatcagatttacctagcagaagaaaggcactgttcttcttgccataagactttcaaatccatttacaatttttctgatcatacaacacaatgcgaagagaaacagagaacagaacctttctggaacatgcaaaacactgattattctgtcccaataggaatggtattactcaagcttcagttagtttcgattgaggcatatataccatcagaagcacttcaaccattttggactgatgtgtatcgaaaatcttggagtgtgaagctgtacactaccaaatctattgctgaaatattccagcttttgactgttctggaaggtgcaataagaccagattgcctctcttctgattttgaaacaagtgagtgtctaaactcacaggttggatctgcttctgtccttccatgggttcccgacactacttcagctgttatgctccgaatgttagaccttgactcagctattttgtatgttcaaaatcaaaagatggatagagatgatggaggtttcatgaaatttccgtcaaggtatacagttgctaagagcaaacaagaaacaacacctgaaacagctggtttggatctgtatgatggaaggtggcttcctggtagtggccgtaggggtcgtggacgtggaagtagaggaggtagcaggggaggcagaggtcgaagtcgaggtggaaggatcccaagaggtgttagcagctcatcaaggatcgagttcaagggtggtattgttgcttctgataaagcgccaaggaagaatgtacgccgagggcgtggtcgtggtcgtggtcgtagacgtggacgtcgaactgtgaggcctcggcagccatctgttggcagagccagatcaattccaaaggaaaatttgttgggaagctttagcatgcttagcagctcaaaggctgctaccattgaggagtctccacgaagctctggcgcagacgagtggggcttggagaccagaacgacatacactgaatgtgatgagaacagctctggatcacagtcagaagataacgaggaaaatggccagcccatggatgatgattatgaagatcaagttccagattactcaataggctattctaccggctcgaggcaccatgtaatgatgtccatgatggaccatgatagtgacgaggaggatgaagatgctgaaggtgatgagaatgtggaagaagatgcagaccttgcagttgacgatgccgatgttgagatggacgaagatgatgaaattggtgatgatggagaggatggtggcgttggaggggagatgaatgcggatgaggatccggatgctacttcatattcatccgattacagcgactaagaaagcagaaataagggaaccttatcccagattcctccctcggcatggaatgcatgtagtaccgagtaggcattcccccccgttgtgagccaaaagggagcttagatgcttaggttcgaaggagcgaggaactgttttttaggcaccgcaggttttaatagaatttctgacgcattcgacgaagtgtttggttgtaccgtggtagttgtgttactggggaattccccgagttattatacaatgtgttaagacaaaatactgtcatatcgcatctggttgccatgcgtctaactggttcacggttttaccgttattgtagtccctctccacatattagagcatctccaacaacgtgacctataaaaataccttataatttaaaaataagtaaattttatagaatttag

SEQ ID NO: 36961 - DNA, 6706 bp, Zea Mays
cacacgcggaccaaacgtccaaatccatccacccccaaagcaccaaatccaggtcgcaaatttcccaccagaacccagctagccagtcaaaagcacaaaaagcccaccaccgctccgcaaagatcaaaccccaagaaatccgagcaccagggcagctacccacgctgctaattattccgtcccatccaactctctccatcgatccagatattcctttttaatttcctttcctcgtcgcgcagcagcagcagctcgactgctcgaccacaacagcagctgccgcgcaacacaaaacacactccagactccactctcccacggagaaaaaacaaaacaaaacaaaagaaatacgaagcctgagcctctcagccagcaccccccaggcgaaaagggaacgaacgggggcggagaggaaaaaagggggtttggtttttattggctgcacacaatggcagcagcgatccgaacccaatccccatctccgcagcgcgtgggtaataatcccagttcgagcagtcgccacacgcccgttgctgctgttcctggcttgcggcttcgccaatctccgccacacccctatcctttcccttcttcgtcgcctcacccaccaccccatccgctgcggcggtgttcgtggtgttcaagtaattgtttttggtggtgtcattattccttttcctcctcccagttcaagccatcggtgctgggtattcttcgccacggggatccagccgcacatcgattctcctttttccaccccctcgctccgcgacgcggggtataatagcgactgcgaggcatttggtgcgggcagacgctacgaggtggggtgagaaaagtttctgcgccttgctttgcagaaggtgctcggatctaggtttcaaggccgtcgatcgccgccatggacgccggcggggacgaggacggcgccgggaaggcggcgctggagagcactgccgaggccgcgaccctgccaccggcgtcaacagtggcggtcccgtccccggtcccggcttctgcgcctggggcggccacggggacctcagggtcgggggagaagccggtgaagcggatgatgaagaccccctaccagctcgaggttctggagaagacctatgcggtggagcagtacccgtcggaagctatgcggctggagctgtcggcgaagatagggctgtcggacaggcagctgcaaatgtggttctgccaccgccgcctcaaggaccgcaagccaccgtccaagcggcaacggcgggaggaagagtccgcgctagtaccagtgatgcctccaccgccagtgttaccagcacctgtgatgcctctggcaagcagtgaccttgtggtgggtgctcctgggccgtatgatgagccgctgcacccacttcactcgcgaaggggtgctgggcgtgggcggtcctcagcagtccccaggatttccatgccggatattgggaggaggtattacgagccaccaccaattatgatagcgccgcctatcccgtcgatgcagctcacgcaatatgagctccgtgtgattaattctgtggagtcacagctcggggaaccattgagggaggatggtccagcgcttggcgttaattttgatccccttcctcctggcgcctttggtgcaccgattgttccagagcaacaaaagcagcctgtgcgatcttatgatgcggagatattttcttggcatgatcaaaaactcttaaaggcttcagcatttttacctaatatggaatccccatttgttccaaattcgtttactgggaagagaaaatcaccagttggtaattcagccatagttcaacctcatgttggatcacgggctgttcatgagtatcagttccttcctgagcaaccaagtgatacatatgagagggcaacccgatctcactactatgacactccagtggaagtttcaaatgctaggataccttctatcacatcaggatcacaacttctccatggatctgaggaggctgcgcctagttatgcttttcaaggtcacacatctggttctagcctgttgcctccgtccagcaggccccaagtgtttccagcagcaccaacagattatgagatgactcagtctaatagcaaccttagttctgttcctgttgaaggacagtttgatatttctcaggttgctgcatttgaaaacccacctgtatcatctgaaataatagcttatcatgatgaagatacttctcgcgtggaaagaaaacgaaaacatagtgaagaagcaaagattgcaaaggaagttgaagctcacgaaagacgaattaggaaggagcttgagaaacaagatatgttgaataaaaagagagaggagcaaaggcgcaaggaaatggagagacttgatcgtgagagaagaaaagaggaggagagattactgcgtgagaggcagcgagaagaagagaggttccaaagagagcaaaggcgcgaacatgagcgtatggagaagtttttgcagaagcaatctagacgagcagagaaacaaaggcaaaaggaggaactccgaaaagaaaaagaagcagcaaggcaaaaggctgccaatgaaagggctactgcacgtaggattgcacgggagtatatggaactggtggaagatgagcgtttggaatcaatggaattagctgctcaaaacaaagggttgccctcaatgctgtatcttgacagcgacacattgcagcagcttgattcctttcgaggcatgctaagtcaatttcctcctacaacggtgagaatgaagttgccattttctataaagccttggactggatccgaggataacgttggaaaccttttgatggtgtggaaattcttaattactttcactgatgttctgggtctttgtccagttacacttgatgagtttgttcagtctcttcatgattatgattcaaggttgttgggggaactgcatattgctctgctgagatccattataaaggatattgaggatgttgctagaactccatcaattgcactgggggtgaatccaggaggtggccatccacaaattgttgaaggggcatatgcctggggattcaatatacgtagctggcaacgccatcttaatcttcttacatggcctgagatattaagacagtttgctttatctgctggttttggacctcaattaaagaaaaggaccgtagaagattcttactatcgtaatgataatgagggtcatgatggtgagaatgttatattgacgattcgaaatggtacagcagcagtgaatgctgctgctaagatgaaagaaagaggttacaccaatcgccgtagatcccgccaccgtctcactcctggaactgtaaaatttgccgctttccacgtgctttcgcttgaagggagcaatggtctcacaatattggaagtagcagaaaaaattcagaaatctggattgagagacctcacaacaagcaagacacctgaggcatccatagctgctgccttgtctagggatacaaagctttttgagagaactgctccttcaacatattgtgtgaagtcgccttatagaaaagatccggctgattctgaggctgtgttgtcagcagcgcgtgaaagaattagggcttttcagaatgtgctttctgactctgaagctgaaaaggaggtagatgaagctgagagggatgatgattctgactgcgatgatggtgatgatgaccctgatggtgatgatgtgaatactgaggtggaagacgacaaggatcctcttcttgctgtcaagtcacaagatgaagtaccgagtacaactacagttattggcataaaggccaatttagatggtgtgggtaatgcattgaactcatcaagtagttttactaaatcagcaaaaggcgctcctctcccttctttaggcaggtccaatgcagcagatacttctaatgatttgcctcttggagtctcatcagctaatcatgaagtagtacctgatgattctgaaaatacacaaattgatgaaagcaatcaagccgagccttgggtacgtgcactagcagaaggtgactactgtgaccttagtgttgaagaacgccttaacgcactggttgctcttgttggtgttgccactgaagggaactctattcgtgctgtacttgaggagcgtttggagttagcaaatgccttaaagaagcaaatgtgggcagaagcgcaacttgacaagaggcgtttcaaggaagaatttactagcagagtacaatataactctgacatgggtttgaagcctgatatatatcaagaaaacaacgtgacagagattacttcaactccagcgtgtgatgcttatagagagaatgatgaacatgtcgggacaatcaacaattgtgagatgcttgatcagcataatcagggtaatgctggtagtctaccttatgagagaaatggcgtatgccaggaaatcctcgcaaccccagatacttcgtatgttcagcagtatgcttatgctgataaaaggcgatctcagttgaaatcgtacattggtcaccgggcagagcagctttatgtttacagatccttgcccctaggtcaggatcggcggcgaaacaggtattggcagtttacaacttcagcatcaccaaatgaccctggctcaggaagaatcttttttgaatccaaagatggatattggagagttatcgactcagaggaggcctttgattctttattggctgccctcgatacacgtggcacccgggaggcacagctgcattcaatgttgcaagtgatcgagccaaccttcaaggaagctattaaaagaaatgtgagtatagaattatctgctggaaggtatccaaagaatggagctactgacatgataagggcaaattatcacagtgaggttggaagctcaagcagtactcctagtgctacatctgacagtataacagcatattctgattcttttaaagtagagcttgggcgtaatgattttgagaagacagctatctcaaaaagggcagatatatttttaaaatggatgtggagggaattctacaatcaggaattgacatgtgccatgaaatacggcaagaaaagatgctctgaattgttgcattcgtgtaattgctgctatcagatttacctagcagaagaaaggcactgttcttcttgccataagactttcaaatccatttacaatttttctgatcatacaacacaatgcgaagagaaacagagaacagaacctttctggaacatgcaaaacactgattattctgtcccaataggaatggtattactcaagcttcagttagtttcgattgaggcatatataccatcagaagcacttcaaccattttggactgatgtgtatcgaaaatcttggagtgtgaagctgtacactaccaaatctattgctgaaatattccagcttttgactgttctggaaggtgcaataagaccagattgcctctcttctgattttgaaacaaatggatagagatgatggaggtttcatgaaatttccgtcaaggtatacagttgctaagagcaaacaagaaacaacacctgaaacagctggtttggatctgtatgatggaaggtggcttcctggtagtggccgtaggggtcgtggacgtggaagtagaggaggtagcaggggaggcagaggtcgaagtcgaggtggaaggatcccaagaggtgttagcagctcatcaaggatcgagttcaagggtggtattgttgcttctgataaagcgccaaggaagaatgtacgccgagggcgtggtcgtggtcgtggtcgtagacgtggacgtcgaactgtgaggcctcggcagccatctgttggcagagccagatcaattccaaaggaaaatttgttgggaagctttagcatgcttagcagctcaaaggctgctaccattgaggagtctccacgaagctctggcgcagacgagtggggcttggagaccagaacgacatacactgaatgtgatgagaacagctctggatcacagtcagaagataacgaggaaaatggccagcccatggatgatgattatgaagatcaagttccagattactcaataggctattctaccggctcgaggcaccatgtaatgatgtccatgatggaccatgatagtgacgaggaggatgaagatgctgaaggtgatgagaatgtggaagaagatgcagaccttgcagttgacgatgccgatgttgagatggacgaagatgatgaaattggtgatgatggagaggatggtggcgttggaggggagatgaatgcggatgaggatccggatgctacttcatattcatccgattacagcgactaagaaagcagaaataagggaaccttatcccagattcctccctcggcatggaatgcatgtagtaccgagtaggcattcccccccgttgtgagccaaaagggagcttagatgcttaggttcgaaggagcgaggaactgttttttaggcaccgcaggttttaatagaatttctgacgcattcgacgaagtgtttggttgtaccgtggtagttgtgttactggggaattccccgagttattatacaatgtgttaagacaaaatactgtcatatcgcatctggttgccatgcgtctaactggttcacggttttaccgttattgtagtccctctccacatattagagcatctccaacaacgtgacctataaaaataccttataatttaaaaataagtaaattttatagaatttag

SEQ ID NO: 36962 - DNA, 3654 bp, Zea Mays
actcagcatccatgtttgttcttactgagggcgagggagggtacttactgggaggtgaaagggatgatattatggcaacgttccagagcaacaaaagcagcctgtgcgatcttatgatgcggagatattttcttggcatgatcaaaaactcttaaaggcttcagcatttttacctaatatggaatccccatttgttccaaattcgtttactgggaagagaaaatcaccagttggtaattcagccatagttcaacctcatgttggatcacgggctgttcatgagtatcagttccttcctgagcaaccaagtgatacatatgagagggcaacccgatctcactactatgacactccagtggaagtttcaaatgctaggataccttctatcacatcaggatcacaacttctccatggatctgaggaggctgcgcctagttatgcttttcaaggtcacacatctggttctagcctgttgcctccgtccagcaggccccaagtgtttccagcagcaccaacagattatgagatgactcagtctaatagcaaccttagttctgttcctgttgaaggacagtttgatatttctcaggttgctgcatttgaaaacccacctgtatcatctgaaataatagcttatcatgatgaagatacttctcgcgtggaaagaaaacgaaaacatagtgaagaagcaaagattgcaaaggaagttgaagctcacgaaagacgaattaggaaggagcttgagaaacaagatatgttgaataaaaaggtattactgattctatataattgtagatgccttcctctttaaattcgtttgcaatgtgatgtctgtgcagagagaggagcaaaggcgcaaggaaatggagagacttgatcgtgagagaagaaaagaggaggagagattactgcgtgagaggcagcgagaagaagagaggttccaaagagagcaaaggcgcgaacatgagcgtatggagaagtttttgcagaagcaatctagacgagcagagaaacaaaggcaaaaggaggaactccgaaaagaaaaagaagcagcaaggcaaaaggctgccaatgaaagggctactgcacgtaggattgcacgggagtatatggaactggtggaagatgagcgtttggaatcaatggaattagctgctcaaaacaaagggttgccctcaatgctgtatcttgacagcgacacattgcagcagcttgattcctttcgaggcatgctaagtcaatttcctcctacaacggtgagaatgaagttgccattttctataaagccttggactggatccgaggataacgttggaaaccttttgatggtgtggaaattcttaattactttcactgatgttctgggtctttgtccagttacacttgatgagtttgttcagtctcttcatgattatgattcaaggttgttgggggaactgcatattgctctgctgagatccattataaaggatattgaggatgttgctagaactccatcaattgcactgggggtgaatccaggaggtggccatccacaaattgttgaaggggcatatgcctggggattcaatatacgtagctggcaacgccatcttaatcttcttacatggcctgagatattaagacagtttgctttatctgctggttttggacctcaattaaagaaaaggaccgtagaagattcttactatcgtaatgataatgagggtcatgatggtgagaatgttatattgacgattcgaaatggtacagcagcagtgaatgctgctgctaagatgaaagaaagaggttacaccaatcgccgtagatcccgccaccgtctcactcctggaactgtaaaatttgccgctttccacgtgctttcgcttgaagggagcaatggtctcacaatattggaagtagcagaaaaaattcagaaatctggattgagagacctcacaacaagcaagacacctgaggcatccatagctgctgccttgtctagggatacaaagctttttgagagaactgctccttcaacatattgtgtgaagtcgccttatagaaaagatccggctgattctgaggctgtgttgtcagcagcgcgtgaaagaattagggcttttcagaatgtgctttctgactctgaagctgaaaaggaggtagatgaagctgagagggatgatgattctgactgcgatgatggtgatgatgaccctgatggtgatgatgtgaatactgaggtggaagacgacaaggatcctcttcttgctgtcaagtcacaagatgaagtaccgagtacaactacagttattggcataaaggccaatttagatggtgtgggtaatgcattgaactcatcaagtagttttactaaatcagcaaaaggcgctcctctcccttctttaggcaggtccaatgcagcagatacttctaatgatttgcctcttggagtctcatcagctaatcatgaagtagtacctgatgattctgaaaatacacaaattgatgaaagcaatcaagccgagccttgggtacgtgcactagcagaaggtgactactgtgaccttagtgttgaagaacgccttaacgcactggttgctcttgttggtgttgccactgaagggaactctattcgtgctgtacttgaggagcgtttggagttagcaaatgccttaaagaagcaaatgtgggcagaagcgcaacttgacaagaggcgtttcaaggaagaatttactagcagagtacaatataactctgacatgggtttgaagcctgatatatatcaagaaaacaacgtgacagagattacttcaactccagcgtgtgatgcttatagagagaatgatgaacatgtcgggacaatcaacaattgtgagatgcttgatcagcataatcagggtaatgctggtagtctaccttatgagagaaatggcgtatgccaggaaatcctcgcaaccccagatacttcgtatgttcagcagtatgcttatgctgataaaaggcgatctcagttgaaatcgtacattggtcaccgggcagagcagctttatgtttacagatccttgcccctaggtcaggatcggcggcgaaacaggtattggcagtttacaacttcagcatcaccaaatgaccctggctcaggaagaatcttttttgaatccaaagatggatattggagagttatcgactcagaggagctacctgcagaggtgagcaatgagctcactctcacaactcacggctagaggtacaagaacactgagaacagagcacacacagcactagcagtctagcacaagtctgaatgtgcagcaactgaactgctttctccattgcattgtctagtatatatacaagtctagtacccaactatatggtagaatagtacatggcttagcccagtgttcaactacatgactgatgtatgccactacatagttggcctattgccatactcctatagtgcaatagatggacagcaagaactggccacaaaaccaactctctgctgcagaaaaagtcaaaagggagcagcagattgtcttacaagtaccagtgtacttcacgctaaaaaatattgggatttgatcattagagttgctagggcatttagggcttctttggcctagctatgtagtagaactttaggatggagtaaaattttctaaccaa

SEQ ID NO: 36963 - DNA, 4692 bp, Zea Mays
tgcacacaatggcagcagcgatccgaacccaatccccatctccgcagcgcgtgggtaataatcccagttcgagcagtcgccacacgcccgttgctgctgttcctggcttgcggcttcgccaatctccgccacacccctatcctttcccttcttcgtcgcctcacccaccaccccatccgctgcggcggtgttcgtggtgttcaagtaattgtttttggtggtgtcattattccttttcctcctcccagttcaagccatcggtgctgggtattcttcgccacggggatccagccgcacatcgattctcctttttccaccccctcgctccgcgacgcggggtataatagcgactgcgaggcatttggtgcgggcagacgctacgaggtggggtgagaaaagtttctgcgccttgctttgcagaaggtgctcggatctaggtttcaaggccgtcgatcgccgccatggacgccggcggggacgaggacggcgccgggaaggcggcgctggagagcactgccgaggccgcgaccctgccaccggcgtcaacagtggcggtcccgtccccggtcccggcttctgcgcctggggcggccacggggacctcagggtcgggggagaagccggtgaagcggatgatgaagaccccctaccagctcgaggttctggagaagacctatgcggtggagcagtacccgtcggaagctatgcggctggagctgtcggcgaagatagggctgtcggacaggcagctgcaaatgtggttctgccaccgccgcctcaaggaccgcaagccaccgtccaagcggcaacggcgggaggaagagtccgcgctagtaccagtgatgcctccaccgccagtgttaccagcacctgtgatgcctctggcaagcagtgaccttgtggtgggtgctcctgggccgtatgatgagccgctgcacccacttcactcgcgaaggggtgctgggcgtgggcggtcctcagcagtccccaggatttccatgccggatattgggaggaggtattacgagccaccaccaattatgatagcgccgcctatcccgtcgatgcagctcacgcaatatgagctccgtgtgattaattctgtggagtcacagctcggggaaccattgagggaggatggtccagcgcttggcgttaattttgatccccttcctcctggcgcctttggtgcaccgattgttccagagcaacaaaagcagcctgtgcgatcttatgatgcggagatattttcttggcatgatcaaaaactcttaaagagaaaatcaccagttggtaattcagccatagttcaacctcatgttggatcacgggctgttcatgagtatcagttccttcctgagcaaccaagtgatacatatgagagggcaacccgatctcactactatgacactccagtggaagtttcaaatgctaggataccttctatcacatcaggatcacaacttctccatggatctgaggaggctgcgcctagttatgcttttcaaggtcacacatctggttctagcctgttgcctccgtccagcaggccccaagtgtttccagcagcaccaacagattatgagatgactcagtctaatagcaaccttagttctgttcctgttgaaggacagtttgatatttctcaggttgctgcatttgaaaacccacctgtatcatctgaaataatagcttatcatgatgaagatacttctcgcgtggaaagaaaacgaaaacatagtgaagaagcaaagattgcaaaggaagttgaagctcacgaaagacgaattaggaaggagcttgagaaacaagatatgttgaataaaaagagagaggagcaaaggcgcaaggaaatggagagacttgatcgtgagagaagaaaagaggaggagagattactgcgtgagaggcagcgagaagaagagaggttccaaagagagcaaaggcgcgaacatgagcgtatggagaagtttttgcagaagcaatctagacgagcagagaaacaaaggcaaaaggaggaactccgaaaagaaaaagaagcagcaaggcaaaaggctgccaatgaaagggctactgcacgtaggattgcacgggagtatatggaactggtggaagatgagcgtttggaatcaatggaattagctgctcaaaacaaagggttgccctcaatgctgtatcttgacagcgacacattgcagcagcttgattcctttcgaggcatgctaagtcaatttcctcctacaacggtgagaatgaagttgccattttctataaagccttggactggatccgaggataacgttggaaaccttttgatgtattcatataatttcatctcaggagacattttgctaactggattgcaggtgtggaaattcttaattactttcactgatgttctgggtctttgtccagttacacttgatgagtttgttcagtctcttcatgattatgattcaaggttgttgggggaactgcatattgctctgctgagatccattataaaggatattgaggatgttgctagaactccatcaattgcactgggggtgaatccaggaggtggccatccacaaattgttgaaggggcatatgcctggggattcaatatacgtagctggcaacgccatcttaatcttcttacatggcctgagatattaagacagtttgctttatctgctggttttggacctcaattaaagaaaaggaccgtagaagattcttactatcgtaatgataatgagggtcatgatggtgagaatgttatattgacgattcgaaatggtacagcagcagtgaatgctgctgctaagatgaaagaaagaggttacaccaatcgccgtagatcccgccaccgtctcactcctggaactgtaaaatttgccgctttccacgtgctttcgcttgaagggagcaatggtctcacaatattggaagtagcagaaaaaattcagaaatctggattgagagacctcacaacaagcaagacacctgaggcatccatagctgctgccttgtctagggatacaaagctttttgagagaactgctccttcaacatattgtgtgaagtcgccttatagaaaagatccggctgattctgaggctgtgttgtcagcagcgcgtgaaagaattagggcttttcagaatgtgctttctgactctgaagctgaaaaggaggtagatgaagctgagagggatgatgattctgactgcgatgatggtgatgatgaccctgatggtgatgatgtgaatactgaggtggaagacgacaaggatcctcttcttgctgtcaagtcacaagatgaagtaccgagtacaactacagttattggcataaaggccaatttagatggtgtgggtaatgcattgaactcatcaagtagttttactaaatcagcaaaaggcgctcctctcccttctttaggcaggtccaatgcagcagatacttctaatgatttgcctcttggagtctcatcagctaatcatgaagtagtacctgatgattctgaaaatacacaaattgatgaaagcaatcaagccgagccttgggtacgtgcactagcagaaggtgactactgtgaccttagtgttgaagaacgccttaacgcactggttgctcttgttggtgttgccactgaagggaactctattcgtgctgtacttgaggagcgtttggagttagcaaatgccttaaagaagcaaatgtgggcagaagcgcaacttgacaagaggcgtttcaaggaagaatttactagcagagtacaatataactctgacatgggtttgaagcctgatatatatcaagaaaacaacgtgacagagattacttcaactccagcgtgtgatgcttatagagagaatgatgaacatgtcgggacaatcaacaattgtgagatgcttgatcagcataatcagggtaatgctggtagtctaccttatgagagaaatggcgtatgccaggaaatcctcgcaaccccagatacttcgtatgttcagcagtatgcttatgctgataaaaggcgatctcagttgaaatcgtacattggtcaccgggcagagcagctttatgtttacagatccttgcccctaggtcaggatcggcggcgaaacaggtattggcagtttacaacttcagcatcaccaaatgaccctggctcaggaagaatcttttttgaatccaaagatggatattggagagttatcgactcagaggagctacctgcagaggtgagcaatgagctcactctcacaactcacggctagaggtacaagaacactgagaacagagcacacacagcactagcagtctagcacaagtctgaatgtgcagcaactgaactgctttctccattgcattgtctagtatatatacaagtctagtacccaactatatggtagaatagtacatggcttagcccagtgttcaactacatgactgatgtatgccactacatagttggcctattgccatactcctatagtgcaatagatggacagcaagaactggccacaaaaccaactctctgctgcagaaaaagtcaaaagggagcagcagattgtcttacaagtaccagtgtacttcacgctaaaaaatattgggatttgatcattagagttgctagggcatttagggcttctttggcctagctatgtagtagaactttaggatggagtaaaattttctaaccaa

SEQ ID NO: 36964 - DNA, 4796 bp, Zea Mays
tacgaagcctgagcctctcagccagcaccccccaggcgaaaagggaacgaacgggggcggagaggaaaaaagggggtttggtttttattggctgcacacaatggcagcagcgatccgaacccaatccccatctccgcagcgcgtgggtaataatcccagttcgagcagtcgccacacgcccgttgctgctgttcctggcttgcggcttcgccaatctccgccacacccctatcctttcccttcttcgtcgcctcacccaccaccccatccgctgcggcggtgttcgtggtgttcaagtaattgtttttggtggtgtcattattccttttcctcctcccagttcaagccatcggtgctgggtattcttcgccacggggatccagccgcacatcgattctcctttttccaccccctcgctccgcgacgcggggtataatagcgactgcgaggcatttggtgcgggcagacgctacgaggtggggtgagaaaagtttctgcgccttgctttgcagaaggtgctcggatctaggtttcaaggccgtcgatcgccgccatggacgccggcggggacgaggacggcgccgggaaggcggcgctggagagcactgccgaggccgcgaccctgccaccggcgtcaacagtggcggtcccgtccccggtcccggcttctgcgcctggggcggccacggggacctcagggtcgggggagaagccggtgaagcggatgatgaagaccccctaccagctcgaggttctggagaagacctatgcggtggagcagtacccgtcggaagctatgcggctggagctgtcggcgaagatagggctgtcggacaggcagctgcaaatgtggttctgccaccgccgcctcaaggaccgcaagccaccgtccaagcggcaacggcgggaggaagagtccgcgctagtaccagtgatgcctccaccgccagtgttaccagcacctgtgatgcctctggcaagcagtgaccttgtggtgggtgctcctgggccgtatgatgagccgctgcacccacttcactcgcgaaggggtgctgggcgtgggcggtcctcagcagtccccaggatttccatgccggatattgggaggaggtattacgagccaccaccaattatgatagcgccgcctatcccgtcgatgcagctcacgcaatatgagctccgtgtgattaattctgtggagtcacagctcggggaaccattgagggaggatggtccagcgcttggcgttaattttgatccccttcctcctggcgcctttggtgcaccgattgttccagagcaacaaaagcagcctgtgcgatcttatgatgcggagatattttcttggcatgatcaaaaactcttaaaggcttcagcatttttacctaatatggaatccccatttgttccaaattcgtttactgggaagagaaaatcaccagttggtaattcagccatagttcaacctcatgttggatcacgggctgttcatgagtatcagttccttcctgagcaaccaagtgatacatatgagagggcaacccgatctcactactatgacactccagtggaagtttcaaatgctaggataccttctatcacatcaggatcacaacttctccatggatctgaggaggctgcgcctagttatgcttttcaaggtcacacatctggttctagcctgttgcctccgtccagcaggccccaagtgtttccagcagcaccaacagattatgagatgactcagtctaatagcaaccttagttctgttcctgttgaaggacagtttgatatttctcaggttgctgcatttgaaaacccacctgtatcatctgaaataatagcttatcatgatgaagatacttctcgcgtggaaagaaaacgaaaacatagtgaagaagcaaagattgcaaaggaagttgaagctcacgaaagacgaattaggaaggagcttgagaaacaagatatgttgaataaaaagagagaggagcaaaggcgcaaggaaatggagagacttgatcgtgagagaagaaaagaggaggagagattactgcgtgagaggcagcgagaagaagagaggttccaaagagagcaaaggcgcgaacatgagcgtatggagaagtttttgcagaagcaatctagacgagcagagaaacaaaggcaaaaggaggaactccgaaaagaaaaagaagcagcaaggcaaaaggctgccaatgaaagggctactgcacgtaggattgcacgggagtatatggaactggtggaagatgagcgtttggaatcaatggaattagctgctcaaaacaaagggttgccctcaatgctgtatcttgacagcgacacattgcagcagcttgattcctttcgaggcatgctaagtcaatttcctcctacaacggtgagaatgaagttgccattttctataaagccttggactggatccgaggataacgttggaaaccttttgatggtgtggaaattcttaattactttcactgatgttctgggtctttgtccagttacacttgatgagtttgttcagtctcttcatgattatgattcaaggttgttgggggaactgcatattgctctgctgagatccattataaaggatattgaggatgttgctagaactccatcaattgcactgggggtgaatccaggaggtggccatccacaaattgttgaaggggcatatgcctggggattcaatatacgtagctggcaacgccatcttaatcttcttacatggcctgagatattaagacagtttgctttatctgctggttttggacctcaattaaagaaaaggaccgtagaagattcttactatcgtaatgataatgagggtcatgatggtgagaatgttatattgacgattcgaaatggtacagcagcagtgaatgctgctgctaagatgaaagaaagaggttacaccaatcgccgtagatcccgccaccgtctcactcctggaactgtaaaatttgccgctttccacgtgctttcgcttgaagggagcaatggtctcacaatattggaagtagcagaaaaaattcagaaatctggattgagagacctcacaacaagcaagacacctgaggcatccatagctgctgccttgtctagggatacaaagctttttgagagaactgctccttcaacatattgtgtgaagtcgccttatagaaaagatccggctgattctgaggctgtgttgtcagcagcgcgtgaaagaattagggcttttcagaatgtgctttctgactctgaagctgaaaaggaggtagatgaagctgagagggatgatgattctgactgcgatgatggtgatgatgaccctgatggtgatgatgtgaatactgaggtggaagacgacaaggatcctcttcttgctgtcaagtcacaagatgaagtaccgagtacaactacagttattggcataaaggccaatttagatggtgtgggtaatgcattgaactcatcaagtagttttactaaatcagcaaaaggcgctcctctcccttctttaggcaggtccaatgcagcagatacttctaatgatttgcctcttggagtctcatcagctaatcatgaagtagtacctgatgattctgaaaatacacaaattgatgaaagcaatcaagccgagccttgggtacgtgcactagcagaaggtgactactgtgaccttagtgttgaagaacgccttaacgcactggttgctcttgttggtgttgccactgaagggaactctattcgtgctgtacttgaggagcgtttggagttagcaaatgccttaaagaagcaaatgtgggcagaagcgcaacttgacaagaggcgtttcaaggaagaatttactagcagagtacaatataactctgacatgggtttgaagcctgatatatatcaagaaaacaacgtgacagagattacttcaactccagcgtgtgatgcttatagagagaatgatgaacatgtcgggacaatcaacaattgtgagatgcttgatcagcataatcagggtaatgctggtagtctaccttatgagagaaatggcgtatgccaggaaatcctcgcaaccccagatacttcgtatgttcagcagtatgcttatgctgataaaaggcgatctcagttgaaatcgtacattggtcaccgggcagagcagctttatgtttacagatccttgcccctaggtcaggatcggcggcgaaacaggtattggcagtttacaacttcagcatcaccaaatgaccctggctcaggaagaatcttttttgaatccaaagatggatattggagagttatcgactcagaggagctacctgcagaggtgagcaatgagctcactctcacaactcacggctagaggtacaagaacactgagaacagagcacacacagcactagcagtctagcacaagtctgaatgtgcagcaactgaactgctttctccattgcattgtctagtatatatacaagtctagtacccaactatatggtagaatagtacatggcttagcccagtgttcaactacatgactgatgtatgccactacatagttggcctattgccatactcctatagtgcaatagatggacagcaagaactggccacaaaaccaactctctgctgcagaaaaagtcaaaagggagcagcagattgtcttacaagtaccagtgtacttcacgctaaaaaatattgggatttgatcattagagttgctagggcatttagggcttctttggcctagctatgtagtagaactttaggatggagtaaaattttctaaccaa

SEQ ID NO: 36965 - DNA, 2342 bp, Zea Mays
cacatacaaaaactttggttaaggatgttagcttaacttttagatgttataactcctattctattatctatagtgattattcgactcaacatattagaatcatgaattgcaactacagacaggcatgaagttccgcagataatcaaatatagtttaatgtttcagacacgctagatgagtataacttgattagtagcacataaccgaagaggaaaaacagaaattgcattgatcatgccaagcattagttgtagcatcatagggtatagtaatatatttgtttcttcaaaattgctgctccctctgtcagggaggcactattcatgcggttactgtagcacgtggacagttccgagattagatcagatttggtttggatcagattagttaggaagagataaggattagatcagatttggttgataaggattagattagttagggaagggataaggattagatcagaattggttagatggatagagacaagtcagtcgcctctataaaagagacatcattgtatcagttaagggtaagcaagaattagaaacaaaccttcttcttgcccgaccgtgggcaaaggcccccggccgacattcctgcaactacaactccctatccctctccaattccccaatcacatcatagtctataacaatctggtatcggatatgtcaagcgctccgactccgatgaccctcgagggcctcaacgctaagctcgatgccaatcttcaccaccctcgcgcgctctgtggcaaccattgaagctttcatgtcgcgcatggcgtgtccctcccaacacccgccggcgccacagttatcgatgatcacgcacccaccagcgaccgtgggaccacccctgtcgccaccggcgccgtcacatcgcctgatcagtgccagtgcgcccgcaccaacgggcctgcccctttacctcatctccataccaccatcaccatcgccaattccatcatacgccctctcatcaatgacggcgccggaattcacgatggcaacgtctccttcaccgaccccgtcgttcaccgcccccatgcctatgccgccacagcagcactgcgaagacgtcttctacgggagcgtggatggcattcgggcaacgacggcgcagctacaggaggcggcacgctgcctcctagcgcgccgacaaggacaacgcccccatcttcaagcagaagcgcccagtcgtcccagcaaccttgaagcagctcacggagaggaaggcgagtgcgcaggcgagtgcctgcaaggtgtttgcggtggtgtggctgcaagctgcggcgcatggcctcctagtgcgccagcaaatgctcgaggcaaccttggtgtcggtcgaccttggcacatggggacgcgacctcgccctgtcggacgaccatcaagaactgcgctggcccgatatctccaagcgcgagcatggtgtgtgtcccgcgggcgacgaactccaactctacgacagcgtcggtagggaaggcactcccctccttgtcatcggcatgggcgcacggactagcactaccacattccactaccgaccgctatgagggcgtctcagttggtcattgttgcgacccattccagggatcatccacatgctcccctttcgtccagatggcgtatatcagatccatgtggctgcacacgtgcagatccaatgcgcaaagggtgttcgccttatcttaaggggtcaaaaaataaagagttaatgtctaattcaggttcgaaataataaaataaaccgagatgtagaagacttatttttaggtgttaggtttgtgtctagtggggtcatcgttaggttgcagctcgaggtcgagttgcatgtccaggtagggtgtagtgtaaggaggcactgttcacacggttactgtagcgtgggaacagtaccgagattagatcatatttggtttggatcggattagttatgaaagaggtcaggattagatcagatttggttgataaggattagattagttagggaagtaataaggattagatcagatttggttagttggatagagataagtcagtcgtctctataaaagagacaccattgtatcaattaagggtaagcaaaaattagaagcaagccttcttgcccggccgtgggggccttttgcccccggccggcattcttgcaactgcaactccctctccaattccccaatcccatcgtagtccataacaccctccgtttcaaattttaggttactttagctttataagtcaaacttctctaactttgataaagttttttaggaaaatatattaacatgtacaagttcatataaatgcactatcaaaaaatgccatgcaaaatttgat

SEQ ID NO: 36966 - DNA, 74 bp, Zea Mays
cccaattaaggcagcaactagctggtcaaatcatgctttaccgcttgagatgtgcaattgtacaagcacacacg

SEQ ID NO: 36967 - DNA, 2397 bp, Zea Mays
ggagtaagaggtttcttcagcacacatgttgtggatcagagccttgtttcttcagaaacatacaatacctagattttctgtgaatattgacaaccactctaattgggatgagatggttgattcatgtgctttgcagttatcacatgacttgattcgacatcatgttcaatttttgcatgatgaatctcataagaataataatcatcaacaaaaagaagtgtttgcttccatgaatattagtgcagaaggtgaacttaagtccagtgagaatgagcgacccttgtgtggagttgcttctaaggagaatccaattcagctggctgcaggcagagctcagcaagagcctccaccatccaatgtggaagataaagtagaaaatgatcaatttttttttgaaggcatagttcaaagaaatccttctagtagacttgtaaaaggcagcgagtcatttgctattgttgcttttggaattcagatactgcagcatcctcagttctcaaaactttgttgggctacgtcaaagctacgggaaggcccctgcactgatataaatggaccatggaaaggctggccatttaattcctgtttgttgcagagcagcaccttacctggtaaatcactaaatggaggggacaatgttgtaaagggaaaggaaaagtctgtctgtgtgagagggctggttgctgttggcttattagcttatagaggtgtctatgggtctgttattgaagtttgtgctgagaacacatgttgatacccggacaggaacatcccgcatgaagagttcaagtgccaaagaatgtcaaaggaccaagtatgctgcaggaaccaatgtacaagttgctcctgttgccatccctgctgaggttcaagacattccagcccaacacactcaggatcatgaagttgttcctggtcctactgaggtgcaaggcaatccggttaagcatactgcagaacaacctggaagctattcgatggactgtgaccttgataatcatgtgaactctgtttccagcaaggatgcagtagaacacgatcatgtccattcagctttacctgatgtgcataggggcaatacacatgcagatacagtaacaaatgacggagaacctattggagcaaacaacaatgggaaagtgtccaggttaacctacggtgaagataaattcagaccaggtattcaaagatctgaaaaccacacagaatctatggaaggtttaagctgtttgcaaagggcaggagattccgttggatccccagcaagtattaacaatacagaattaccaaagaacaatgtttcttctgaagctcatattgatgataatgagttgaggagaaatgatcttgtgaatgatgttgaatcaaattcgatcgatggtaaacatgacaccatgatgaatctttcagttccaaaaatttcatgtctctacaaatgttgttctccatgtttccaatctatttataagatggttcatggtattatttcaaatactctaaggcctaatctgcattgcttaacagctgatgatatgcatgacattctgtcatcatggtgcttgaatctattagggtctgttagaaagttgtacagctcacatgatgaggccagctgcacagaagtttttgttagaatgtccaataaagaaacccacttagagcattgtgcttgtcagagtgatatctatctttcaagagaatgtgtatgccacttggaaagcaatggggatgttgaaactgcaaatactgattgtcatcctctatcaggacaaagcttaagttttttctttaaagatggtgtatggatgccgttggatctcactgcggaaacaaaacttcattgcagcttcaggagattctgtgtttgctcgatattaggaacagtttctatgctcagctagatcctcagttcatgatattgtctgatgcagttgcaaaagtacatatagtactctaatgctctaagtgtggctccagttgtgcacataacacaacatcatcaggatgtctttggttgattggaacttctcatccttgatgcaacttttgggcaagcttttattgcacataaattgcctctacctgttatggtcattagtggaaaactggctgttgtagttgcttcgtagactgaatatttaaaaagaagctaagatattagtcttcattttttttccaacgaagttacccatgtaggttggactgttgttgctgctggaaatttcacggttagatgatgactgagtgactgacgccatttcagttctcattgtaatatgtattatggcccaattaagcatcaagttgaaacatgattgaatcttatactcacattttgtgttgtacctctattctggtcagtggtatgctttctaatggacaactgacattcagcat

SEQ ID NO: 36968 - DNA, 1948 bp, Zea Mays
ctttgttgctttgacaccctgtgttagagccactaatcttctttctctatttccccattggatctagctgtcccaagaggcaggttccaacagcctggaagatggtccaggcgtcgtggctagcagagaggagaggcagccttgtagtcgaacagaagcctgcatatttgatcatcggaagtttcttatagcctgcaacgatcatcgccatctcttccaaccccaaggagataaatatgttgaactgctcaggaaaatgaagataaaaaagatgaaggccgatatcagaaaggtgtcacatgatgcatggagaaaagacagagaggctgaggagaaatggttagagaactgtggggaagatgaggagttcttgaaacgggagggcaagaggctaaacagagatcttttacgaattgcacctgtttatataggaggctcctctgaaaatgaaaagtcatatcgtggttgggaatctgttgctgggctaagtgatgttattcagagcatgaaggaggtggtgatgttacctcttctctaccctgagttctttagttctctaggtcttactcctccaagaggtgttctgctgcatggccaccctggtactggtaagacacttgttgtaagggcactcataggggcatgttctcaaggtaacagaagaattgcttattttgctcgaaaaggtgctgattgtttgggtaagtatgttggtgatgctgagagacagttaagacttcttttccaggtagctgaacgatgccagccttctatcatattttttgatgagatagatggtttagcaccttgtagatccagacaacaagaccaaacacataattcagttgtggcaaccttgctctcgttgcttgatggtttgaaatcacgaggctcagtcgtagtgattggggctacaaatcgtcctgatgctattgatcctgcccttaggagaccaggaaggtttgatcgtgagatatactttccactaccaaccttcgaggatagatctgctattctgtcactgcatacaaaaaaatggccaagtcctatttcaggtgcattcctgtcatttgttgctagccaaactgttggatatgctggtgctgatctgcaggcaatttgcacacaagcggcaataaatgctttgaaaaggacatgcccattacatcaaattttacaatatgccgagaaaggagttcctcatgggcgagttcctctaccaacagttcttgtcgaggataaagattggctagctgctcttgcagctgctccgccaccttgttcaaaaagggaagcagggattgcttcaaatgatttggtttccactcctctagattcctgttttgtaccaagcctttttaaaccattggtacaccttcttatttctatgtatttggatgagcgtgtatggttacctccatcccttcttaaggcatgttgctctataaaggaagtggtattctcatccatggaaaagaatactgtaccccacactttatggccaacttatcttagttctttgatccaacaaaaagatattgcagatagaattggaacaatcttgtcaagctgtggccttatatctgcacaactaggaaatcgtggttcaatgttgctgagtgatgttaaaacacaggagaatttttgtggcagcagattaaatcccactggtttgcatatgaaaggagggctgccacataagttatcaggctttcgagttttagttgctggagcaccaagatcaggccaacaacacctaattcgttgtgttcttcatggttttatgggccagattgtaatacacaagcttgaccttgcaactatggtgcaggaaggaaatggtgatatccttagtggtctgacacacattctctggtcatgtggctcctgcacgctagctttacaatggttttggtatgctgccacatatatgttcccaacactgaca

SEQ ID NO: 36969 - DNA, 1997 bp, Zea Mays
gtttcgtttggatatttctgcaagttgcttcaattcatcttatcgttgtttactttgctggtttgggctgtctaagaaatgtaagagctgcgctttgccgtggaagacttctgaagtgcagtcgatgtggcagacctggagcaactattgggtgtcgtgttgatcgttgcccgaaaacctaccatttgccttgtagtcgaacagaagcctgcatatttgatcatcggaagtttcttatagcctgcaacgatcatcgccatctcttccaaccccaaggagataaatatgttgaactgctcaggaaaatgaagataaaaaagatgaaggccgatatcagaaaggtgtcacatgatgcatggagaaaagacagagaggctgaggagaaatggttagagaactgtggggaagatgaggagttcttgaaacgggagggcaagaggctaaacagagatcttttacgaattgcacctgtttatataggaggctcctctgaaaatgaaaagtcatatcgtggttgggaatctgttgctgggctaagtgatgttattcagagcatgaaggaggtggtgatgttacctcttctctaccctgagttctttagttctctaggtcttactcctccaagaggtgttctgctgcatggccaccctggtactggtaagacacttgttgtaagggcactcataggggcatgttctcaaggtaacagaagaattgcttattttgctcgaaaaggtgctgattgtttgggtaagtatgttggtgatgctgagagacagttaagacttcttttccaggtagctgaacgatgccagccttctatcatattttttgatgagatagatggtttagcaccttgtagatccagacaacaagaccaaacacataattcagttgtggcaaccttgctctcgttgcttgatggtttgaaatcacgaggctcagtcgtagtgattggggctacaaatcgtcctgatgctattgatcctgcccttaggagaccaggaaggtttgatcgtgagatatactttccactaccaaccttcgaggatagatctgctattctgtcactgcatacaaaaaaatggccaagtcctatttcaggtgcattcctgtcatttgttgctagccaaactgttggatatgctggtgctgatctgcaggcaatttgcacacaagcggcaataaatgctttgaaaaggacatgcccattacatcaaattttacaatatgccgagaaaggagttcctcatgggcgagttcctctaccaacagttcttgtcgaggataaagattggctagctgctcttgcagctgctccgccaccttgttcaaaaagggaagcagggattgcttcaaatgatttggtttccactcctctagattcctgttttgtaccaagcctttttaaaccattggtacaccttcttatttctatgtatttggatgagcgtgtatggttacctccatcccttcttaaggcatgttgctctataaaggaagtggtattctcatccatggaaaagaatactgtaccccacactttatggccaacttatcttagttctttgatccaacaaaaagatattgcagatagaattggaacaatcttgtcaagctgtggccttatatctgcacaactaggaaatcgtggttcaatgttgctgagtgatgttaaaacacaggagaatttttgtggcagcagattaaatcccactggtttgcatatgaaaggagggctgccacataagttatcaggctttcgagttttagttgctggagcaccaagatcaggccaacaacacctaattcgttgtgttcttcatggttttatgggccagattgtaatacacaagcttgaccttgcaactatggtgcaggaaggaaatggtgatatccttagtggtctgacacacattctctggtcatgtggctcctgcacgctagctttacaatggttttggtatgctgccacatatatgttcccaacactgaca

SEQ ID NO: 36970 - DNA, 657 bp, Zea Mays
ccagtgccaacccagtctccaaggccacaaccacggctcccggctggctccaggctctagttccaacctccacctgcgccgcccgatagcaaaacgcagcgacctcgccccccctgccccgctcctccccttttcccggtagcagagacggagcaccgcagcccgccagaaaggaagacgaaacgcgccgcggcgcaacgcaccgcgtgctagtgaaagggcgcagcggaaggccgccgccgcgctgctatttagacaggaagcggggcgatcgaatcgcgtctctcaaccaatcgataaatctgccggtaggtcgatcaaggagagcgcggtccacgtctccgttccgttccgttgcggggaaggaaggaaggagagagaggagcgatggcgtccgggtaccgcgcggaggaggagtacgactacctgttcaaggtggtgctgatcggggacagcggcgtggggaagtcgaacctgctgtcgcggttcgccagggacgagttcagcctcgagaccaggtccaccatcggcgtcgagttcgccaccaagaccgtccaggtcgacgacaagctcgtcaaggcacagatctgggacaccgccgggcaggagagctatggcttggtacgtagtacatgttggccgtcaaactggtgtcta

SEQ ID NO: 36971 - DNA, 1649 bp, Zea Mays
gtcagctctcgcgctaccggctgcgggataaggcaagcttgtcgctcgccttggtggtgtgcttccagttccagccaccagcgctagcttcctctgcgttgcacgtcggaaatggattcctctagcagaggcatccgcttcctcgtccaccgccgcgcgctgctgctgctgctgctcgtcgcgtcgtcgtccctcgtcggcacatcgcgtggcagggaggcgcagccgctgcccgcggcggcggccacggccctcggcagcaggcggtcgccggagcggcacggcctggcgctggacttctacgccaggacgtgccccgctgtcgaccagatcgtcgccaacgtcaccgccgcccagtacagggacttccccgccgccggacccgccgtgctccgcctcttccaccacgactgcttcgtggaagggtgtgacgcgtccattttgatcgcgccgacggccgacgcggccgcgcccgcgcgcccgccgccacccagggtggagcgcgacatggaggagaacaggaacctgccgcaggaggcgttcgacacggtggagctcgccaaggctgccgtggagagcaagtgccccgggatcgtctcctgcgccgacgtcctcgccctcgccgcccgagactacgtccagctggtacgtgggtgggccgtactacgcggtgaagaagggccggaaggacagcaaggtgtccctggcggggaaggtccgcggcagcctgccgcgggccaactcgacggtggacgagctcctgcgcgtgttcgcgggcaagggcctgggcgcggcggacctggtggcgctctccggcgcgcacaccgtcgggttcgcgcactgcgtccacgtgctgggccgcatctacgacttccgcggcacgcggcggccggacccggtcatggacgcccgcctcgtgaaggcgctccgcatgtcgtgcccgtcgtcgggcggcagcgcccgcgtcgtggtgcccttcgacgtcagcacgcccttccagttcgaccacgcctactacgccaacctgcaggccaggctgggcctgctggcctccgaccaggcgctgttcctggacgcgcgcaccaggccgctcgtgcaggacctcgccgccaacaagacccgcttcttccaggcgttcgtggccagcatggaccggatgggctccatccggatcaagaaggggaggaaaggagaggtcaggaaagtctgtagccagcacctgttttcagcctgatctgcgtctgcattcagcagcatgcgtccgtacgtcgtcgtcggtgtcagctcatcagcgtgccagcaccagcatacacacgggactagctcgttcgtggttactacgtttggggcctcgcgttgcgtgattagagctatctttgatgcatgtgacggcagtttagtttagagaggagtagcttggccattggttttagggtcgcgtgtgtttgtgcaagaaaatgtgtaattgtgtatgcatgcaactatgcaagtacagtgttctgttgtgtgttttttatttaggcgtgcctaggaatttatacgagcatgccggctatgctagtttgtctgtgtgacattccatctgtttgattatattgaaaaactgcatgatgcagagcacaataggcacgtagcggcctaggctatcc

SEQ ID NO: 36972 - DNA, 857 bp, Zea Mays
agatcccaaggaaggtcgaacatgtggtgcgccgcggccgcgccaactctccgctcgccggtcacggtattttctgtggcggagacaggcggcgccaccgttgacgctagaaaatggggaattgatttgatatagcacacgaggaactaaatactctccctactctcttcggcgttcttcggttgttgctctgtatccttacctaccttcgtggcaacctgcgctcgcgccatcagcgcgtcgatccatcaactccatggcgtgcagcttcccgccttcctccgccacgaggctccatgccttggacgccgcggcggcgggggtgaagaacggcagggtccccctcaaggcctccgtcgcccccgcgcagagggcactcggttgctgcagggcgaccgcgcggcaggaaggcgctacacaggaacccagtgttgcagctggacctcctggagcaactgacgtccgccacacctgatgacactgcggctggcctggagaacggcatgcctccaccagaaccgcgtcggcgtgctaccatccgcgagcagctgtcagcgctagccaacggtaaggtcgacgagttcaccctcccactgggcaagaggctgaaggaaggtctgaagaggctcaactccctcaccgtgtcgcagaggaggaacatcaagaggcaggccctgctcacccaggtcagcgggcggaacgactcggtgttcttcgcgaccgttggcgcgttcgtgctcgtcccgcctctcgccattctagctatcggtgtcctcactgggtatatccagctcttcccatgaccaccaagatgctgcatgctatttaactagctatctccacactgccatatatat

SEQ ID NO: 36973 - DNA, 977 bp, Zea Mays
gaaaagtcggtatgggctgggctggtggcttccgacgtcctagagcgagcgagcgagcggcgaccaaatattagttgggccgctcccttttctgttgattttaggcccacgcgacgcggcgtccaatcgagaaggccggtggtcgttccagaaaagaaatattttgtggccccgccgtccgctagatcccaaggaaggtcgaacatgtggtgcgccgcggccgcgccaactctccgctcgccggtcacggtattttctgtggcggagacaggcggcgccaccgttgacgctagaaaatggggaattgatttgatatagcacacgaggaactaaatactctccctactctcttcggcgttcttcggttgttgctctgtatccttacctaccttcgtggcaacctgcgctcgcgccatcagcgcgtcgatccatcaactccatggcgtgcagcttcccgccttcctccgccacgaggctccatgccttggacgccgcggcggcgggggtgaagaacggcagggtccccctcaaggcctccgtcgcccccgcgcagagggcactcggttgctgcagggcgaccgcgcggcaggaaggcgctacacaggaacccagtgttgcagcttcttcggcccgtgcacagctggacctcctggagcaactgacgtccgccacacctgatgacactgcggctggcctggagaacggcatgcctccaccagaaccgcgtcggcgtgctaccatccgcgagcagctgtcagcgctagccaacgaggaggaacatcaagaggcaggccctgctcacccaggtcagcgggcggaacgactcggtgttcttcgcgaccgttggcgcgttcgtgctcgtcccgcctctcgccattctagctatcggtgtcctcactgggtatatccagctcttcccatgaccaccaagatgctgcatgctatttaactagctatctccacactgccatatatat

SEQ ID NO: 36974 - DNA, 841 bp, Zea Mays
ctctcctctggctgccgctctccacagtcctcgggctccaagccttgcgtaaaccccgacccccacgcgcatagatgaagactaggtcgcagacgtcgccgaagcctctcaagacggtggcgatggctcccaggccgagcagcaccaagcggaagccgaggcccaagccggcggggaagggcgacccccgcgcacccaagaagccacccaccgccttcttctacttcatggaggattttcgcaagatctataagcaagaaaaaccaagtgtaaaatcaatgcaggaaatagggaaggcatgtggcgaaaaatggaatacaatgacatttgagttttcacttaattcatttcacaggaaaaggtcaagtattatgatatagctactgagaaacgtgcagaatttgagaaggcgatgattgaatataacaagaaaaaggaaagctgaacatttgtctgttccaaattcccgatggttcactgtaactggatgaatcaatcagctgtatattacagaactgtgatttttagtggaatttataaataccactagttggaaccgtcagctcacgcagatatgtatcttttgtagtcgacttgcacattttgatgacaccgagtcttctacccggtgtttttcatctggagataatttgtgtttcgtgctaactgctcgttaaattgcttattatagagttgtatgtatgattgtgtatataataatgtcctccaacgcaaaaaaatatatatattatcacagctaaaacaaatgatatccctactgtcaagtatagtacttagactgtagatattgataccgaacactcatatatcgaattcattt

SEQ ID NO: 36975 - DNA, 773 bp, Zea Mays
ctctcctctggctgccgctctccacagtcctcgggctccaagccttgcgtaaaccccgacccccacgcgcatagatgaagactaggtcgcagacgtcgccgaagcctctcaagacggtggcgatggctcccaggccgagcagcaccaagcggaagccgaggcccaagccggcggggaagggcgacccccgcgcacccaagaagccacccaccgccttcttctacttcatggaggattttcgcaagatctataagcaagaaaaaccaagtgtaaaatcaatgcaggaagaaaaggtcaagtattatgatatagctactgagaaacgtgcagaatttgagaaggcgatgattgaatataacaagaaaaaggaaagctgaacatttgtctgttccaaattcccgatggttcactgtaactggatgaatcaatcagctgtatattacagaactgtgatttttagtggaatttataaataccactagttggaaccgtcagctcacgcagatatgtatcttttgtagtcgacttgcacattttgatgacaccgagtcttctacccggtgtttttcatctggagataatttgtgtttcgtgctaactgctcgttaaattgcttattatagagttgtatgtatgattgtgtatataataatgtcctccaacgcaaaaaaatatatatattatcacagctaaaacaaatgatatccctactgtcaagtatagtacttagactgtagatattgataccgaacactcatatatcgaattcattt

SEQ ID NO: 36976 - DNA, 752 bp, Zea Mays
ctccctctcctctggctgccgctctccacagtcctcgggctccaagccttgcgtaaaccccgacccccacgcgcatagatgaagactaggtcgcagacgtcgccgaagcctctcaagacggtggcgatggctcccaggccgagcagcaccaagcggaagccgaggcccaagccggcggggaagggcgacccccgcgcacccaagaagccacccaccgccttcttctacttcatggaggattttcgcaagatctataagcaagaaaaaccaagtgtaaaatcaatgcaggaaatagggaaggcatgtggcgaaaaatggaatacaatgacatttgaggaaaaggtcaagtattatgatatagctactgagaaacgtgcagaatttgagaaggcgatgattgaatataacaagaaaaaggaaagctgaacatttgtctgttccaaattcccgatggttcactgtaactggatgaatcaatcagctatatgtatcttttgtagtcgacttgcacattttgatgacaccgagtcttctacccggtgtttttcatctggagataatttgtgtttcgtgctaactgctcgttaaattgcttattatagagttgtatgtatgattgtgtatataataatgtcctccaacgcaaaaaaatatatatattatcacagctaaaacaaatgatatccctactgtcaagtatagtacttagactgtagatattgataccgaacactcatatatcgaattcattt

SEQ ID NO: 36977 - DNA, 847 bp, Zea Mays
cttcccttcccccctaccctgtgcgtgtctgctccctctcctctggctgccgctctccacagtcctcgggctccaagccttgcgtaaaccccgacccccacgcgcatagatgaagactaggtcgcagacgtcgccgaagcctctcaagacggtggcgatggctcccaggccgagcagcaccaagcggaagccgaggcccaagccggcggggaagggcgacccccgcgcacccaagaagccacccaccgccttcttctacttcatggaggattttcgcaagatctataagcaagaaaaaccaagtgtaaaatcaatgcaggaaatagggaaggcatgtggcgaaaaatggaatacaatgacatttgaggtcaagtattatgatatagctactgagaaacgtgcagaatttgagaaggcgatgattgaatataacaagaaaaaggaaagctgaacatttgtctgttccaaattcccgatggttcactgtaactggatgaatcaatcagctgtatattacagaactgtgatttttagtggaatttataaataccactagttggaaccgtcagctcacgcagatatgtatcttttgtagtcgacttgcacattttgatgacaccgagtcttctacccggtgtttttcatctggagataatttgtgtttcgtgctaactgctcgttaaattgcttattatagagttgtatgtatgattgtgtatataataatgtcctccaacgcaaaaaaatatatatattatcacagctaaaacaaatgatatccctactgtcaagtatagtacttagactgtagatattgataccgaacactcatatatcgaattcattt

SEQ ID NO: 36978 - DNA, 1912 bp, Zea Mays
gatgcaagtcctctggactcgacccccgcatgggctgttcgtgggctgaatcgaagacctactcctagtgttttgggccttccgggctgcacaccccagcccggcgctcatgtccgctcctacaagtggctagaccttttcttccgttcacccggcctgccgcctgcgtcctccctcgtacggcaacttgtgcgaccgccggcgccgacgccccaaggcaggtgccctgtgaccaggccttcgccggtccctttcgcgtccttcgccggcgacgagcaccaccagttcgtacgggagcacaatcagaggtgatcaccatttgctgcctgtttggtgaaagttgcgtgatggatggatatggagaggcggctgctgtggccatggagttggaggccgaggccagcccatccagggggcgctcctctcctgtggtttcagggtcaccatcccagaattctgatggaagcatgtcctcgtggcggctgggcctcaagaacagcatccagactaactttggagatgattatgtcttccaaattgcctcttggagatctcaacgcttgcagtttccttgtcaacaaatgcactaaagttttattctccagaaaccggacagtacctaggggaatgtaaaggacacgaaggaacaatccatgaaatctccttctcagctccatcgtcaccacaagtaatctgctcttgttcttctgatggaactgtcagagcttgggatacaagaaactttaagcagatatctttgctaagaggaggcgtgtcacaagaaatgttcaccttcgcttttggtggatcaaatggtagcctacttgctgcgggctctaatgcccaggttctattctgggattggagaagttcaagacaaattgcatgcttagaggaatcccacatggatgatgtgacacaagtcaaattcacaccagatcaacaaagtaaactcatttctgcagcagttgatggattaatatgtgtttttgacactgatggtgatattgatgatgacaatcatctgttatctgttatgaatgcggaaacatctgttgccaaggtgggtttttttgggaacaagtataagaagctttggtgtttaacccatattgagacattaagtgtctgggactggaatgatggggctagagagttgaatatagaggatgctcgttccttggccactgataggtggaaccttgatcatgttgactatttcgttgattgtcactattctgtgcctgatgaccggctatggttgattggcggcacaactgcagggacgttaggttacttccctgtaagaaatgaccatgatggaccaataggttcagctgaagcaatcctcgaaggaggccatacaggagtcgttaggtccgtgtacccctcttcaggaatccatgggagacttgggcaaaacaggggcatctttggatggacaggaggtgaagacggtcgtttgtgctgctggcgctctgacgaaattgcagaaacaaacaaatcttggatctctagctcactggtgtggaagcagcaaaagaaaaccaaaaaccggcatcagccctactagccgcaatggataccgtttggaactttcggcactgacaagggaaagccctgtatgtgctgtgagcatgttgtatcttttctttgaattctactaggtcgtgatgaaacacagcacattgtaggtgcagttttgacgttgcttattgtttgagaatgcttgtctatttcagtaactggttattaatctagcaaagatatggtaagttgagtattgaagttttcgtgctcggaacttttagcggcccggaattgaacaggcgatgacgtgtatttggttcttggacattgtctgcagaataagtagcatataaatggagtaggttagggtgcatttggttct

SEQ ID NO: 36979 - DNA, 1779 bp, Zea Mays
gatgcaagtcctctggactcgacccccgcatgggctgttcgtgggctgaatcgaagacctactcctagtgttttgggccttccgggctgcacaccccagcccggcgctcatgtccgctcctacaagtggctagaccttttcttccgttcacccggcctgccgcctgcgtcctccctcgtacggcaacttgtgcgaccgccggcgccgacgccccaaggcaggtgccctgtgaccaggccttcgccggtccctttcgcgtccttcgccggcgacgagcaccaccagttcgtacgggagcacaatcagaggtgatcaccatttgctgcctgtttggtgaaagttgcgtgatggatggatatggagaggcggctgctgtggccatggagttggaggccgaggccagcccatccagggggcgctcctctcctgtggtttcagggtcaccatcccagaattctgatggaagcatgtcctcgtggcggctgggcctcaagaacagcatccagactaactttggagatgattatgtcttccaaattgcctcttgaaaccggacagtacctaggggaatgtaaaggacacgaaggaacaatccatgaaatctccttctcagctccatcgtcaccacaagtaatctgctcttgttcttctgatggaactgtcagagcttgggatacaagaaactttaagcagatatctttgctaagaggaggcgtgtcacaagaaatgttcaccttcgcttttggtggatcaaatggtagcctacttgctgcgggctctaatgcccaggtcaaattcacaccagatcaacaaagtaaactcatttctgcagcagttgatggattaatatgtgtttttgacactgatggtgatattgatgatgacaatcatctgttatctgttatgaatgcggaaacatctgttgccaaggtgggtttttttgggaacaagtataagaagctttggtgtttaacccatattgagacattaagtgtctgggactggaatgatggggctagagagttgaatatagaggatgctcgttccttggccactgataggtggaaccttgatcatgttgactatttcgttgattgtcactattctgtgcctgatgaccggctatggttgattggcggcacaactgcagggacgttaggttacttccctgtaagaaatgaccatgatggaccaataggttcagctgaagcaatcctcgaaggaggccatacaggagtcgttaggtccgtgtacccctcttcaggaatccatgggagacttgggcaaaacaggggcatctttggatggacaggaggtgaagacggtcgtttgtgctgctggcgctctgacgaaattgcagaaacaaacaaatcttggatctctagctcactggtgtggaagcagcaaaagaaaaccaaaaaccggcatcagccctactagccgcaatggataccgtttggaactttcggcactgacaagggaaagccctgtatgtgctgtgagcatgttgtatcttttctttgaattctactaggtcgtgatgaaacacagcacattgtaggtgcagttttgacgttgcttattgtttgagaatgcttgtctatttcagtaactggttattaatctagcaaagatatggtaagttgagtattgaagttttcgtgctcggaacttttagcggcccggaattgaacaggcgatgacgtgtatttggttcttggacattgtctgcagaataagtagcatataaatggagtaggttagggtgcatttggttct

SEQ ID NO: 36980 - DNA, 1841 bp, Zea Mays
gatgcaagtcctctggactcgacccccgcatgggctgttcgtgggctgaatcgaagacctactcctagtgttttgggccttccgggctgcacaccccagcccggcgctcatgtccgctcctacaagtggctagaccttttcttccgttcacccggcctgccgcctgcgtcctccctcgtacggcaacttgtgcgaccgccggcgccgacgccccaaggcaggtgccctgtgaccaggccttcgccggtccctttcgcgtccttcgccggcgacgagcaccaccagttcgtacgggagcacaatcagaggtgatcaccatttgctgcctgtttggtgaaagttgcgtgatggatggatatggagaggcggctgctgtggccatggagttggaggccgaggccagcccatccagggggcgctcctctcctgtggtttcagggtcaccatcccagaattctgatggaagcatgtcctcgtggcggctgggcctcaagaacagcatccagactaactttggagatgattatgtcttccaaattgcctcttgccaggagatctcaacgcttgcagtttccttgtcaacaaatgcactaaagttttattctccagaaaccggacagtacctaggggaatgtaaaggacacgaaggaacaatccatgaaatctccttctcagctccatcgtcaccacaagtaatctgctcttgttcttctgatggaactgtcagagcttgggatacaagaaactttaagcagatatctttgctaagaggaggcgtgtcacaagaaatgttcaccttcgcttttggtggatcaaatggtagcctacttgctgcgggctctaatgcccaggtcaaattcacaccagatcaacaaagtaaactcatttctgcagcagttgatggattaatatgtgtttttgacactgatggtgatattgatgatgacaatcatctgttatctgttatgaatgcggaaacatctgttgccaaggtgggtttttttgggaacaagtataagaagctttggtgtttaacccatattgagacattaagtgtctgggactggaatgatggggctagagagttgaatatagaggatgctcgttccttggccactgataggtggaaccttgatcatgttgactatttcgttgattgtcactattctgtgcctgatgaccggctatggttgattggcggcacaactgcagggacgttaggttacttccctgtaagaaatgaccatgatggaccaataggttcagctgaagcaatcctcgaaggaggccatacaggagtcgttaggtccgtgtacccctcttcaggaatccatgggagacttgggcaaaacaggggcatctttggatggacaggaggtgaagacggtcgtttgtgctgctggcgctctgacgaaattgcagaaacaaacaaatcttggatctctagctcactggtgtggaagcagcaaaagaaaaccaaaaaccggcatcagccctactagccgcaatggataccgtttggaactttcggcactgacaagggaaagccctgtatgtgctgtgagcatgttgtatcttttctttgaattctactaggtcgtgatgaaacacagcacattgtaggtgcagttttgacgttgcttattgtttgagaatgcttgtctatttcagtaactggttattaatctagcaaagatatggtaagttgagtattgaagttttcgtgctcggaacttttagcggcccggaattgaacaggcgatgacgtgtatttggttcttggacattgtctgcagaataagtagcatataaatggagtaggttagggtgcatttggttct

SEQ ID NO: 36981 - DNA, 1854 bp, Zea Mays
gatgcaagtcctctggactcgacccccgcatgggctgttcgtgggctgaatcgaagacctactcctagtgttttgggccttccgggctgcacaccccagcccggcgctcatgtccgctcctacaagtggctagaccttttcttccgttcacccggcctgccgcctgcgtcctccctcgtacggcaacttgtgcgaccgccggcgccgacgccccaaggcaggtgccctgtgaccaggccttcgccggtccctttcgcgtccttcgccggcgacgagcaccaccagttcgtacgggagcacaatcagaggtgatcaccatttgctgcctgtttggtgaaagttgcgtgatggatggatatggagaggcggctgctgtggccatggagttggaggccgaggccagcccatccagggggcgctcctctcctgtggtttcagggtcaccatcccagaattctgatggaagcatgtcctcgtggcggctgggcctcaagaacagcatccagactaactttggagatgattatgtcttccaaattgcctcttgaaaccggacagtacctaggggaatgtaaaggacacgaaggaacaatccatgaaatctccttctcagctccatcgtcaccacaagtaatctgctcttgttcttctgatggaactgtcagagcttgggatacaagaaactttaagcagatatctttgctaagaggaggcgtgtcacaagaaatgttcaccttcgcttttggtggatcaaatggtagcctacttgctgcgggctctaatgcccaggttctattctgggattggagaagttcaagacaaattgcatgcttagaggaatcccacatggatgatgtgacacaagtcaaattcacaccagatcaacaaagtaaactcatttctgcagcagttgatggattaatatgtgtttttgacactgatggtgatattgatgatgacaatcatctgttatctgttatgaatgcggaaacatctgttgccaaggtgggtttttttgggaacaagtataagaagctttggtgtttaacccatattgagacattaagtgtctgggactggaatgatggggctagagagttgaatatagaggatgctcgttccttggccactgataggtggaaccttgatcatgttgactatttcgttgattgtcactattctgtgcctgatgaccggctatggttgattggcggcacaactgcagggacgttaggttacttccctgtaagaaatgaccatgatggaccaataggttcagctgaagcaatcctcgaaggaggccatacaggagtcgttaggtccgtgtacccctcttcaggaatccatgggagacttgggcaaaacaggggcatctttggatggacaggaggtgaagacggtcgtttgtgctgctggcgctctgacgaaattgcagaaacaaacaaatcttggatctctagctcactggtgtggaagcagcaaaagaaaaccaaaaaccggcatcagccctactagccgcaatggataccgtttggaactttcggcactgacaagggaaagccctgtatgtgctgtgagcatgttgtatcttttctttgaattctactaggtcgtgatgaaacacagcacattgtaggtgcagttttgacgttgcttattgtttgagaatgcttgtctatttcagtaactggttattaatctagcaaagatatggtaagttgagtattgaagttttcgtgctcggaacttttagcggcccggaattgaacaggcgatgacgtgtatttggttcttggacattgtctgcagaataagtagcatataaatggagtaggttagggtgcatttggttct

SEQ ID NO: 36982 - DNA, 1007 bp, Zea Mays
ctcgtctccgctagtccactccatcgccattgttggtccccaccgctgcagcccatacgacgccgtcgtgccggccctacgactgctggtgccctacgacgccaccatcccctactccgccgccgccccctacgcccgtccatagccatgttcttcgatgaggctgagtaccacacaacccctacgaggtcaccctccaatcgcatgaacaggggtctcttctcagatgaagtggcgttaagtgttcatagggagcagtttatcccttctccgtgatctggtagagtggatgggttggacctcaactccagtggcgtggagttccagaaaattgcatttcatgaacttcgtcagtcccagtcagctgccaactactccgctactccggttcgtgatggtcataggggttgcagtcattctcgatcaattggtattggtcgtggtgttacgggcagaggatcccgagttccacggacgactagtgagggtcctagaggtggtcgtggagcatgaagcatcttctctcgtggacgtggtatgcctcgacctattggtgcttccttctctggtggccgtggtgccaccagtggtcgtggtgccaatatttcagcgccaaatgccgctcacagtcaagaggacaatgacgacgatcgctttgcacaggtaactcatttttctgacttggtcactccaatatggaagagcaaactgcgtcatagatgcaggcactactgtaatttttagcccaaagttttgaactgttttgtttgaaatatgtacataatctgtaatgtttgtgaactgtttgaatggagaggagagctggagagggcacggagaaatggaccgagacatggaccgtttttcttcagcacggcagcccccagccagtttttcatttgtgaatcctgtcgttggttgtttcttcttttgtacgctacacttaaattatcctagagagtgctttaacatgtttagaatgagtaagcatatatttgaaaagtctt

SEQ ID NO: 36983 - DNA, 1114 bp, Zea Mays
gcgccacgcacgccgatgcttagccggtagcgcacgccgatgctgagccggtaggacggggcggcgtcttccgccggcagctcgtctccgctagtccactccatcgccattgttggtccccaccgctgcagcccatacgacgccgtcgtgccggccctacgactgctggtgccctacgacgccaccatcccctactccgccgccgccccctacgcccgtccataggtgccaacagatcgtctcattacagagccatgttcttcgatgaggctgagtaccacacaacccctacgaggtcaccctccaatcgcatgaacaggggtctcttctcagatgaagtggcgttaagtgttcatagggagcagtttatcccttctccgtgatctggtagagtggatgggttggacctcaactccagtggcgtggagttccagaaaattgcatttcatgaacttcgtcagtcccagtcagctgccaactactccgctactccggttcgtgatggtcataggggttgcagtcattctcgatcaattggtattggtcgtggtgttacgggcagaggatcccgagttccacggacgactagtgagggtcctagaggtggtcgtggagcatgaagcatcttctctcgtggacgtggtatgcctcgacctattggtgcttccttctctggtggccgtggtgccaccagtggtcgtggtgccaatatttcagcgccaaatgccgctcacagtcaagaggacaatgacgacgatcgctttgcacaggtaactcatttttctgacttggtcactccaatatggaagagcaaactgcgtcatagatgcaggcactactgtaatttttagcccaaagttttgaactgttttgtttgaaatatgtacataatctgtaatgtttgtgaactgtttgaatggagaggagagctggagagggcacggagaaatggaccgagacatggaccgtttttcttcagcacggcagcccccagccagtttttcatttgtgaatcctgtcgttggttgtttcttcttttgtacgctacacttaaattatcctagagagtgctttaacatgtttagaatgagtaagcatatatttgaaaagtctt

SEQ ID NO: 36984 - DNA, 2871 bp, Zea Mays
attagtcaatgtataaggaaatttgctactgacatctagctaggtactgttttttcccaaaggatgctgttttggcagcattgatgcgactccattctccttatagtactttatgcagccaaatatgttgctgagtctctctttggttgaggatttagtaactttaatggtaatcttctatggtactctattcatccagaaaagagaagtcaaaaaatttgaggtttgactaaatctataccaaaaatactaatatttatgatataaaataagtatgaattaattataaaatatatttcatagtaaacctagttacagacataaatgttaacactatttactataaacttggtcaaagccaagcttgtttgacttgcacaaatttcatagttgcatcctttttggaacagaggaagtactttctatcacgtggtataggatcactgtagggggttattatattcaagctgtatttgggccaacctgtgggatcatttggtaatttctaggttcagtattgttaccttggtctttgattagttactttgctactattactgtcttcaaatgtatggtgtcatggcctcatgggtggcctcaatcctctttattcaccttgacaaccaccagagcaaacctctgtagttactagttaccttgccaaactcagctagccaagtagacctctgcttcctgtctgaaactaaaactcagttccatctagctcaactatgtgtagacattggcatgcacaagccagttgttccttgcaaatcgtggttcttgggaacaaaagagttgattaattcaacatttgcatccacatgacaattggaagaaaacaatgcctgtcaccctaacaactcgcctccattaaatgaactctaatttgaaactttcagcctccaacagtctctgttcgtagatgaaatgaatatctatgtttttttttctagtgtttaaggggcttcccatgactagatggtgggatcttctaaaatctcaattgttgaagtgctcaatggaccaattatatgttttgtctgaccaacaagaatagaaatccaatggtgcagaagggtatcttcaagttctatttcttccatatctattgcatgcttccatgcatatgtgcaatggatccaatgtcattacactgcacatgtacttcagtcatattttggcgattttaggaagattagtatcatgagactccatttgaaccaatcatctgttgtatgaaggttcaatcctgcattgactctctctgtaacttaatacagtgtattggtgctagtgggtacccagtggttatgagtctattttttggttcattctataccactttttttgataaatggattggtttccattaaatgagttttgagtcaacccacaaacctagagaaaactcttgtattcctaatcaacagaataaataaagtatttatcactttcctacaatgctcctattgtacatttataagattattatgtgtctaacataaaaagctcaagcactttgcgaacttggaaaattacataccttcatctcttatgtattttgagtgtgtaggaacccattattagaccaactccagcagcctccgctccgcatccctaaaggccggatggggaggctgctggagtgatgaacagtgcctcaaagcgcgcaaaatggggatggtacgctgttcggctgcggtaaaaggcagctgttactgctgccgtgctgcggcttcccgctcaaccacaaaagtactgttgcagcagctgcagcaacaattttcttttgtcatagccgaacagcgtggatgctcctgaaacagagctagcgcatttgactgggatgcctactgagacatttgaacagatcagccaggccgcaggagaatgccataaaatgggtgtgaaagaagtactagttaaacttggatcgcaaggatctgctgctttgtttgttgagggataggagccaatcagacagccgataattcctgccacagaagccatgttcttcgatgaggctgagtaccacacaacccctacgaggtcaccctccaatcgcatgaacaggggtctcttctcagatgaagtggcgttaagtgttcatagggagcagtttatcccttctccgtgatctggtagagtggatgggttggacctcaactccagtggcgtggagttccagaaaattgcatttcatgaacttcgtcagtcccagtcagctgccaactactccgctactccggttcgtgatggtcataggggttgcagtcattctcgatcaattggtattggtcgtggtgttacgggcagaggatcccgagttccacggacgactagtgagggtcctagaggtggtcgtggagcatgaagcatcttctctcgtggacgtggtatgcctcgacctattggtgcttccttctctggtggccgtggtgccaccagtggtcgtggtgccaatatttcagcgccaaatgccgctcacagtcaagaggacaatgacgacgatcgctttgcacaggtaactcatttttctgacttggtcactccaatatggaagagcaaactgcgtcatagatgcaggcactactgtaatttttagcccaaagttttgaactgttttgtttgaaatatgtacataatctgtaatgtttgtgaactgtttgaatggagaggagagctggagagggcacggagaaatggaccgagacatggaccgtttttcttcagcacggcagcccccagccagtttttcatttgtgaatcctgtcgttggttgtttcttcttttgtacgctacacttaaattatcctagagagtgctttaacatgtttagaatgagtaagcatatatttgaaaagtctt

SEQ ID NO: 36985 - DNA, 2980 bp, Zea Mays
gtaaaagattattagtcaatgtataaggaaatttgctactgacatctagctaggtactgttttttcccaaaggatgctgttttggcagcattgatgcgactccattctccttatagtactttatgcagccaaatatgttgctgagtctctctttggttgaggatttagtaactttaatggtaatcttctatggtactctattcatccagaaaagagaagtcaaaaaatttgaggtttgactaaatctataccaaaaatactaatatttatgatataaaataagtatgaattaattataaaatatatttcatagtaaacctagttacagacataaatgttaacactatttactataaacttggtcaaagccaagcttgtttgacttgcacaaatttcatagttgcatcctttttggaacagaggaagtactttctatcacgtggtataggatcactgtagggggttattatattcaagctgtatttgggccaacctgtgggatcatttggtaatttctaggttcagtattgttaccttggtctttgattagttactttgctactattactgtcttcaaatgtatggtgtcatggcctcatgggtggcctcaatcctctttattcaccttgacaaccaccagagcaaacctctgtagttactagttaccttgccaaactcagctagccaagtagacctctgcttcctgtctgaaactaaaactcagttccatctagctcaactatgtgtagacattggcatgcacaagccagttgttccttgcaaatcgtggttcttgggaacaaaagagttgattaattcaacatttgcatccacatgacaattggaagaaaacaatgcctgtcaccctaacaactcgcctccattaaatgaactctaatttgaaactttcagcctccaacagtctctgttcgtagatgaaatgaatatctatgtttttttttctagtgtttaaggggcttcccatgactagatggtgggatcttctaaaatctcaattgttgaagtgctcaatggaccaattatatgttttgtctgaccaacaagaatagaaatccaatggtgcagaagggtatcttcaagttctatttcttccatatctattgcatgcttccatgcatatgtgcaatggatccaatgtcattacactgcacatgtacttcagtcatattttggcgattttaggaagattagtatcatgagactccatttgaaccaatcatctgttgtatgaaggttcaatcctgcattgactctctctgtaacttaatacagtgtattggtgctagtgggtacccagtggttatgagtctattttttggttcattctataccactttttttgataaatggattggtttccattaaatgagttttgagtcaacccacaaacctagagaaaactcttgtattcctaatcaacagaataaataaagtatttatcactttcctacaatgctcctattgtacatttataagattattatgtgtctaacataaaaagctcaagcactttgcgaacttggaaaattacataccttcatctcttatgtattttgagtgtgtaggaacccattattagaccaactccagcagcctccgctccgcatccctaaaggccggatggggaggctgctggagtgatgaacagtgcctcaaagcgcgcaaaatggggatggtacgctgttcggctgcggtaaaaggcagctgttactgctgccgtgctgcggcttcccgctcaaccacaaaagtactgttgcagcagctgcagcaacaattttcttttgtcatagccgaacagcgtggatgctcctgaaacagagctagcgcatttgactgggatgcctactgagacatttgaacagatcagccaggccgcaggagaatgccataaaatgggtgtgaaagaagtactagttaaacttggatcgcaaggatctgctgctttgtttgttgagggataggagccaatcagacagccgataattcctgccacagaaggtattgataccacgggggctggtgacactttcacctcagcttttgccgtaacgttggttgaggggaggcctaaggattgcatgggatttgcagttgctgccatgttcttcgatgaggctgagtaccacacaacccctacgaggtcaccctccaatcgcatgaacaggggtctcttctcagatgaagtggcgttaagtgttcatagggagcagtttatcccttctccgtgatctggtagagtggatgggttggacctcaactccagtggcgtggagttccagaaaattgcatttcatgaacttcgtcagtcccagtcagctgccaactactccgctactccggttcgtgatggtcataggggttgcagtcattctcgatcaattggtattggtcgtggtgttacgggcagaggatcccgagttccacggacgactagtgagggtcctagaggtggtcgtggagcatgaagcatcttctctcgtggacgtggtatgcctcgacctattggtgcttccttctctggtggccgtggtgccaccagtggtcgtggtgccaatatttcagcgccaaatgccgctcacagtcaagaggacaatgacgacgatcgctttgcacaggtaactcatttttctgacttggtcactccaatatggaagagcaaactgcgtcatagatgcaggcactactgtaatttttagcccaaagttttgaactgttttgtttgaaatatgtacataatctgtaatgtttgtgaactgtttgaatggagaggagagctggagagggcacggagaaatggaccgagacatggaccgtttttcttcagcacggcagcccccagccagtttttcatttgtgaatcctgtcgttggttgtttcttcttttgtacgctacacttaaattatcctagagagtgctttaacatgtttagaatgagtaagcatatatttgaaaagtctt

SEQ ID NO: 36986 - DNA, 4398 bp, Zea Mays
cacagaaggcgtcttcccagcagcgccttcatcagccaccgccgtcgcgtcttcttcagctacaccttccgcaccgcggctgaaaatgcgccgctgccccagatcgtcgtcgtgggctccgccgacatctacgtcgaggtccaccgatccccgctcatcggcgagacggccgcgcgggcggcaagggcgccaacctggccgcctgcggtgcgccctacctacctcgtggcgcgcgtcggggatgacgccaatggccgactactcgaggacgccctagccgacgccggcggcgttgcaccgaccgcgtcgcgcgcgcggccgatgcgccatcgggacacgccatagtcatgctcatgccccacgaccacaactccgtcatcatcgtgggcggggcgaacatggagagctgggcggcggggattggctcggaggacctggattgatccgaaaggaaaatgcagagggagatacccgattgagtcaatccgcaggctgcccaggcgcttgctttttatcaatctcagcttggtttgggcacacatttttctttttttttatgttactgtttgattattttgatctcaattagactgaatagggcaatgtagctttgagcgccatgccacagtttttaggtgtttcctgccacaactatgatgcaccacacttccctagcatcatgtcttacacgtagaagactcattttcatgctaaacttcgattttgctgaccatacattctgtggcaaccgcagcttgccaaaggttaggcatgtcaaactacggcaacaaccaaacatgagagatatatgtttgagaatgaagcaacaatttactgaatgttttgaatatttgatgtttgagtatttactttttgaaattttgggagatatgttggctggctaggttcttctagcacactggtgctgtttagtcagttgaagcaataaatttggtaataacatctaaattcgtagggcaacaacagcaagagaaagtttctcttttatatcttagaaccgtatttagtacaggactttgtatgaactatactttcgattatttgcattgcttgaggttttaaaagttaatgctttgtggttagtttggtgctgtttgtttgagaaaggagcgaggatccactgaagattttattgcttagcgtagtgacctctcagcttttgatttatttttcagaaatttggagagatagtacagtgtgtgtgtgtgttgggggggggggggaggggttagtaaaagattattagtcaatgtataaggaaatttgctactgacatctagctaggtactgttttttcccaaaggatgctgttttggcagcattgatgcgactccattctccttatagtactttatgcagccaaatatgttgctgagtctctctttggttgaggatttagtaactttaatggtaatcttctatggtactctattcatccagaaaagagaagtcaaaaaatttgaggtttgactaaatctataccaaaaatactaatatttatgatataaaataagtatgaattaattataaaatatatttcatagtaaacctagttacagacataaatgttaacactatttactataaacttggtcaaagccaagcttgtttgacttgcacaaatttcatagttgcatcctttttggaacagaggaagtactttctatcacgtggtataggatcactgtagggggttattatattcaagctgtatttgggccaacctgtgggatcatttggtaatttctaggttcagtattgttaccttggtctttgattagttactttgctactattactgtcttcaaatgtatggtgtcatggcctcatgggtggcctcaatcctctttattcaccttgacaaccaccagagcaaacctctgtagttactagttaccttgccaaactcagctagccaagtagacctctgcttcctgtctgaaactaaaactcagttccatctagctcaactatgtgtagacattggcatgcacaagccagttgttccttgcaaatcgtggttcttgggaacaaaagagttgattaattcaacatttgcatccacatgacaattggaagaaaacaatgcctgtcaccctaacaactcgcctccattaaatgaactctaatttgaaactttcagcctccaacagtctctgttcgtagatgaaatgaatatctatgtttttttttctagtgtttaaggggcttcccatgactagatggtgggatcttctaaaatctcaattgttgaagtgctcaatggaccaattatatgttttgtctgaccaacaagaatagaaatccaatggtgcagaagggtatcttcaagttctatttcttccatatctattgcatgcttccatgcatatgtgcaatggatccaatgtcattacactgcacatgtacttcagtcatattttggcgattttaggaagattagtatcatgagactccatttgaaccaatcatctgttgtatgaaggttcaatcctgcattgactctctctgtaacttaatacagtgtattggtgctagtgggtacccagtggttatgagtctattttttggttcattctataccactttttttgataaatggattggtttccattaaatgagttttgagtcaacccacaaacctagagaaaactcttgtattcctaatcaacagaataaataaagtatttatcactttcctacaatgctcctattgtacatttataagattattatgtgtctaacataaaaagctcaagcactttgcgaacttggaaaattacataccttcatctcttatgtattttgagtgtgtaggaacccattattagaccaactccagcagcctccgctccgcatccctaaagtaaggtccttcctcagtatgaacagtgtcgtacatccgtctccgtttctagcagtgttgcacatccgcatccatatctgggcaacagttgccttttagcgtgcatccgtctcctctagcagcctcctcatcccgctccccatccccattttgcacgctataaaagggccggatggggaggctgctggagtgatgaacagtgcctcaaagcgcgcaaaatggggatggtacgctgttcggctgcggtaaaaggcagctgttactgctgccgtgctgcggcttcccgctcaaccacaaaagtactgttgcagcagctgcagcaacaattttcttttgtcatagccgaacagcgtggatgctcctgaaacagagctagcgcatttgactgggatgcctactgagacatttgaacagatcagccaggccgcaggagaatgccataaaatgggtgtgaaagaagtactagttaaacttggatcgcaaggatctgctgctttgtttgttgagggataggagccaatcagacagccgataattcctgccacagaaggtattgataccacgggggctggtgacactttcacctcagcttttgccgtaacgttggttgaggggaggcctaaggattgcatgggatttgcagttgctgccatgttcttcgatgaggctgagtaccacacaacccctacgaggtcaccctccaatcgcatgaacaggggtctcttctcagatgaagtggcgttaagtgttcatagggagcagtttatcccttctccgtgatctggtagagtggatgggttggacctcaactccagtggcgtggagttccagaaaattgcatttcatgaacttcgtcagtcccagtcagctgccaactactccgctactccggttcgtgatggtcataggggttgcagtcattctcgatcaattggtattggtcgtggtgttacgggcagaggatcccgagttccacggacgactagtgagggtcctagaggtggtcgtggagcatgaagcatcttctctcgtggacgtggtatgcctcgacctattggtgcttccttctctggtggccgtggtgccaccagtggtcgtggtgccaatatttcagcgccaaatgccgctcacagtcaagaggacaatgacgacgatcgctttgcacaggtaactcatttttctgacttggtcactccaatatggaagagcaaactgcgtcatagatgcaggcactactgtaatttttagcccaaagttttgaactgttttgtttgaaatatgtacataatctgtaatgtttgtgaactgtttgaatggagaggagagctggagagggcacggagaaatggaccgagacatggaccgtttttcttcagcacggcagcccccagccagtttttcatttgtgaatcctgtcgttggttgtttcttcttttgtacgctacacttaaattatcctagagagtgctttaacatgtttagaatgagtaagcatatatttgaaaagtctt

SEQ ID NO: 36987 - DNA, 4413 bp, Zea Mays
cacagaaggcgtcttcccagcagcgccttcatcagccaccgccgtcgcgtcttcttcagctacaccttccgcaccgcggctgaaaatgcgccgctgccccagatcgtcgtcgtgggctccgccgacatctacgtcgaggtccaccgatccccgctcatcggcgagacggccgcgcgggcggcaagggcgccaacctggccgcctgcggtgcgccctacctacctcgtggcgcgcgtcggggatgacgccaatggccgactactcgaggacgccctagccgacgccggcggcgttgcaccgaccgcgtcgcgcgcgcggccgatgcgccatcgggacacgccatagtcatgctcatgccccacgaccacaactccgtcatcatcgtgggcggggcgaacatggagagctgggcggcggggattggctcggaggacctggattgatccgaaaggaaaatgcagagggagatacccgattgagtcaatccgcaggctgcccaggcgcttgctttttatcaatctcagcttggtttgggcacacatttttctttttttttatgttactgtttgattattttgatctcaattagactgaatagggcaatgtagctttgagcgccatgccacagtttttaggtgtttcctgccacaactatgatgcaccacacttccctagcatcatgtcttacacgtagaagactcattttcatgctaaacttcgattttgctgaccatacattctgtggcaaccgcagcttgccaaaggttaggcatgtcaaactacggcaacaaccaaacatgagagatatatgtttgagaatgaagcaacaatttactgaatgttttgaatatttgatgtttgagtatttactttttgaaattttgggagatatgttggctggctaggttcttctagcacactggtgctgtttagtcagttgaagcaataaatttggtaataacatctaaattcgtagggcaacaacagcaagagaaagtttctcttttatatcttagaaccgtatttagtacaggactttgtatgaactatactttcgattatttgcattgcttgaggttttaaaagttaatgctttgtggttagtttggtgctgtttgtttgagaaaggagcgaggatccactgaagattttattgcttagcgtagtgacctctcagcttttgatttatttttcagaaatttggagagatagtacagtgtgtgtgtgtgttgggggggggggggaggggttagtaaaagattattagtcaatgtataaggaaatttgctactgacatctagctaggtactgttttttcccaaaggatgctgttttggcagcattgatgcgactccattctccttatagtactttatgcagccaaatatgttgctgagtctctctttggttgaggatttagtaactttaatggtaatcttctatggtactctattcatccagaaaagagaagtcaaaaaatttgaggtttgactaaatctataccaaaaatactaatatttatgatataaaataagtatgaattaattataaaatatatttcatagtaaacctagttacagacataaatgttaacactatttactataaacttggtcaaagccaagcttgtttgacttgcacaaatttcatagttgcatcctttttggaacagaggaagtactttctatcacgtggtataggatcactgtagggggttattatattcaagctgtatttgggccaacctgtgggatcatttggtaatttctaggttcagtattgttaccttggtctttgattagttactttgctactattactgtcttcaaatgtatggtgtcatggcctcatgggtggcctcaatcctctttattcaccttgacaaccaccagagcaaacctctgtagttactagttaccttgccaaactcagctagccaagtagacctctgcttcctgtctgaaactaaaactcagttccatctagctcaactatgtgtagacattggcatgcacaagccagttgttccttgcaaatcgtggttcttgggaacaaaagagttgattaattcaacatttgcatccacatgacaattggaagaaaacaatgcctgtcaccctaacaactcgcctccattaaatgaactctaatttgaaactttcagcctccaacagtctctgttcgtagatgaaatgaatatctatgtttttttttctagtgtttaaggggcttcccatgactagatggtgggatcttctaaaatctcaattgttgaagtgctcaatggaccaattatatgttttgtctgaccaacaagaatagaaatccaatggtgcagaagggtatcttcaagttctatttcttccatatctattgcatgcttccatgcatatgtgcaatggatccaatgtcattacactgcacatgtacttcagtcatattttggcgattttaggaagattagtatcatgagactccatttgaaccaatcatctgttgtatgaaggttcaatcctgcattgactctctctgtaacttaatacagtgtattggtgctagtgggtacccagtggttatgagtctattttttggttcattctataccactttttttgataaatggattggtttccattaaatgagttttgagtcaacccacaaacctagagaaaactcttgtattcctaatcaacagaataaataaagtatttatcactttcctacaatgctcctattgtacatttataagattattatgtgtctaacataaaaagctcaagcactttgcgaacttggaaaattacataccttcatctcttatgtattttgagtgtgtaggaacccattattagaccaactccagcagcctccgctccgcatccctaaagtaaggtccttcctcagtatgaacagtgtcgtacatccgtctccgtttctagcagtgttgcacatccgcatccatatctgggcaacagttgccttttagcgtgcatccgtctcctctagcagcctcctcatcccgctccccatccccattttgcacgctataaaaggtattcatcactccaacggcctctccatcccgttccccatccccattttactttgcgtggaggagagagaacccggagaaaaagggagtgaaattggttgcctctattttgcagggccggatggggaggctgctggagtgatgaacagtgcctcaaagcgcgcaaaatggggatggtacgctgttcggctgcggtaaaaggcagctgttactgctgccgtgctgcggcttcccgctcaaccacaaaagtactgttgcagcagctgcagcaacaattttcttttgtcatagccgaacagcgtggatgctcctgaaacagagctagcgcatttgactgggatgcctactgagacatttgaacagatcagccaggccgcaggagaatgccataaaatgggtgtgaaagaagtactagttaaacttggatcgcaaggatctgctgctttgtttgttgagggataggagccaatcagacagccgataattcctgccacagaagccatgttcttcgatgaggctgagtaccacacaacccctacgaggtcaccctccaatcgcatgaacaggggtctcttctcagatgaagtggcgttaagtgttcatagggagcagtttatcccttctccgtgatctggtagagtggatgggttggacctcaactccagtggcgtggagttccagaaaattgcatttcatgaacttcgtcagtcccagtcagctgccaactactccgctactccggttcgtgatggtcataggggttgcagtcattctcgatcaattggtattggtcgtggtgttacgggcagaggatcccgagttccacggacgactagtgagggtcctagaggtggtcgtggagcatgaagcatcttctctcgtggacgtggtatgcctcgacctattggtgcttccttctctggtggccgtggtgccaccagtggtcgtggtgccaatatttcagcgccaaatgccgctcacagtcaagaggacaatgacgacgatcgctttgcacaggtaactcatttttctgacttggtcactccaatatggaagagcaaactgcgtcatagatgcaggcactactgtaatttttagcccaaagttttgaactgttttgtttgaaatatgtacataatctgtaatgtttgtgaactgtttgaatggagaggagagctggagagggcacggagaaatggaccgagacatggaccgtttttcttcagcacggcagcccccagccagtttttcatttgtgaatcctgtcgttggttgtttcttcttttgtacgctacacttaaattatcctagagagtgctttaacatgtttagaatgagtaagcatatatttgaaaagtctt

SEQ ID NO: 36988 - DNA, 2476 bp, Zea Mays
cgctgcggtgctactgctaccgtgctacaccatcaggaatcggacgcgggacgctacaccaccaccacagctccccacctccaccctcgccgcgagttgctcagtcgcagactcgcagcgagcgaggcgggggcctcactcagcgcggggcgaggcgagcgtcccgggtgggcagcgtcgcggtcgcgggctcgatcgggttgggacggggaggtagggaggaggggccagggatctccactctcgtccgtgcgggagcgcgggcgtcgcatgcggcggcgcgccggggcaaatgctggtagcctcacgggcggaggagcgctcacgctgaggcggcggccggggagcgatgcaggcgccggagcagcagccgcagcagcagcagcagcggaggaagggttcgtcagagatggacttcttcagtgaatacggcgatgcgaacagatacaaaatccaagaggtcattggcaaaggaagttatggcgttgtttgctcagctgttgaccaacatactggtgacaaggtggcaatcaagaaaatacacaatatctttgagcacttatctgatgctgcccggatcctacgtgagatcaaactgcttcggctattacgccatcctgatatagttgagatcaagcatataatgctgcctccatcaaggagggacttcaaagatatctatgttgtatttgagctgatggatacagacctccaccaagtcatcaaggcaaatgatgatttaacccgagagcatcatcaattctttctctatcagatgctccgtgcactgaaatacattcataccgctaatgtttatcatcgtgatttgaagccaaagaatatattggctaatgctaactgtaaacttaaaatatgtgattttggattggcaagagtggcattcaatgacactcctacaacagtattctggacggattatgttgctacaagatggtatagggcccctgaactgtgtgggtctttcttttccaagtattcgccagctattgacatatggagtatcggttgcatttttgcggagatcttaactgggaagcctttatttcctggaaaaaatgtggtccaccagttagatttgatgactgatctcttgggtactccatcacttgatacagtttccaggattcggaatgagaaggcaaggaggtacttgagtagcatgaggaaaaaacagccagtaccatttactgaaaagtttcctaaagcagatcctgctgcactcaaacttttgcagaggcttttggcatttgatcccaaggataggccaactgctgaagaggcattggctgatccgtattttaaaggcctcgcaaaagtagagagagaaccatcatgccagccaataacaaaaatggagttcgagtttgagcgaaaaaaggcgaccaaagaggatgtcaaggaacttatattcagggagatattggagtatcatcctcaacttctcaaggattacatgaatgggactgagaaaacaaactttctatatcctagtgctgttgaccatttcaggaggcaatttgcaaacttggaggaaaatggaggaaagagtggggcacacgccgcttcatcagacaggaagcatgtttcgctcccaaggacaaccacagttcattctaatccaatccctccaaatggaacctcccaggttcctcaaaagattcccacaggtagaccaggaagagtggttggtccagtaataccatttgagaacgcagctgcagttgatccatacagccaacgtagggtctcaaggaatccagtacttcctccaaccacgtcgaacatgtcagcctatgcctaccaccggaagtcagacaactcagacagagagctccaacaggagctggaaaaggaccgcatgcagtaccagccagcacagcggttcatggacgccaaggtagtatcacagatgtcccctgacttgaggtcttcctactacataccaaaaggtgtcccaaaggctgatcccgcagatagaaccgctctgcattctagcatgattcatgggatcgcccctttcagtggcattgcagctgttggaggtggctacaacaaggtcaatgcagttcagtatggagtttctaggatgtactagttctagttgcattggccatctccgaattcctcagctgatgagttgaagtaataacatggcgaagaccagatgtaggtaccgaagaactgccataccggctctgagccaaagatagaaaacatggaatacggatctcggatcgaggacgtgtccgtcagattgaaaacagatactgggcagcagtcatggttctgtccattggacctagcttttcgggaagcaatgccatcgccccgcggaaacggtaaaataaaaggagaaaaaaaaatgcagtactgtcagttgattgctgcttataaagaagcaaagggggcagagacgacgatttttacaggggtagcatttgaatttaactcagca

SEQ ID NO: 36989 - DNA, 2270 bp, Zea Mays
cgctgcggtgctactgctaccgtgctacaccatcaggaatcggacgcgggacgctacaccaccaccacagctccccacctccaccctcgccgcgagttgctcagtcgcagactcgcagcgagcgaggcggcggccggggagcgatgcaggcgccggagcagcagccgcagcagcagcagcagcggaggaagggttcgtcagagatggacttcttcagtgaatacggcgatgcgaacagatacaaaatccaagaggtcattggcaaaggaagttatggcgttgtttgctcagctgttgaccaacatactggtgacaaggtggcaatcaagaaaatacacaatatctttgagcacttatctgatgctgcccggatcctacgtgagatcaaactgcttcggctattacgccatcctgatatagttgagatcaagcatataatgctgcctccatcaaggagggacttcaaagatatctatgttgtatttgagctgatggatacagacctccaccaagtcatcaaggcaaatgatgatttaacccgagagcatcatcaattctttctctatcagatgctccgtgcactgaaatacattcataccgctaatgtttatcatcgtgatttgaagccaaagaatatattggctaatgctaactgtaaacttaaaatatgtgattttggattggcaagagtggcattcaatgacactcctacaacagtattctggacggattatgttgctacaagatggtatagggcccctgaactgtgtgggtctttcttttccaagtattcgccagctattgacatatggagtatcggttgcatttttgcggagatcttaactgggaagcctttatttcctggaaaaaatgtggtccaccagttagatttgatgactgatctcttgggtactccatcacttgatacagtttccaggattcggaatgagaaggcaaggaggtacttgagtagcatgaggaaaaaacagccagtaccatttactgaaaagtttcctaaagcagatcctgctgcactcaaacttttgcagaggcttttggcatttgatcccaaggataggccaactgctgaagaggcattggctgatccgtattttaaaggcctcgcaaaagtagagagagaaccatcatgccagccaataacaaaaatggagttcgagtttgagcgaaaaaaggcgaccaaagaggatgtcaaggaacttatattcagggagatattggagtatcatcctcaacttctcaaggattacatgaatgggactgagaaaacaaactttctatatcctagtgctgttgaccatttcaggaggcaatttgcaaacttggaggaaaatggaggaaagagtggggcacacgccgcttcatcagacaggaagcatgtttcgctcccaaggacaaccacagttcattctaatccaatccctccaaatggaacctcccaggttcctcaaaagattcccacaggtagaccaggaagagtggttggtccagtaataccatttgagaacgcagctgcagttgatccatacagccaacgtagggtctcaaggaatccagtacttcctccaaccacgtcgaacatgtcagcctatgcctaccaccggaagtcagacaactcagacagagagctccaacaggagctggaaaaggaccgcatgcagtaccagccagcacagcggttcatggacgccaaggtagtatcacagatgtcccctgacttgaggtcttcctactacataccaaaaggtgtcccaaaggctgatcccgcagatagaaccgctctgcattctagcatgattcatgggatcgcccctttcagtggcattgcagctgttggaggtggctacaacaaggtcaatgcagttcagtatggagtttctaggatgtactagttctagttgcattggccatctccgaattcctcagctgatgagttgaagtaataacatggcgaagaccagatgtaggtaccgaagaactgccataccggctctgagccaaagatagaaaacatggaatacggatctcggatcgaggacgtgtccgtcagattgaaaacagatactgggcagcagtcatggttctgtccattggacctagcttttcgggaagcaatgccatcgccccgcggaaacggtaaaataaaaggagaaaaaaaaatgcagtactgtcagttgattgctgcttataaagaagcaaagggggcagagacgacgatttttacaggggtagcatttgaatttaactcagca

SEQ ID NO: 36990 - DNA, 2028 bp, Zea Mays
ctacatccatccagcacaccataccctagttcttccttcccgaaccctcgcgccgccaccgccgccgtctagcattttcctacacccaatctgatctgaccaagccctctgaacaccaccgcccatcctcctcctcctccgccgccgccgcccaagatgggcttcgacgtgggcctcgtcccctacaaccccgacgggtggggtccacctgaagttgccgccgcgccgccttccctcggtggtggctcctcgtctgtccccttcgctcccttctcccgctccgacaagctgggccgcatcgccgactggacgcgcaacccgccgggccccggggctttcgccgcagctcgcgacgccgtcttcgatttcgcggggctcgaggactccatcgggctcgcgtccgcggacgactcgtccttccgcctcgtcgatggcaaaccgccgccgcggcacccgcggtttggacctcgctggcgcttccagcagcggccccaactcccgcagcgccgcgacgaagaggtcgaggctcggcgtcgcgaggccgagaaggagcgcgcccgccgcgaccgccactggcagcagaaccgccgcacgcaccaccagttcaaccgcggcgggccctcctcgtcgtctgccaaaccgtccgttgacatccagcccgagtggtcggtgaaggagcagatccctttctcatccttctccaagctctccttcgccgtcgccgaccagcccgaggatctcctcgtctgtggcgcagtcgagtactacgaccggacctacgatcgcgtcacccccagggccgagcgtcgcctcgagcgcttcaagtcgcggaacttcttcaaggtcaccactaccgacgaccccgtcatccgccgtcttgctgagaatgacacggccacggtcttcgccaatgacaccatcctggccgcactcatgtgtgcgccccgtagcgtccagtcctgggatatcgtaattcagcgtgttggcaacaagttgttcttcgacaagcgtgatggctctcagcttgatcttctcaccgtcaacgaaaccgcccaggaggcactccctgaggccaaggaagacatcaactccgcgcattcgctggcggttgaagccacatacgtcaatcagaacttctcgcagcaggtgctgctccgcaatggtgagaaggtcacgttcgacgagcctaacccgtttgccactgaaggggaggaagctgcttccgttgcttaccgctaccgccgctggaagcttgatgaggagacaagcttggttgctcggtgcgaggttcatgccgtgagcgttgatctacgcggcgagcgccagttccttacactcaacgccctcaacgagttcgatcccaaggtcactggtgttgactggaggaagaagcttgagacccagcggggtgctgtgcttgccactgagctcaagaacaatgccaacaagcttgcacgctggactgcccaggcgctgcttgccggcgcagacatgatgaagttgggttatgtgtcacggctgcacccacgcgaccagtacaaccattccattctcagtgtgatcgggtacaagccaagggatttcgctgcacagatcaatctcaacaccgcaaatatgtgggggatcgtgaagtctattgtggatgtctgcatgaagcttggagaggggaagtatgtgcttgtgaaggacccagtgaaaccacaggtccggctttatgaagtgccaaatgatgcattcgagaatgactacgttgaggaaccactccctgaggaagagcaagtgcgtcccttctccgaggatgttgatgccagcgcgaaggaaatggatgctgccgcagaagcggaggctactggaacaactgcaggcgctgagaagagtggtgatgtcgctgctgtgtgaaggcggtggctacaacctgaagaggtctttttcggaccttgaataaggttaccttggctagctatctactacaatcatgggcatctggatacaggcaagttgcgtcgcggagcacaccacgggagggag

SEQ ID NO: 36991 - DNA, 899 bp, Zea Mays
aattctcggaagccggccgatgtcgagtccaaaattgcaaaaatctctgccgtgcctctcgtctctcttctcaggcgccacgcaaaacgttctccgttttccctctccggatccggcccgcgggggccaggagctaccgatgatccggaccgcaacggtgcgagcgcgtctcctcctatcgcgctcctacgtagcacaggcacaggcagcttctcgctggcctctcgtccgctggaaggcttcgcatcttggatctgtacgctctttctatcagatggacattacaaggcaatacaaaaataaaagtttgactgcaagagggtgccatagctcccctgagagtcaagaattagcaatgaaaagctgtgttccatgcaactctaaggatttaggtcccatgtcagaagattctgctaaaaagttgcttgaacaggtgaatggttgggaactgatcactgaaggtggtgttctgaaattacatagaacatggaaggtgaagaactttgttaaaggacttgagttctttcagcttgttgctgctattgctgaggaagaaggtcaccatccagatcttcatcttgttggttggaataatgtgaaaattgatgtttggactcattctgtcagaggtttaacaagtaatgatttcatccttgctgcgaagatcaatcatctcactttagacggcattataaggaagaaagctaaatagccaatgtctcagaagcaactcaaatatgcaacttatatttgtttggaattttgtatgcgcagcgatggagaagccaaatgttgaggacacctcgccctgagtgagattaacttgctgaaatgtacaagtttttcgatggtgataccctagtaagggtgatgtcgtacttatagatggctaaatggac

SEQ ID NO: 36992 - DNA, 743 bp, Zea Mays
aattctcggaagccggccgatgtcgagtccaaaattgcaaaaatctctgccgtgcctctcgtctctcttctcaggcgccacgcaaaacgttctccgttttccctctccggatccggcccgcgggggccaggagctaccgatgatccggaccgcaacggtgcgagcgcgtctcctcctatcgcgctcctacgtagcacaggcacaggcagcttctcgctggcctctcgtccgctggaaggcttcgcatcttggatctgtacgctctttctatcagatggacattacaaggcaatacaaaaataaaagtttgactgcaagagggtgccatagctcccctgagagtcaaggtgaatggttgggaactgatcactgaaggtggtgttctgaaattacatagaacatggaaggtgaagaactttgttaaaggacttgagttctttcagcttgttgctgctattgctgaggaagaaggtcaccatccagatcttcatcttgttggttggaataatgtgaaaattgatgtttggactcattctgtcacgatggagaagccaaatgttgaggacacctcgccctgagtgagattaacttgctgaaatgtagtgccttattcagtagctcattttaccttgttattaattagtaatttgcatgagtagacgttgaatccatcattgtacttggttacctacttaccttgcctgtcagttttggaaagacacatggtcgagtaaacataccga

SEQ ID NO: 36993 - DNA, 829 bp, Zea Mays
aattctcggaagccggccgatgtcgagtccaaaattgcaaaaatctctgccgtgcctctcgtctctcttctcaggcgccacgcaaaacgttctccgttttccctctccggatccggcccgcgggggccaggagctaccgatgatccggaccgcaacggtgcgagcgcgtctcctcctatcgcgctcctacgtagcacaggcacaggcagcttctcgctggcctctcgtccgctggaaggcttcgcatcttggatctgtacgctctttctatcagatggacattacaaggcaatacaaaaataaaagtttgactgcaagagggtgccatagctcccctgagagtcaagaattagcaatgaaaagctgtgttccatgcaactctaaggatttaggtcccatgtcagaagattctgctaaaaagttgcttgaacaggtgaatggttgggaactgatcactgaaggtggtgttctgaaattacatagaacatggaaggtgaagaactttgttaaaggacttgagttctttcagcttgttgctgctattgctgaggaagaaggtcaccatccagatcttcatcttgttggttggaataatgtgaaaattgatgtttggactcattctgtcacgatggagaagccaaatgttgaggacacctcgccctgagtgagattaacttgctgaaatgtagtgccttattcagtagctcattttaccttgttattaattagtaatttgcatgagtagacgttgaatccatcattgtacttggttacctacttaccttgcctgtcagttttggaaagacacatggtcgagtaaacataccga

SEQ ID NO: 36994 - DNA, 822 bp, Zea Mays
aattctcggaagccggccgatgtcgagtccaaaattgcaaaaatctctgccgtgcctctcgtctctcttctcaggcgccacgcaaaacgttctccgttttccctctccggatccggcccgcgggggccaggagctaccgatgatccggaccgcaacggtgcgagcgcgtctcctcctatcgcgctcctacgtagcacaggcacaggcagcttctcgctggcctctcgtccgctggaaggcttcgcatcttggatctgtacgctctttctatcagatggacattacaaggcaatacaaaaataaaagtttgactgcaagagggtgccatagctcccctgagagtcaaggtgaatggttgggaactgatcactgaaggtggtgttctgaaattacatagaacatggaaggtgaagaactttgttaaaggacttgagttctttcagcttgttgctgctattgctgaggaagaaggaggtttaacaagtaatgatttcatccttgctgcgaagatcaatcatctcactttagacggcattataaggaagaaagctaaatagccaatgtctcagaagcaactcaaatatgcaacttatatttgtttggaattttgtatgcgcagcgatggagaagccaaatgttgaggacacctcgccctgagtgagattaacttgctgaaatgtagtgccttattcagtagctcattttaccttgttattaattagtaatttgcatgagtagacgttgaatccatcattgtacttggttacctacttaccttgcctgtcagttttggaaagacacatggtcgagtaaacataccga

SEQ ID NO: 36995 - DNA, 913 bp, Zea Mays
aattctcggaagccggccgatgtcgagtccaaaattgcaaaaatctctgccgtgcctctcgtctctcttctcaggcgccacgcaaaacgttctccgttttccctctccggatccggcccgcgggggccaggagctaccgatgatccggaccgcaacggtgcgagcgcgtctcctcctatcgcgctcctacgtagcacaggcacaggcagcttctcgctggcctctcgtccgctggaaggcttcgcatcttggatctgtacgctctttctatcagatggacattacaaggcaatacaaaaataaaagtttgactgcaagagggtgccatagctcccctgagagtcaagaattagcaatgaaaagctgtgttccatgcaactctaaggatttaggtcccatgtcagaagattctgctaaaaagttgcttgaacaggtgaatggttgggaactgatcactgaaggtggtgttctgaaattacatagaacatggaaggtcaccatccagatcttcatcttgttggttggaataatgtgaaaattgatgtttggactcattctgtcagaggtttaacaagtaatgatttcatccttgctgcgaagatcaatcatctcactttagacggcattataaggaagaaagctaaatagccaatgtctcagaagcaactcaaatatgcaacttatatttgtttggaattttgtatgcgcagcgatggagaagccaaatgttgaggacacctcgccctgagtgagattaacttgctgaaatgtagtgccttattcagtagctcattttaccttgttattaattagtaatttgcatgagtagacgttgaatccatcattgtacttggttacctacttaccttgcctgtcagttttggaaagacacatggtcgagtaaacataccga

SEQ ID NO: 36996 - DNA, 964 bp, Zea Mays
aattctcggaagccggccgatgtcgagtccaaaattgcaaaaatctctgccgtgcctctcgtctctcttctcaggcgccacgcaaaacgttctccgttttccctctccggatccggcccgcgggggccaggagctaccgatgatccggaccgcaacggtgcgagcgcgtctcctcctatcgcgctcctacgtagcacaggcacaggcagcttctcgctggcctctcgtccgctggaaggcttcgcatcttggatctgtacgatggacattacaaggcaatacaaaaataaaagtttgactgcaagagggtgccatagctcccctgagagtcaagaattagcaatgaaaagctgtgttccatgcaactctaaggatttaggtcccatgtcagaagattctgctaaaaagttgcttgaacaggtgaatggttgggaactgatcactgaaggtggtgttctgaaattacatagaacatggaaggtgaagaactttgttaaaggacttgagttctttcagcttgttgctgctattgctgaggaagaaggtcaccatccagatcttcatcttgttggttggaataatgtgaaaattgatgtttggactcattctgtcagaggtttaacaagtaatgatttcatccttgctgcgaagatcaatcatctcactttagacggcattataaggaagaaagctaaatagccaatgtctcagaagcaactcaaatatgcaacttatatttgtttggaattttgtatgcgcagcgatggagaagccaaatgttgaggacacctcgccctgagtgagattaacttgctgaaatgtagtgccttattcagtagctcattttaccttgttattaattagtaatttgcatgagtagacgttgaatccatcattgtacttggttacctacttaccttgcctgtcagttttggaaagacacatggtcgagtaaacataccga

SEQ ID NO: 36997 - DNA, 1275 bp, Zea Mays
cggcatcccataagggggttgtgactggtcgtgacaacctttaaccgatgtattacgtgtattatctcctaattcaacctcgtcgacggcggcggcggcggcggcagcgcgctgcagtactctcccggccgctacaacgagaacaccttccaggggctggatttcgtgctgtctgaggcaaggaagcatgggattaagatgattctgagcctcgtgaacaattacgacagctttggagggaggaagcagtacgtgcagtgggcgagggagcgggggcagaccattggatctgacgatgagttcttcactaacccctttgtaaagggcatctacaagaaccatatcaaggccgttctgacgagggtgaacacgatcaccggcgtggcatacaaggacgacccgacgatcatggcgtgggagctgatgaacgagccgcgttgccagtccgacgtgtcgggccacgccatccagtcgtggatcacggagatggcggcgcacgtgaagtccatcgacgggaaccacctgctggaggccggcctggagggcttctacggcgcgtcgtcggcccgcaggtccgcgaacccgtcggggtaccaggtgggcaccgacttcatcgccaacaaccgggcgcccgggatcgacttcgccaccgtgcactcgtacccggaccagtggctgggcggcctggacgcgcaggcgcagctgcggttcctgggcgcctggctcgacgcccacatcgccgacgcgcgggcggtgctgcgcaagccgctgctggtggccgagttcggcgagtcgcgccacgacccgggctacagcggcggccaacgcgacgcggtgttcggcacggtgtacgccagggtctacgactcggcgcgcgccggaggccccgcggcgggcgcgctcttctggcagctcctggcggaggggatggactcctacggggacggctacgaggtcgtcctcccgcaggcgccgtccaccgccggagtcatcgccacgcagagccggaggctgcagggcctcgccagggcgttcgtgcgcgcgcgcaaggcccaccaggggaaggcgggcaagggcgctaagggtggcggcaactgaaagtggggtgaaacgtgtgtggcgagatcaagaagagtgtgtgtgtgtatgcgtcgatgtctcctcgagatgatttgaagattcatccgggagccaagagttacttctacatactatctagcgttgtcctccatgttttattatttagaggacttgcgtttataaaaaaaataaaaa

SEQ ID NO: 36998 - DNA, 1303 bp, Zea Mays
gtattggactatttccgttggccgttgctgttgccagctggcctactcttccaaccagttcctagacttgtatctgaattcattcagggtgatgtgctcgtggttccacttcaaacctcaatgggttaatgggattattggggtgagatgtatatgattcaggctttataataaattgtactggtgtctataatattattcagaataggttgaaaattgcaatttgtcactaccgcctgctcgagttagacaactgtgttgcatcctttttctgtaggaaggaagaatgaatgcatttaaattgcaaaatgttgacatcttatgcctcacaagaggagcatgattactttcaagttttaacaaagcacaactttataatcagcaaactagtacaagagttttacatcactctttactgtacaagcattcattcataggggaccataattgcacagcacacattagctatgggcagacagagggttccctggtttctatagcataactgatgatttgctcacagtctatagctatttacacataacacaattatgtatattctctagcttcttttatttcttactcaagcaatcataaacttcttaatacaataacatatcagcacatttccttcaatagctaagatatctagttcatgtatggtggttcttcacatccttcactcctgaaaacaaagtaaagccgtactccataagtttatctgaacagtgaccatacttgcaatgtacttataataggaatcatttatgttgcatttggatctgagtagcactgaaacacggcactccttttattttgtactagcttttgtatatacatacctgctagttttttttaaaaaaaaaacagacgacttgtcaattgtctacttacctatgatattcagattatgtatatttacagctgtctcctcaaggagtatgaatggtcctgctctgttttaactctcaagtgagcatgttgccttttgcagaagacacatagaagtggaacaaattcttttttacagctggctactatttataggcgcttgacgagggtgaactgctgtacacgttgccgtcctccttgcagaaggctcaaagcttgaaaggctacagattctcatgttttgaactcaggatccactacaagggttgtgagtgcacgtgggctagatggaaatgggaatctcaatatcttctgttctgcgtatataggtactcctgagttccttcggcctgaacgggacacacgagacccgcagaagcagaatatgtgctaaagcatggactatacctgg

SEQ ID NO: 36999 - DNA, 1565 bp, Zea Mays
cataaacttcttaatacaataacatatcagcacatttccttcaatagctaagatatctagttcatgtatggtggttcttcacatccttcactcctgaaaacaaagtaaagccgtactccataagtttatctgaacagtgaccatacttgcaatgtacttataataggaatcatttatgttgcatttggatctgagtagcactgaaacacggcactccttttattttgtactagcttttgtatatacatacctgctagttttttttaaaaaaaaaacagacgacttgtcaattgtctacttacctatgatattcagattatgtatatttacagctgtctcctcaaggagtatgaatggtcctgctctgttttaactctcaagtgagcatgttgccttttgcagaagacacatagaagtggaacaaattcttttttacagctggctactatttataggcgcttgacgagggtgaactgctgtacacgttgccgtcctccttgcagaaggctcaaagcttgaaaggctacagattctcatgttttgaactcaggatccactacaagggttgtgagtgcacgtgggctagatggaaatgggaatctcaatatcttctgttctgcgtatatagatttgtaccttcattttttcctcaaaaaagggagaaacatgcagactacaatgaaaatacatatgaaatgagattattctcaaattatggcatgtgggtctaccatcgcaatccaggaaccttttatctcttcaaatcacagggtatatatggtgatcattatcttgggttcgaagtattgggtgtaggtgatagctggacgcatgcactcaatttccatctgtagccgaccctgtactacggcatgcagttttcttactctacattgaaggctggtggcaaactgagaggccatggcaatggtcaaggtcaatggtgtcatcatcttagcgatgggatggtaaaatcagaaagaccataacgatgatggctttgcagtttgcaccgctgaggagaatgatgtgaagccaaggttggcataacggatatagcttgcctctactgtaagggttgatttggtgacaagggatcacgggaggattggaggggattgagggggaaataaactaatttcctcctcaatccactctaatcccccgtgatccttgatcaccaaatcagtcctaaaggaatgaaatatattcggtgtacctgcatggcatcctagtaaactaaggccttgttcgtttacatcggattgtgcccggaatcgttccggctaatcaaagtttatataaattagagaagcaatccggctcggaatcattccggcccaccaatccgacacaaacgaacaaggcctaaggctgtagccagcgtatcgtgtataactgtatgaccgtgcaaaacacttttacactgcacactgcgttatttgtgaagtttgaaatctctgaaataggagatgagatgattaaagctgttggagatagcctaaaccagtaaaatgtaggctaccgagcaaataatgctatttgcttaggcatatgagatgcag

SEQ ID NO: 37000 - DNA, 1186 bp, Zea Mays
gaatagatagagcagtggtgagtatagaaaaatctctaaaaattcgacatcccgattcccgtccgtggccgaaccctcgtcttcccgaacggctcgcgtggagctcaccgaccgacgccgagttcaatcgctagagggcatgaaggctgccggggccgaccggcgaactcgccgctggccctacatcactagatgaggtagcacctgtgcgaattgtggcaggaggccccgaggccaggtcccgccgcttgtcccgcacctttcaaatgcgtgggaaccgcgatcaagcacagcgtcgtcaccatcaggctggctactatttataggcgcttgacgagggtgaactgctgtacacgttgccgtcctccttgcagaaggctcaaagcttgaaaggctacagattctcatgttttgaactcaggatccactacaagggttgtgagtgcacgtgggctagatggaaatgggaatctcaatatcttctgttctgcgtatatagttttcttactctacattgaaggctggtggcaaactgagaggccatggcaatggtcaaggtcaatggtgtcatcatcttagcgatgggatggtaaaatcagaaagaccataacgatgatggctttgcagtttgcaccgctgaggagaatgatgtgaagccaaggttggcataacggatatagcttgcctctactgtaagggttgatttggtgacaagggatcacgggaggattggaggggattgagggggaaataaactaatttcctcctcaatccactctaatcccccgtgatccttgatcaccaaatcagtcctaaaggaatgaaatatattcggtgtacctgcatggcatcctagtaaactaaggccttgttcgtttacatcggattgtgcccggaatcgttccggctaatcaaagtttatataaattagagaagcaatccggctcggaatcattccggcccaccaatccgacacaaacgaacaaggcctaaggctgtagccagcgtatcgtgtataactgtatgaccgtgcaaaacacttttacactgcacactgcgttatttgtgaagtttgaaatctctgaaataggagatgagatgattaaagctgttggagatagcctaaaccagtaaaatgtaggctaccgagcaaataatgctatttgcttaggcatatgagatgcag

SEQ ID NO: 37001 - DNA, 1774 bp, Zea Mays
aagcactctgatcctaccatttacaagggacatactgttgagcctattgattatatgaataccaaacttcaaagttgcagtcgtagtaaagacctgcaacaaacaagattacatgttgggtcgtatcatcttgtcttctgattttatagcgctgcagagtggagtctatttacttgctatattttttgtcacaccatagctggctttgggagcagaaaacttttcagtgaatgacccaacgaacatattttatttgtctttgagaacatctttaatcttttattttcatctggacagaattcttagttcatttggctgacatattagagaatctataactactgaatggtctgtttttcgataaaatctattgcaaacaatcgctactatcaactgaaattatattataagcatgcatatgtatttatgatcgataattatcctgtcttatactaaaatattttgcttacttcagaagaggcaagtatattatgcagcactgatttgacttgtctacctgatgaactgtccggctatcaacttcaaggcgtctccttcggggatataggactgaatagcatcgatttaatccagtgcaatgatacaatggtactacctggactgcagaataactggtatgatgatctagattttagcaatgaaactatggagttcccgttgctagacggaggtctgtttgcataaatgcctcagcgggccctatattttgatcatgtccttatgtgagttctttggtatgttcccgtatagtgcctcctgtagggctatactaatctaactttatcatgtggtggaagggtttaatttgtagtctctccacttttgataattgtctgtattatagaccgtggcaccgtgccatggtacaatgactgcaatatatactcttcacaatgatcaaaactacatatgaagactgtcaattttttgcctcgaacaactgacttttgcagtaaattcttactctgatgcagcattgcacatatgtgagacttataaatttcactgaaaatttttagtatgaggactcctacaggggctgcagaatgtgaagctatttgttgatctaacctgaaaaaaattatatatgtgaaggtggtagtgatacggctgtatgcagagttgtagtgcagttcagatgcagagatagaccgtcatgcacggccgggtgtggccgagagcctcggccatggcggaggcgctctggtctggcaaccgcgacgcgtcgggcaggaagcggtacgccaaggcgactgaccggctcatcgactggcggcagcgcatggtcgggagtggggtccgggccgagcccatccagtcgctttggtgccgaacacgacccggtgggacgcccgcttagcggcagagtcgggtggaggcggtgacaggtgcgcgatcaggaggaggcggtggtaggggcgcgctggggaggagggcgaggtcagcatgggcgtggtggtagggaggcagcagatccagcgtgcagactgcagagacgacgtgtgtgagggagaggtgggaagggagagtgagggtgaggacgaaccgacgaattctcaaaggtactcgtggagcgcgacgagcgagccgaaggtgatggcggtgtcggagcagacggcgtcgaagaagggccacagcgtggcggcggggaccgcggcggcggggagggagagggggagaaggtgaggcggcggagtgtgcggagggaggtggatgggagaggatagagacagtgcacggtgagagagatgac

SEQ ID NO: 37002 - DNA, 1696 bp, Zea Mays
cgctcctttccttcttggccgacgacggcatggactgggcagcggcgcgcacgagcgatttttgcggcaaaccccctgcgagaacatcagcacagctataagcctttagagagaggagaagtgctgctaagagctagagcaaggtcttgagcgtatcgttactctaccgaggtgctgccaagaagtttgtaagcagccacggtgttgttgtaacccaactcaatactgaaaggctctatctgtcatactgacagatctgagcaaacggaggaaggagttgaaatagactccaagcccaggtgtggctaactccaacgaggacttggcaagcatttcaggcttggccgaacctcgggataaatccttgcgtctgtgtgctctgtattgtatcctgactctctgtcttactcgatattatatctgcacttcaatacttatccgtggtataagttttatttgaagtgcaggacattttgagacaggatctccgattccgctgcaacctactcgaagagtcttctcactccactgcgtattaagtcttcgagtagagtaagaatttaagttttaaagtaataagttttattcgcctattcacccccctctaggcgacatccagatcctgttcccgggtcaaagggaactctcagaactaagataactagaagaggaggcacccattcgggcgccctatcaggagacagtaaagagacaatagtatttgcaatataaccatatacataagaagttattgcaaagatatatacatgtataataaattgacatcaaaatcagctggatcacaaatcaagcatcaatgttttgtttagccatatgttacacaaattgcttgggattcatgtgtaccaaaatttcatggttgtcagttttaaataccagtggtccgaaaatagcacacacacacatcattcattgcaaattcgagcatcatattagtaagtgttgcctctacataaaagtaagaagttcatttcttcggcagcaacattagcaggagatagcctgcatcttcgctggacacaatagcaacatgttaagaaagaaagcttcgctggacatgttaagaaacaaagttttatcaacagatgtttcataaagcttataggaaatgtttcatgagaagcagcctcaaacttactggtcaaatggtttaaacaataaatacctgaatgtagaatctgatcgtgtaaatcccttcttcgttgtgctcaggagtgattataacctctgatatacagggagtagcaccaagaatttattgtggaaaaataatatcataaggtttctagttcaaaggtacttttagtatgctattactgattatagggagaagcaccaaaaatttatcagcactatggatctagttattcagcactgattatagggagaagcaccaaagagcgataagaatccctccatcctaaataacatcactatatcctatatggatctagttattcataaagtaaataatttcactctaactaagaagaagaaacaaacgatctgcacaactgagcttattgggaaaactttaccacatattatataatcatctagtatccatcaacagtaacagcaatcagggagaatgcgtctaggaatttcttagtcagatcataccatttataattgaaataaataaaaatcagtcagattctaagaacaacacaag

SEQ ID NO: 37003 - DNA, 1760 bp, Zea Mays
tttctcaagtgaagtcaagtatgtgaagttgtgaacaaatgagtagcagactagcagcagtacacacgctacgttacctcttttccccttgctgaggttctgctatttttttaattaaaactaaaaccctattttatccaagccgataacttagagagaaaatacgcagatctactgcttccgccgtactgtaaaaaaacagtgcacagtactataggcagtattatccacagaaaaacgagcaagatatcatctttttttactttttggcccactgacggaggtcggaaggcatggacagatcgcgttttagaacgggtggtagctccggcgcagcccactgacgttggcgaacagcccgacgagctcttgcttgtacggtaggacgaggcggatccggaacggcggtgaggaacacgaacttctccttgccgtcgctgtggctgcggccgacgaggcggtcgctgatgcggcgccagcggaggacggagcccgtggagccgctcttccggcaccggcgcggggacgcgggcgccggcgactgcccgccgggcgcccacaggcagtagctctccgccggcacgccctgcaggtcctcgtccccggcgccgccgccgccgccggaggcgtcgtcctcgtcctcgtcctgccacgcctgcgcactcgacgatcgcccgtccggctcccgcgcgcggaactcccgctcctccagcaggagccggcccagcggcacccgcaaggtggccgtctccggctcctcctcctcctcctcccgcagcggggacgggggccggccgaagatcgggtacacgggcacgatgcacgcgccggcggcgaccggaggaacggggaagctgaactcgtcgccgtcctcgtcctcggcctccacggctggagacaggggctccggaaggggagtggtggcgccaacagagaaggaggccggtccggccgtgtcacgctcacggtgtgggatgagccgaaccaaggcgtgaggcgcgacggatacggcacggggagcttccgtgacgctggccggtgggccgcgtcacgaaaccgggaccacgactcagtgggaaacagcgagggtagttggggagcggtgggctgagccgcccagcccgcggaggtgctgtctcgtttggggcgcaccggtgaggtgagccgttccgagggtgtggcgcgccgtgctggggcagtggggctggtgagccgttccgaggccaggccaagccaagccagaagaatgaggcgggtagcggcggtggcggttctagaagtccgagaacgcgaacgggatggggtcagcacgcgagacggacgggttcgcctttcgcggaagagaacagaagcgaaccgcgatcagcttcgagggtccgcctgttcttctggtggttcatagaacgcggacgtggcttaccgcttaccgaaccgcggcggaggaacagggctcgttggattggatcgccagcactgcgcaccgcacaccggacacgggcaggctacggatttggtgggctttggtcgctaggaaactcaagacacacgaataataccaatcatatcttcaacacactatattttttatttttttctatacaacaaagaaataatttattataataaacaattggagaggggatgtcttactattatttcttatatctcttttcgtggttggatccttcggaaagagaataaaaatatatcttcgacggaaatatttagggtctcgatctgcgatttatgagaatggccag

SEQ ID NO: 37004 - DNA, 1782 bp, Zea Mays
gcgacggcgccgtggacctccactccggaaattccggccgcacgtcgcccgtctcgcccggagtccggatccctaggctatacaagccatgccttcgcatctctctattcccctgctcctttgcgcccacgccaacccagttaccagagccgccattgccgccggccctgcgtatcggcaacaccacacgaccgcagccattgtatcacctattcggtccgagacgcttcgattcagctcgctgttggtgttcccggactcgctgcgcgggattgatggcaggtgacgcgtgaatttgtcgtcggagttgaagctccgccgtgaccgcgctcactgccgtggcccggaacatttgcgctactaacctcggtggaggtggttctcaaatctcaagtccatccacgcggaatcggacttgacctttatttaaggcgcagggctgcaggcccgttccctcagctgaccatacgcaaccgcacaggaaacaggaccgtcgccgcgaaccgccgtactctataccgacttctccgaacctcctgtcctccataccggcgctcctaccctcgctgcaatggagttgaggaggcctgcgccctctcctctcgtcgacaactacgtggtacctggtgatgtcgtcctggacctctccgagatgaacaaccagaccattaaactcggcgcgggcctgcgtcaggagtgtgacaccatcgaggcgactagtgctgggaagttgcggcagttgaaacccaacaagtattgtattgaaaactcccagaagcggtataaaccttctgtagaagataccgttcttggtattgtggtcgacaccaaaccagacaactttttggtagacataaagggtcctaatttggcctttctaccagtactttcatttgaaggcggtacaaggagaaacatacccaagttcaagattggtacattaatatatgctcgagtggtgaaagcaaatagtatcatgaatcccgagctctcatgcatggatggtaagttttttagttttcagctcaatgtccattttccttaattgatcatcagaacttcagaagtatggagtaccaaattttcttcgtcttagcaaatatatcctcattacctgtgcgaacctctcagcttgtcgaatgatactctgtctggcctgttttcttttggctttgtctgattgttcttttactgtattgattgctgttcctattttcaagctactgggaaagctgccaaatttggacagctgaaagatggttatatgttcgacacatcaactggcatgtcacgaatgttgttaagttccccaacgtgtccagttctggaggtccttgggaaaaaactgtcgtttgagattgctgttggactcaatggtcgagtctgggtgaatgctcctgcagcaagtactgtcattcttgtatcaaatgcaattatgaggtcagaatctttgagcggcataaaacaaagagctatggtagaaaatctattggagagattgtcatgatgataagtcagcaagcattagtctaaagtaaaatgggggaatttccattgtgtcagttcaaagtaaaagtaggaaagtttgagatcaaagtgactatccacatcaaaagattattatgtatcacgtgtcgtagtatacagtacactatactctttttttattaaatttatcaatgtatttatcaaagtcttgcatcccttgtttaatattcgggtctagtgcaaccgtgagagcaccaggacacggttttgaagcagtcttttcatgtttgtggg

SEQ ID NO: 37005 - DNA, 1023 bp, Zea Mays
acctctccgagatgaacaaccagaccattaaactcgacgcgggcctgcgccctctcctctcgtcgacaactacgtggtacctggtgatgtcgtcctggacctctccgagatgaacaaccagaccattaaactcggcgcgggcctgcgtcaggagtgtgacaccatcgaggcgactagtgctgggaagttgcggcagttgaaacccaacaagtattgtattgaaaactcccagaagcggtataaaccttctgtagaagataccgttcttggtattgtggtcgacaccaaaccagacaactttttggtagacataaagggtcctaatttggcctttctaccagtactttcatttgaaggcggtacaaggagaaacatacccaagttcaagattggtacattaatatatgctcgagtggtgaaagcaaatagtatcatgaatcccgagctctcatgcatggatgctactgggaaagctgccaaatttggacagctgaaagatggttatatgttcgacacatcaactggcatgtcacgaatgttgttaagttccccaacgtgtccagttctggaggtccttgggaaaaaactgtcgtttgagattgctgttggactcaatggtcgagtctgggtgaatgctcctgcagcaagtactgtcattcttgtatcaaatgcaattatgaggtcagaatctttgagcggcataaaacaaagagctatggtagaaaatctattggagagattgtcatgatgataagtcagcaagcattagtctaaagtaaaatgggggaatttccattgtgtcagttcaaagtaaaagtaggaaagtttgagatcaaagtgactatccacatcaaaagattattatgtatcacgtgtcgtagtatacagtacactatactctttttttattaaatttatcaatgtatttatcaaagtcttgcatcccttgtttaatattcgggtctagtgcaaccgtgagagcaccaggacacggttttgaagcagtcttttcatgtttgtggg

SEQ ID NO: 37006 - DNA, 871 bp, Zea Mays
ctccgtttgcatgttgatattggagggcatggaattgaactgggttgaataccgaatcagccatgtatataccttctgtagaagataccgttcttggtattgtggtcgacaccaaaccagacaactttttggtagacataaagggtcctaatttggcctttctaccagtactttcatttgaaggcggtacaaggagaaacatacccaagttcgagattggtacattaatatatgctcgagtggtgaaagcaaatagtatcatgaatcccgagctctcatgcatggatgctactgggaaagctgccgaatttggacagctcaaagatggttatatgttcgacacatcaactggcatgtcacgaatgttgttaagttccccaacgtgtccagttctggaggtccttgggaaaaaactgtcgtttgagattgctgttggactcaatggtcgagtctgggtgaatgctcctgcagcaagtactgtcattcttgtatcaaatgcaataatgaggtcagaatctttgagcggcataaaacaaagagctatggtagaaaatctattggagagattgtcatgatgataagtcagcaagcattagtctaaagtaaaatggaggagtttccattgtgtcagttcaaagtaaaagtaggaaagtttgagatcaaagtgactatccccatcaaaagattattatgtatcacgtgtcgtagtatacagtacactatactcttttttatattaaattatcaatgtatttatcaaagtcttgcgtcccttgtttaatattcgaagggcgggtctagtgcaatcgtgagacctgtctcactaaatcaccaggtcacggctttgaagcagtcttatcatgtttgtggg

SEQ ID NO: 37007 - DNA, 537 bp, Zea Mays
atggagacgagggaggagcgagttggagttggaggccgagctggacatgaggaagatgccgcgagtggccctgtcaccgacggccggactgggcaagcgtcatgggagagacgcgcggttgggctgggcgagctccaagctggggcgaactgggcgagatctgggatggggaaaaagctccggccatgggggaagcaagtggccgggggcgagcttgaggccgaacgccggccaggagcagagcggagctgggaggacgcgcaggggaggagggaggagcggctgggcgcagggaagaagcaccgacgagctgggacgcgcgcaggggagctccagggcgcgcacaggaacttggaccagggagcagcgacggccatggaggagagagagggaagcgcgcagagagtagaaagaggaggggcaactggacgcgagcaggaagaagctcgacgcgcagagggagaaatagagggagggagagaagcacggctgggaagaagccagttttcagcggcgggatttttcctccaggaatga

SEQ ID NO: 37008 - DNA, 808 bp, Zea Mays
caaacaaaccttaaacctaaacttcactgtacgacgcaaccttctccacgacatgcaaccgatcactaaatctataatataataattacttgagcaagtcatcgacgttctcaaacattatacttacataatcaaccacgaccgcatttatcagctatatgagcgaggcactaaacttattattcacttaaccactcctcacacaataatcattttaaacttgagtttcgcgtgacacgaccacttcataattatgtacacactccattgatgcattaaacgaggcatcacgacatacatctaatacctcgacaacgcacttgtgcaaagaataaaataatcttcacgtacaacaaattcaaccaatccattcatcaaaccagttaataagaatagcaaaccagctcaccgtttaaatagctgactcgaatccacgagatcggtaattttctccgattcaggcaatttgtcgagcgtctggtgaacatcacgctgctagcttcgtcttcacccgattcttgggatttcttgatgacgcacggaacaacgacgagatcgagtctggagcaagctgacgaggtgtggtcgagcaggttagcgtgagctctggcgaggacacgaatccagtgagggctccggcgacggcgaggtcacaagctctagcgacacggggttaagcggcgaacgcgttcgacgtgcaaacgtgagccgaaccgaaggtgagaatcgatgaagcgaagttcactatggaggaatcagcgacgttgctgcacacacgacacgacgacgaacgacgacaaccgacatg

SEQ ID NO: 37009 - DNA, 2299 bp, Zea Mays
tcctcactccgcacttccgcagtatcaactggcctcggccgcacaaatcccccactccgcagtccccgacggcccacggcagagccaccagcagcagcaggcagccccagaaatcgagcaaacaagctgctccatggcctcaccaacccgaacaccatcgcctccgccggcggtcgagcccatcgcgccttctctctcttcagaacatccgcctgtcaacccctcctgtgacggatccttctcgccggagaacccagcgccagctccacctcctccccctgctactccgcatcctcatactcccagcgatagctctccttcctcaactccgcatccctcggcgccacagcctcttccatctccgcctcctcatactcccgacgatagctctccttcctcaactccgcatccctcggcgccacagcccccaccatctccgcctccgccgagcgctgatgcttctcctccactttcgcgacagggcgaaacgtcaccgccgcgcccatcgccccctccctcacccgctccagtatccccgcctactccagcgccggcgtcctcggaagccaagtcggagcaggaggaggcggaatcggctagcgaatcggggagcatgacgctagccatcgttctagccaaaactgaagatgcaacgccgccgaaggcctcctcggccgaggcgtccccaaccagatcgccgcagaaggaatcggccgtcaccatcgcgaagctcctctccgccgaagacctcgcggcgatggaggctaaggccacgccggacaaggttacacctccgagcgacgctgggtccctcgccgctgccgccgccgttactaccgttgggggagtcagtggcggcgtggggtccaagaggtggctcctaggcggcgtcccggagaaggtgcggcgcgctgagctgaggagggccgagctagggtttagggtttcggccgccgtgttctgcctggtcgcgctctccgtcatggcggccgataccacgacgggctggtccggcgactccttccgccgctacaacgagtacaggtacgtacttgctgcgagcgtcgtgacttttacctactgtggattccagttggtagccgaggtgcattacgttgtcacagggagacacatgattcgagccccattccgcagctacttcaatcttgccatggatcaggcaattcaaatctgctcttctgtactatttgtttgttgttgtgaatttatgatagcatggtttgacaagcttccagccctagtgatctatcggtgtcagaaaactagatcaaagtatatggtcatttaataactgcaaaacagaatacagctgaacaaattggaggaactattgcattgttttcttataaagaagtcctagactgcggatgaacaatactcctaggtggaaattatcgtttcccaactggtatatgtctatatatcattattgttcctactggatttggtttcgtacatgcctattttgtttagttggtataaacattgcacatatacattacagtgcgccatcaggtgtaagtaaaagaggtgttccatgaagtgatgaataacacctttccagttcctccaacttcaaacatttatcatgataaaagggagctttcagaaatgaaaatgattggtgcagcgcttgaggttttggcacatttatgagtaatactatggaatctgtgtgcttatggatctcacctgattcgccaccaaagtcatgttatttagatgttccttgtgcaatgaatgtatatcagtatttttacgttttgctctactagttttacgcttgcaacttggcttaaaatttgttggcaagtgaccgaaatgtgtctgaatggtcttttttatgccgattgcagatgttagcttacctcctgttgtcagcatcttcagcagcgctttctcgtaatggtgtttggatgtcgcggtttggaggggatcagtttaccaaactgatcaatgtctcggcttccatggcattcctagctttcattgctctgggtcttaactcggtgatctctgcttactgcttcttcagcttggtttcatagagctaccgttgtgcattgcatgatgtgaataatactacctgtatgcttcttggagcactgaaccttgatttatgtgaaatttctacatgatttctgtgaaatccctaaactccagtgggcctatattgtagcagtacattgagtcaaggttggcctttaaaattttggaagcggatgtaccaaggtttcatgctggtcgttatcgttttatactgaaagtctgaaagata

SEQ ID NO: 37010 - DNA, 2505 bp, Zea Mays
gcggaggagccgcccgaggacgggtagcgtggccgtgcctgcatcatcgcccacaggcgctggacaaggctgtgcgttcgggtccgttcgcgatttatttggccagaatcggctggggaatcggtcccaaacaggcttattcttcttccgttcacccccctccctctctctctctgtcctccttgcggcggggacgagccgagcgccgccgccgttctcgtgctattcgcctctcacgagcagcacccaccagcgtaaggccgacattgctggatgcgggcgcagttcattttcctttgtacccaactaagtgcgggtccagtttattttccaaggaccgcaggggaaacagcgaagcctgcctctgttgccatacagatgatgatcctgcattgcaggagcatggtggtgtgtcgagagattgtcacacggcagttactatcctgtttgggaacacgaagattaagcactctattaagaaatgctaacctgtctaatgttcatatgtttgtccagtgttggccgcaatatttagattatgtgcaaacaattattaagatgtgtgaactagcattatggtagatggataataaactattgttgtagcagatgatctatgccactcagtgctagcatatatggttttgtaactgctttacaagcagtgtaatttatgtagggatataccggatgcatcagtaactgacagctcacgtttctcatttggataaatcgagtataacattgtcctagattgtctttggattataaaattagtaacctaggtttaggcgccattttgatgatcgaggataggccaatcttctaaaacaaatatggtttcaattaactttcactttcttttccaatatgtctatatctatgtgtaagaagaaaatgctctgcctctactgtttcttagcagcaaatctattttttcttcttcttcagatcatccgtctgcttgcttcacaatccatctaatggaagaccattcatcatgggactatcttccagttgagcacattagaactcctgtattcaactctggagttgtttccgaagctagcaatggaggcaacgacttctcaatatcattggatgctgtcgtccctgatgatatcctggagaggattttcacattcctgcctatagcaagcatgatgagggcaacatcagtgtgcaagagatggcacgacattatctgttcaaggagatttctgtggacccacatgctgcctcagcggccatggtacttcatgttcacctctaataaaactgctgctggttatgcttttgaccccatcctccgcaagtggtatgatttagagcttccttatattgacaagagcagctgctttatctcttcttcttgtggcctagtttgcttcatggacaatgacaacaggaacaccatttctgtatgtaaccctataacaaagcactccaggaggcttttagagccgcccggtgagacattgccagactacagtaccattgccatgaatgtggatcggctgtcccataagtactccattgcattggcgaaatctaagcagattcctgaagattttgtccgatgggacttttcagtatacaagtacgactcatcgagtggttcatgggtaacttctgtgagggaagtgttcgttggttggagaggaggtgataatagtgtcatatgtgacggtgtcctgtactgcttgattcattccactggtgctcttggcaatgtcaacccccgtcatggccttatcatgtatgaccttgccggtgaaccatccgagacttcgttgatgcaaacgtcaatctcagtaccttgttctctcacgtgtggccgtctggtaaacttgaaggagaagctggttctggttggtgggatcgcaaaacacaacagacctgatatcattaaaggcataggaatatgggagctccatgaaagacagtggcatgaggtagctcggatgccccacaagttcttccaaggatttggtgaattcgatgatgtttttgcctgcagcggtatagatgaccttgtctacatacaaagctatggtgcaactgctttgcttgtttttgacatgatgcaaaagcaatggaggtggtccgttaaatgccctgtgagcaaaagatttcctctccagctattcactggcttttgctttgaaccgcggcttgatatcacagtttaatatgtacaaaattgtgcttttgccttttagtggagtcagaatcatcatgggccaaatccaggttttctcatgtgggggctggtccatccattattgtctgagatggtgcccccatgactctgcagcaccagcacggtgcatacgagccagagacgccattgatgaggtttcgacgctagctgctgtctgctgtgtgcgaatagtgctcagctgaggccagtggcagtgccacagggtactgtgagaccagcaagcacagaacatatacgtaatatatacatttgtatttgaaaaaataaagaaaaaacttgtc

SEQ ID NO: 37011 - DNA, 1953 bp, Zea Mays
gcggaggagccgcccgaggacgggtagcgtggccgtgcctgcatcatcgcccacaggcgctggacaaggctgtgcgttcgggtccgttcgcgatttatttggccagaatcggctggggaatcggtcccaaacaggcttattcttcttccgttcacccccctccctctctctctctgtcctccttgcggcggggacgagccgagcgccgccgccgttctcgtgctattcgcctctcacgagcagcacccaccagatcatccgtctgcttgcttcacaatccatctaatggaagaccattcatcatgggactatcttccagttgagcacattagaactcctgtattcaactctggagttgtttccgaagctagcaatggaggcaacgacttctcaatatcattggatgctgtcgtccctgatgatatcctggagaggattttcacattcctgcctatagcaagcatgatgagggcaacatcagtgtgcaagagatggcacgacattatctgttcaaggagatttctgtggacccacatgctgcctcagcggccatggtacttcatgttcacctctaataaaactgctgctggttatgcttttgaccccatcctccgcaagtggtatgatttagagcttccttatattgacaagagcagctgctttatctcttcttcttgtggcctagtttgcttcatggacaatgacaacaggaacaccatttctgtatgtaaccctataacaaagcactccaggaggcttttagagccgcccggtgagacattgccagactacagtaccattgccatgaatgtggatcggctgtcccataagtactccattgcattggcgaaatctaagcagattcctgaagattttgtccgatgggacttttcagtatacaagtacgactcatcgagtggttcatgggtaacttctgtgagggaagtgttcgttggttggagaggaggtgataatagtgtcatatgtgacggtgtcctgtactgcttgattcattccactggtgctcttggcaatgtcaacccccgtcatggccttatcatgtatgaccttgccggtgaaccatccgagacttcgttgatgcaaacgtcaatctcagtaccttgttctctcacgtgtggccgtctggtaaacttgaaggagaagctggttctggttggtgggatcgcaaaacacaacagacctgatatcattaaaggcataggaatatgggagctccatgaaagacagtggcatgaggtagctcggatgccccacaagttcttccaaggatttggtgaattcgatgatgtttttgcctgcagcggtatagatgaccttgtctacatacaaagctatggtgcaactgctttgcttgtttttgacatgatgcaaaagcaatggaggtggtccgttaaatgccctgtgagcaaaagatttcctctccagctattcactggcttttgctttgaaccgcggcttgatatcacagtttaatatgtacaaaattgtgcttttgccttttagtggagtcagtgttaagctgtacctttgtttgcaaaaaacgggacatatatgcactatgcttatcaggtttccaagttatcccttgaactgcgtcggcaacatctggatagcatgtttaatctgttgcacataattgagtgacaggttatccttacaggttagaggttacagcatgaccaggctgataaagtttcggtgctgtaaataatgtcgtctgctttgtttttgttcgatatcttgctatccgctatgttttgagcccacaccctattctatatgtcatagctgacatttgtccctttccggtcttaatggacaacttctactgttcacattttgtttcttgtgtaactattcatccatgctggcccagcatcgtctgaggcggctgctgctgctgctgctgggaacagcttagggcactgatct

SEQ ID NO: 37012 - DNA, 1385 bp, Zea Mays
caaagttcgaacgttggcccctggcgggactcgttcataaccttccgatccagcagccacggcttgcatcaggccgtccgttcaaatccccgtaaccgtgagaccccaaatccgaccacccgcccgcccgcccgccaaagccttccgtcgtctcgccctcccgcacccgatcgagaaatcctagctccgtcgctcgccggcgatggaggcgccggacgaggaggccgggctggggctccctgagggcgagcggcttctggaggtggccctcatctccgcgcaggggctcaagcccccgtccggcgtgcggcggcggctgcaggcgtacgcggtggcctgggtcgacgcggggcacaagctccagaccctccccgacgccacgggcggcctcgacccggcgtggcacgcgcgcctcctctttcgcgtgcgggaggcctcgctcgccgacgactcgcccgccgccgtctccgttgagatctacgccgccgccgccgcgggctcctggcacttcggcggggactcgctcgtcggctcggcgcgcttcctgattggcgaccaccgcctcctgtcccgcccggtcggctccccgtccatgttcgccgtcggcgtgcgccgcccctccggcagggtccacggcctcctcaacgtggccgcgagcctcgtcgcggtgcccccgtccccggccgcctgccacgccctccgcctctcgccggccgtctccctcagcgggccctccgtggcgccgaccccaagccgcgtgctccgcgtcctcaaccgcgcgcaccggacacctccaccgtccccgaggcttcttacgcccaagaagcagcagatggtggacgacggcagcgacgaggccgaggaagacgcgagggggatgggcggggtcgtgttctgcgggccctgcgtcggaccattaccaagaaagatacgcacgagcccctcagacgagaacctgcaggccttcgctaacatcttctctggcgggctcaggcattgccggacagagccctcatttttgaggagtccagagtataagtggactgaggactgaaggtgaatgttcttatcttcatggtacgtattctcttatgtttaactatgttttccagcagtgatgcctgtgggtgttcagtgccaaggaattggagattggtgattttggttatgcatggtcgtttgaattttttatatgctgtaacccatactgtgaattgttgtgggttgattgaactttaaaggaattgcagaatcttgagttagccagttcatttttctttttgagtaacgggtgaaactggggcatgaatatgatagttggctcccactcagtgttctatggtgttttccctactcacatctttcatataacagctgtaggaaac

SEQ ID NO: 37013 - DNA, 3415 bp, Zea Mays
cacgattgcacggaatggtttgtttacatgagatgtgttccaaatgtaagtccaaatgttatgtatataacatgaactaagcaagagctatatgtcctgtctcctatgtgtgtgtgtaagtgtgttcatatgaatcatgttttgccatagcctataagtattgtcaataccgccaataccaaaaatatgtacatgttgttagcattgttaataccgcctattaccaaaaatatatacatgtggttatgctcgtcatggaatataaagcaacaactcaaataaacttgttgcgtgaccaatttgtcacgaatgtttgagcttgtttgagtctatttagctactagttacctgctaataagtagttaacatagatctaaaccaattgaaacaattagtatctcattagatggatatatatatacctaactactgtacctaatcaattgacgaaaatgcgctcccgctaattgagggtctattagttttagtgccaatccatgtcgacgggataggattggctaggtttaaatccttattaattcaaaataatgttttcaatccctaatccttagtaattctaacaaccaggagtagaggtaggtagctttagtaaaacaacactttattcgcctgcctattgttgtgcgatctaaacacctcgcaactaacagttagctagatagtagtaatattggccatagcacggacggttctaagaaacaccattgaaaaatcatcgctgtatagcttctgtgtactagtgaattagccagctaattctagttagatctagtggctaatataactattagctagctggtagttagtgacgtaattttaaatagaattaactaactattagccgcaattagagatcacagcaaaggatgcaaactacccaattaccatgcatgtataagcatgagactacgagctcgtgatcaatcaaggagtaggacaatgttctacgaagcagcattcacagcaagctgtactcgctctcctggtcctggagcaggtactgtgcatgtaccctggagtccggcggtcctccaacaagacatgacttgtttgcgaagtggtacaagaaaagcagcggctacacactatttctgctgagcgacgtgtgcacgcaaagcaaacctgttcggtgtcctttatgtcatatcaacgcatcagtgaggaaaacactgaagagcagagccccgtggtggatgcagtggagctcctccgtcgcccgtccgcttgctgtggctccgaccccatgcctcttaaaaattaaacacagggattgataaaactatttttagcgacaccattgtccaaacacagggagtagtaacaatatcacgccatgcaatgttgctgttatccttgaacatgaatatcattctactgatcgatcttaaactcctttatccagtgcatactgcatccatgcaccaaccatatatgcttggccactacttaataagtacctgcaaaaaaaaaaggttcgagcctgtttttacggacaaatccatgactgagagatgtggtgtagtcgatgcactcgtcatttgagaagcggacaagacgaagatctcagtactgttctggacaaacgagaaagtacactgtgccagcaagtaccacgctgcgcctacgataacacaaaaaatgatccaaatgttcctatttggtttgaaggatccagatattttaagaatccgtattaatttcttataatcagaatctagatcgtttagctacttacattttgtagacatttatttaaaatacacttggctaacacttgttcgtggtctatattttagagacacttgtgtctttttaatataccacatccatagtatcatctgttaatagcaagaacgtctgaaatactggaattctgaaatcttcatacaatcaaatgcgaaaatcggtacattttaaaactctagtagatttagtatatagattatcaacatccttccgcaaccaaatggggttagttgtcgatggatattgataatttatgaactaaaatctgttaaaactccaaacaatactaattctagcattagactgtattatcttaatatctagtatccctgacgtccttaatatttataaataatactgaagatatgatgtactaaaaagacaaaaatagcactgggcaaggatgttctaaataaatatacatttaattatcaaaaaaatctaaagtaggcaaacagttcagattctgactatcaaaaaatacggttcttgaaaaatagctggattagaagaatgcaaaggaaaccaaacggggccttagcaagctataagcatagtagttcattagttctaattcgctagagaaatatcctatattcctaccataaaaaaaggaagagaagtgcagcgtgcgaatcaaactttgtttctgcataggaagaactaactagcagcaaatgaacatgtcatacagcgatctgaccccggccaaacgataccctaactaagaatagttcacgaggcaggaccttttagatatattaagatttcaacaacgctaagaatagttcatgaggcactgcggattgctttcatctagtggggagaaaatctgatcagatggtagaacgtacacagcaaaggagaaacagagaagaacaaaggtaataacaagcgccagaatattgttgagaaactcacaaattaacaacatagctgtaataagtgtgcaccaaatattacagaacaaaactcgaggttattggtactgaggtaggtggtttgatttcatgcacaagcgtttgagcaaacaaaagggagcacccttcagtccaaccacaaacagcgtagagcttgattttagctcccgcgccacccactcggctaccaagaccagacctgtccatggttcttggcaggtgaatggatgagtcggcagctaatgaaaccctacagccatttcagagtggactgaagagagctctcttccagagaaaacatgaacccaaaggccaaaccagacgaacaaacaccagcagcacaagtgaaaccaataataggtggccatgcaactgcatgttcttgttcttaacgcagcgtatagatgtgtatcatcactgcatcccgtggctagatagaggagcatgtatacacgaacggccgccatgccagtaaaagaaaccagatttttaacatcccagaggtgaacgcaaacgatggtgtaactcaagagcttacgaggcaacgagaacaggcaagcgatatggagaagataaactctgagacgatgataccaccggaaacggaagagagactagagaggaacaggccgttcattggtcttctggctctctggggaatgctaggtatgaaatggctcatggatccaaaacgcaaggaagaatggtcttaaatagttgaagaggag

SEQ ID NO: 37014 - DNA, 2435 bp, Zea Mays
ggacgacagccgcattagcatacgctccagtgctccaccacacgtttaatctagtagcgttaaagcacttcctaataatttcgtcgccgcctcgggagagacagagagagagagagagagagagagagggacagtgtgctgtggaggttcccgacgagaggagagagagagagagagagagagtggcgtcgacgacgacgagcttgagcttgagctgtgcagcaactgggaggtatggggaggagtaaacaaagagggggcagcataggaaaagaccaccggacgccctcgtgaagcccagcttttcgtgccgcgttcagcctcctccgccagcgcgcgagattctctccatccgcccaggccccagcacagcaatgccgcgccgctggcttcttctggctccctgcgcgcggctgggctgccgtcgggatcgccgcggcaacggccgcgcccggcacgtgttacaaaaaccggccgtgcaccagccgatcatcggcagttgtcaaactccccccgcgctacatctcggagagccaccgccaaagcttcgaggcgggcggcggctacggctggtactttcgtgattatttcgctaaacacacttttaagttgtccgctgtacggcagtagattacactgttaaatagtagaatgagacataagacgagagacagtcttacagttctccagtctattttaccaattcgattttttttctgcaaataaagttagttactatatgctttttatgtgctcaaaagttttttttaacaataataacattgaccataagccagccggtctacgtgtgtgcagtcttcctatactctccaacaatagctctaaatttcgtcctctaaaaaaatattctctaaattttacaaaattctttaaaaagtttcatcctatacatttttttatctccaacaacgttctctaagttaggtcttctatgtctacagtgttaacagactttattaagggcattgttttttttcatttcgttaactatattaacagtaattttgacgactcaagaaaatcaattactcattcatttacagaatcacaaaaataaattatttattcatttacgtaatttttcatcattacaactaatttctaaacattcctccatcaccactgtatccttgtgacctcggtgccgtttggttcagcttctgggcggcttctggccgccagaagctgaagctctaaccaaacggccagcttctcgggcggcttttcctcgcagcgcttcgaatagaagccagccgcctacggtgcccgagaagcggccatcagttggcttcttgcgaacgcttgggaaacgtcgctagggttctcgcgcacccaccgcgctgccgtcgctccctctcctccccacaccgacggcttcgcagggttgccgcatgcacaccggcgtcgcagctccgtcctgaaggcttctccccattacgtcgtcgtcttcgcagatttccgcatcaacagggattcttggacttcggttccaacatccactgcagcgaagcttgaaccctacttttgtctatgtacgcacagaattacatggatcagactccatagccgacaaggcaattggaaggatgcaagagattgcggacaagatattttccgtagctcgggaaacaatccgtccaggacgcgggttgacctcatttgaggctaccaaactacgtgtagcattggaggacattgcttgcatgcttgagcaagactctctggtgttgcaagagaatttggacaacgtgaacaacgtaaacaaccctggtcacagcagctacgaaccgtcagccttgtcctcaccacccccagctgatgagtaccttagtccggattgggactttgctgagcactttgaaaacttctggggtcttgaatatgactcggaccagatgccatcgtttagtgataatgaaatggacaagtctggcaaagtgattgctaagtgggatagtagagcaacaaaaattttcacagaaatttgtgtagaagaggtcaatgcacggaacaggccacaacatttcctaaacaccgaagggtatgctaacctcataagaaagtttaaggaacgcactggtcgcacttacacaagggatcaaatgaagaataggtgggactccttgaagagaatgttcacccagtggaaaactcttaatgaaagggctacaggtcttggtcgagaccctcatactggttcaatcagtgcgccagatgagtggtgggctaagcaaaatgaagtaagtagatctttttttttgtagactaacaatagtattggccatctgaaactaggaactaccatgttgctgcaggcaatgccaggttgtattatgttcaaaacaccccccctagagaatgaggacgagctaaaggttatgtttggacccattgtctgcacaaatgaaagaacc

SEQ ID NO: 37015 - DNA, 955 bp, Zea Mays
ctgatttgggccagagggttgtgcacggaattcaacattgagaagctgcagcttgttgaagctgagaaaaagaagattagacaagagtatgaacgcaaagagaagcaggttgaagtacggaagaaaattgagtactctatgcagttgaatgcttctcgcatcaaagttcttcaagctcaggatgatctagtaaacaaaatgaaagacgatgcgatgaaggaactcctccttgtcagccacaaccaccatgaatacaagaaccttttgaaagatctaattgttcagggcttgctccgtttgaaagagccagctgtattgctccgttgccgcaaggaagatcaccatcatgtggaatcagtactgcattcagcaaagcacgagtatgcatcaaaagcagatgtccatgaaccagagatatttgttgaccatgatgtgtacctaccacctgccccaagccatcatgatgctcacggccagttttgctctggaggtattgtcttggcttctcgagatggaaagattgtgtttgagagtacacttgacgccagactggaagttgttttccgcaagaaattgccagagatccggaagcttctttttggccagactgcagcttaattgactcaatccgcagatgatggtatggctcgcttctacctagtggtttttgccaaattgatcgtttacggtattcatccccaatgtacaaactaccttatttgttcattactgtcgccgagcaccgactgtttgtacttcgttcgctccgaggaataagaataaagcactgctagacttcccattgcgaagctgaataaatattgtaaagccatttgtcgtgctgaacttcccgttccgttcctgtcctgtcctgttgatgtgtatatctagttaatgtcggatacggttcttgtgggaaaaataaaaaataaaagttcttgtaaagttcgccagc

SEQ ID NO: 37016 - DNA, 2145 bp, Zea Mays
cctcgctccccaacccgctccaccagtccatcatcacccacggcccaccccgcgcttctcggattccagctgttccctcggatcctttgcccgtcccatggcaacgcctaggtggctgtggctgccatgatgggcgctctcgccacgccaccccgccaccccgccatgtgcgtgccgcttttgacagaagaggacgaggcagatctccagtccccggccctccgtcccctcctcctgcgaaggctcctccagcaccactagctagagctaaccccgtgctgctgctgctgctactacctgctgccgcgcgccgttcgttgccgtgcgggcgtgttgtggtccgctgatctcgttcgcgggacgccggggggtggtggtggtggcagcggtggttggtggtgcgcggcgtgaaagaaagaaagaaaaaaaaaaggcccgccgctttgcgctgctctgcttccgtaggtgtcacgagatttggccctagcctttcgctttcctttttcatctcgctcacaagggaagggaccgagggacgagggagacgttggggaggggagcgagcgagccgtaacatccgagctgttccaatggcgacccctgccgttgctttcgtcgccagcgctttgttggggcggtggtagcgctaggagcggagcagtactaggttggtaggtggttgtagctttgcgcgtgacccgagcgcgcgctcgctcgctcctgtgcctctctacctcgcttgcgtgcgccgggaaggcagtgggtggctggtcggttctcgcaagaggttgctggtgctgttcctcctcccccggttgatgagcatggggcattgctccgagcagcggacggggttcgaggtgactaaggactggaacggcgccgaccagttcgcgatccggtccccgcggggggcgtccgttcgggtctgcctgcacggcgggcaggtcgtctcgtggaggaaccaccgcggcgaggagctcctcttcagcagcagcaaggcaatcttcaagccgccaagagcgacccgtggtggcattccgatatgcttcccacagtgaggacaatattaatgtttcaatttatcagtttggaaactgtggaacattggagcagcatggatttgcaaggaacaagatatggacaatagacgatgaggctccacctctaaattatggtgataataacagcaacaaagcttctgttgaccttctgctaaagccatctgaagatgacctgaagtgctggccacactgttttgagttacgtctcagagtctctctttcaatggatggagacctttcactgatatcacgggtcagaaatgttaatgggaagccattcagtttcgcatttgcttaccatacatacctttctgtttctgacatcagtgaagtgaggatagaaggtctggagacccttgattatcttgacaaccttagccagcgggaacgttttaccgaacagggagatgccataacatttgaatcagaggttgatcgagtctatgttggctgcccaggcgtaatagctgttcttgaccatggaaagaaacgcacattcatcgtgcggaaagaagggcttcctgatattgttgtgtggaacccctgggagaagaagtccaagacgatggcagacttcggcgacgacgagtacaagcagatgctgtgcgtggatgcagccgcggtcgagagggccatcacgctgaagcccggggaggagtggacggggaagctggagctctccgccgtggcgtcgaccaactgcagcgaccacctggatcgcccgggcaggctgtagagcgctgggtgggtgggttcgttcgcccctgacgaaaggcatgtactagttttttttcatgtacatgggggcgctaggtccggcccttgcaggctgcagtatcatctacctgtcaggtgtgtcatgtgtgagtttaaacttatgtcagatccaagtattgctgtgatcgacatgttcgatgttcctggactgcgaagtctcaagcgcaggctgttcgtttggctggctttaatccgaaacggcatctatagattgtagctgcagttcgaagcgaacagtaatgaaaacggacggaacagttaggaaaacactccaatcacttttaaatctatattttaatctaaa

SEQ ID NO: 37017 - DNA, 2917 bp, Zea Mays
cggcggctcggcctaccttcccgggtgcgggtatcctcgctccccaacccgctccaccagtccatcatcacccacggcccaccccgcgcttctcggattccagctgttccctcggatcctttgcccgtcccatggcaacgcctaggtggctgtggctgccatgatgggcgctctcgccacgccaccccgccaccccgccatgtgcgtgccgcttttgacagaagaggacgaggcagatctccagtccccggccctccgtcccctcctcctgcgaaggctcctccagcaccactagctagagctaaccccgtgctgctgctgctgctactacctgctgccgcgcgccgttcgttgccgtgcgggcgtgttgtggtccgctgatctcgttcgcgggacgccggggggtggtggtggtggcagcggtggttggtggtgcgcggcgtgaaagaaagaaagaaaaaaaaaaggcccgccgctttgcgctgctctgcttccgtaggtgtcacgagatttggccctagcctttcgctttcctttttcatctcgctcacaagggaagggaccgagggacgagggagacgttggggaggggagcgagcgagccgtaacatccgagctgttccaatggcgacccctgccgttgctttcgtcgccagcgctttgttggggcggtggtagcgctaggagcggagcagtactaggttggtaggtggttgtagctttgcgcgtgacccgagcgcgcgctcgctcgctcctgtgcctctctacctcgcttgcgtgcgccgggaaggcagtgggtggctggtcggttctcgcaagaggttgctggtgctgttcctcctcccccggttgatgagcatggggcattgctccgagcagcggacggggttcgaggtgactaaggactggaacggcgccgaccagttcgcgatccggtccccgcggggggcgtccgttcgggcagaaaaaaacttctctcggtctgattcgagcgttgggttgtcggcgcaggtctgcctgcacggcgggcaggtcgtctcgtggaggaaccaccgcggcgaggagctcctcttcagcagcagcaaggcaatcttcaagccgccaagagcgacccgtggtggcattccgatatgcttcccacagtttggaaactgtggaacattggagcagcatggatttgcaaggaacaagatatggacaatagacgatgaggctccacctctaaattatggtgataataacagcaacaaagcttctgttgaccttctgctaaagccatctgaagatgacctgaagtgctggccacactgttttgagttacgtctcagagtctctctttcaatggatggagacctttcactgatatcacgggtcagaaatgttaatgggaagccattcagtttcgcatttgcttaccatacatacctttctgtttctgacatcaggtatcccaatttggatggttaatcctattttattcaattgagttccttcttaatgcttaacttgatgtgatgattttcactcctttttcggttaagttattggtttatgtcaatacatactttaggtcatcacattaatggcttttttcgcataagagggtttgaaactagtgtgttttcctatggggggaaaatagagctgactattagaatctttgatgttttcttggttaacacatttcctaccagaaggcgtacaaaccttcaaatttatatgaaccgttgaagtgaaatttgtgctgtaaattgacaatgttcatgcaaattcagaatgaaacaacctaaatttgacatcaagttttgttgggtagcctaattggtcagtataccttgcttacaacatttctaattccaaacatccgattggtcaaataagaaatctgatatgttgttattatcatgaagaaatgaatagtcctaacttgcggcttagataaggaaatgtatagtcctaacttgcggcttagtcatcaccaaattacattttgagctatgcctaacacacttccacaatcagtaaagcatagaagtattcttctcagtcaatggtctgttactattcagaagaacaaagaagcatccagttttccagatgatattagacattttttttacatgtgatattgtacacatgttgatcttcgcaacttgattccagtgaagtgaggatagaaggtctggagacccttgattatcttgacaaccttagccagcgggaacgttttaccgaacagggagatgccataacatttgaatcagaggttgatcgagtctatgttggctgcccaggcgtaatagctgttcttgaccatggaaagaaacgcacattcatcgtgcggaaagaagggcttcctgatattgttgtgtggaacccctgggagaagaagtccaagacgatggcagacttcggcgacgacgagtacaagcagatgctgtgcgtggatgcagccgcggtcgagagggccatcacgctgaagcccggggaggagtggacggggaagctggagctctccgccgtggcgtcgaccaactgcagcgaccacctggatcgcccgggcaggctgtagagcgctgggtgggtgggttcgttcgcccctgacgaaaggcatgtactagttttttttcatgtacatgggggcgctaggtccggcccttgcaggctgcagtatcatctacctgtcaggtgtgtcatgtgtgagtttaaacttatgtcagatccaagtattgctgtgatcgacatgttcgatgttcctggactgcgaagtctcaagcgcaggctgttcgtttggctggctttaatccgaaacggcatctatagattgtagctgcagttcgaagcgaacagtaatgaaaacggacggaacagttaggaaaacactccaatcacttttaaatctatattttaatctaaa

SEQ ID NO: 37018 - DNA, 1071 bp, Zea Mays
caaggcaccgcaccagcccgtggccacgcacaggccagccgcctgtgctgtacaagctggaaggacacggacacggacacggacacggacacggtgccgctgccgacggtctcgccgcggcgccggcggaggcggagccgttcctggtgtcggcggcgcggttcggcgtggcgatgctggtgctggacgcgtggcagtacttcatgcacaggctcatgcactccgtcccgtacatgtaccggcggttccactcgtggcaccaccgcgtggcggcgccctacgcgtacgcggcgcagtacggccaccccgtggacgccgtgctcacggagacgctgtcgggcgccgcggcctacctggcctccggcatgtccccgcgcgtcgccgcggccttcttcgtcttcgccaccgtcaagggcgtcgacgaccactgcggcgtcgccgcgccgtggaacccgttccacgccgcgttccgcaacaacaccgcctaccacgacgtgcaccaccagcgcggcggcggccgccgcaacttctcccagcccttcttcgtggtctgggaccgcctgctcggcacacacacgccgtacgcgctcagacagagggacggcggcggcctcgaggtcaaggccttcaagggtcgtcagatgcaatagtatcttaattgttttaggttggcgtctcactacgtcagcctcgttcaccgtttagctttggcttgtaccagaaatgtctggtactgttatcgatgaccatcacatcgtatcttgtgtgataactttatgtatattattgggtacataaacaatagcgtaacacacgttttttagctttttttttcaaaaattcttgtttatgttttttgataggactaatgtcatgtttgcaccttggtgtctgcacagtgacatacgacgtcaatgacttgatgtcataggtcatgatgctagggtattatgtcataaatgacacatgaaatcatctaggtcccaattttgttttggtggttaatgtcaatctaaaattattgtgattaacatgtatttttttacaaaaagaatataagttatgtcataa

SEQ ID NO: 37019 - DNA, 628 bp, Zea Mays
ccgcctgcgcctgatgcggcgacaccggttccgtcgccgcgcgtagtggtggcaacgtcgccttctcgccggtgtccatgcacgcggcgctggcactactggcgcgtgtggcgccacgttggcgcatctgctcgcttttctcgccacaccgtcgaccgaggcgctcaccagcttcgggaggcgcgtcctcgccgatggctcagcctcggcaggtcaagcatgctcttcggcaacagtggctaggtcgacgcctcccacgacaacaataaacgcaactacctggcctccatcgccaaccgttttcccatacttcgccaggtcactactacatgaagccaatcatatcagctgaaccagaggtgactgtgatggagcgtacgcacagagacgagttcaagtcagtgttagcatcttcaagaggagtcttatagcctcttcgtttggctttaatccataatggcttttattgtttttataatgttttgtctatatggattgcaactgtctttaatccgaagcgaacaaccccaacagtagccctatttcattaaacaaggttgtattttgaaaatataagactcgtggccataaaatgtcctccaacagtgacactatttcattaaaattc

SEQ ID NO: 37020 - DNA, 843 bp, Zea Mays
acttcttttgcgctccttgcttccgcttgtagtgggagtgggagtggccgagtgggagaagggaagagatgagcagcagtgaggctagcacgcaagaccatggcgtgccggcgctcgaggcgcaggatagcacggatgaccatggcgtgcccgcgctcgaggcgcccacgcccgaggctacggacaaggtactggccgccatggcgcgtggacggtgaggtcgccgtcgtcgagggcgaggtgaacaacgccggccacacggtgggctccaccgccgtcgtggccgtcgtggggccccgtcacatcgtggtcgcgaactgcggcgactcccgcgccgtgctctcccgcggcggcgtccccgtgccgctgtcttccgaccacaagccagataggcctgatgagttggaaagggtagaatcagcgatgccgccgcggtgctggtggagttcgccatggcgcggggcagcaccgacaacatcagcgtcgtggtggtggagctgaaacgtctgaagtggaagggtggtagacagaatggtaggacgtagtctgtaggagcctccggctcgtcgcgaaatataagcgtgtcgacagagccagagaggcaaagggaagcagccgagcgtatgacggaatgctgtaaaaaaaaaaaaaaacagagagagggctctgactctttgagagctgcacttgtgttgtgaccgctgtattgcgttggttacttggttctttagttcaatactaacaaaatggcattccggccaatggaagtagcaggaagcatgggctgctgtactagttctttcttgtcgttttgttcgagtcaaataagttctgaccgtccaa

SEQ ID NO: 37021 - DNA, 2261 bp, Zea Mays
agtcagtccccgggccttgctctccctccacttccgccgcgacgatctcctcccacccgtagaccaacaacaacggtactaaccagtaccagccccgcatgcctctcgcggcggctgccgcggccgttgccgcatgtccttcgccgatcggcctcacccgctctttgtgccgtatcgaggcgcatccgcggcgccggcggaggttccggttggaggcaaattcgtcggcgtctacgtccgctcccgcgccgaccgcggcggatgagggaggcggagcggggttgtgccctgtggtcaggttcgacatggccgacttcaccgtcgccgaccgcgtcagcgtcgggctccatggacggtcggatgagatgatcttcgaggccacggtgtgcgatccgagcagcgagctgtatgggtcaacggtggtcctgcggcagctgaagagtttgcaggcgaagcgcagggggcgtcgcgctctcgaggtgctgaagaagctggctcgtcgccaaatgatgtaccactcctacgcacttcaggtccatggttacattgctccgtgcaatgccgtggaggaggaagatgtcccgttagtattggttcatgggtatcatgggagtcattccctgcgtcactggttgcaactctcagattggatcccaaccttagaggcaacattagcgttggacgaagaacaagtgaggagggtaggagatgactctgttggaggaccagctgtaactcgacagctgcgtcttatcaggatattgatgagagaccttttgattggtgtaaattatctacatagccatgggctggcacacaccgagcttaggatagagaatgttcacgtgagcccaatagacaagcatgttaaagtcggtattcttggaaatgctgctgattttcaagacaatgatcttagcagcagtacaattgcaagtaacaatgacaggcggaaaatgatgatagcctttgacatgagatgtgttggcttcatcatggcaaagatggttttgagagagctaatggatccttcgactttctttaaattcaaatcattcctgacaaagggaaatgacccatcctgtttgcgtgagttcctactaccaaccctctaccaaaattctccatctgggaatattggtttgcagatgctagataggcagtggggtgctggttggaatcttttagccttattgctggcaacaaaaccagaggaaaggataagttgtgttgatgcattgcgacacccgttcctttgtgggccaaaatggcgtataaatccgtcagcaaatctcattcggtggggcttgggatcaactgctgtccgcatggctgaagattatatatatgggcgtcatcagacgtttatcatattttgttgaattgatggaggttctaaaccctagtttaagaacacagaattatgccagaacccaattggcctcacgacaaatctggcagtgagggagttttgtctgtcaccgcatcagcaaggatagctgctggtaggatttatattaacgaacatgacagtaaagaggatatggtcacatcttctatgagatatcttcatggtaataaatggagaaaattctcgcaaataaaggagctgccatctagtctccctgcagtaaacattgctatggatgaaatccacgtatcgataagctgcacctcgactatgacagttaattctgcacaaaaggcgctgaaagagatccgtacacaaaccccgccggaaatgttcgatttgtcaaagattgtttgtgggacatacattgatgcgaggttgatgattcttcgtggtgttaacgggtcggctctgctcttcactagagcaaatccaatgattgacacctgaggagactccgtccgccgttatataaggccttgttcggttaatcccgttacctatggattggatgagattggaaaaaaatatgaagaagtttgacttacttgtgatttaaacccatccaatctcactcaatccacatggattgagagctaaccgaacaagccctaacgctgtattctttctttccctgtacattattatgtatttctagccgtacaatcaatttgtaacgagtgtagataacaaggtgtgtaggccatagttagaacgttgaaaattccttctcaagatgatctgttgcttccaagtacggagccttgacagggcttgagctgataaattattactctttccgtttcaaaatgaataaaattcacagttattgaggtcaacttcaaattta

SEQ ID NO: 37022 - DNA, 2378 bp, Zea Mays
aaccacctcacgcctctgcctcttcttaatcttaaagtcagtcagtccccgggccttgctctccctccacttccgccgcgacgatctcctcccacccgtagaccaacaacaacggtactaaccagtaccagccccgcatgcctctcgcggcggctgccgcggccgttgccgcatgtccttcgccgatcggcctcacccgctctttgtgccgtatcgaggcgcatccgcggcgccggcggaggttccggttggaggcaaattcgtcggcgtctacgtccgctcccgcgccgaccgcggcggatgagggaggcggagcggggttgtgccctgtggtcaggttcgacatggccgacttcaccgtcgccgaccgcgtcagcgtcgggctccatggacggtcggatgagatgatcttcgaggccacggtgtgcgatccgagcagcgagctgtatgggtcaacggtggtcctgcggcagctgaagagtttgcaggcgaagcgcagggggcgtcgcgctctcgaggtgctgaagaagctggctcgtcgccaaatgatgtaccactcctacgcacttcaggtccatggttacattgctccgtgcaatgccgtggaggaggaagatgtcccgttagtattggttcatgggtatcatgggagtcattccctgcgtcactggttgcaactctcagattggatcccaaccttagaggcaacattagcgttggacgaagaacaagtgaggagggtaggagatgactctgttggaggaccagctgtaactcgacagctgcgtcttatcaggatattgatgagagaccttttgattggtgtaaattatctacatagccatgggctggcacacaccgagcttaggatagagaatgttcacgtgagcccaatagacaagcatgttaaagtcggtattcttggaaatgctgctgattttcaagacaatgatcttagcagcagtacaattgcaagtaacaatgacaggcggaaaatgatgatagcctttgacatgagatgtgttggcttcatcatggcaaagatggttttgagagagctaatggatccttcgactttctttaaattcaaatcattcctgacaaagggaaatgacccatcctgtttgcgtgagttcctactaccaaccctctaccaaaattctccatctgggaatattggtttgcagatgctagataggcagtggggtgctggttggaatcttttagccttattgctggcaacaaaaccagaggaaaggataagttgtgttgatgcattgcgacacccgttcctttgtgggccaaaatggcgtataaatccgtcagcaaatctcattcggtggggcttgggatcaactgctgtccgcatggctgaagattatatatatgggcgtcatcagcgtagacgtttatcatattttgttgaattgatggaggttctaaaccctagtttaagaacacagaattggcttcacctcctacctggtcgttggcgcctcttgtactgcactggacgacacattggcctaacacttcaattatgccagaacccaattggcctcacgacaaatctggcagtgagggagttttgtctgtcaccgcatcagcaaggatagctgctggtaggatttatattaacgaacatgacagtaaagaggatatggtcacatcttctatgagatatcttcatggtaataaatggagaaaattctcgcaaataaaggagctgccatctagtctccctgcagtaaacattgctatggatgaaatccacgtatcgataagctgcacctcgactatgacagttaattctgcacaaaaggcgctgaaagagatccgtacacaaaccccgccggaaatgttcgatttgtcaaagattgtttgtgggacatacattgatgcgaggttgatgattcttcgtggtgttaacgggtcggctctgctcttcactagagcaaatccaatgattgacacctgaggagactccgtccgccgttatataaggccttgttcggttaatcccgttacctatggattggatgagattggaaaaaaatatgaagaagtttgacttacttgtgatttaaacccatccaatctcactcaatccacatggattgagagctaaccgaacaagccctaacgctgtattctttctttccctgtacattattatgtatttctagccgtacaatcaatttgtaacgagtgtagataacaaggtgtgtaggccatagttagaacgttgaaaattccttctcaagatgatctgttgcttccaagtacggagccttgacagggcttgagctgataaattattactctttccgtttcaaaatgaataaaattcacagttattgaggtcaacttcaaattta

SEQ ID NO: 37023 - DNA, 2335 bp, Zea Mays
cagctatcgctctgcctcttcccggcacgcaaccacctcacgcctctgcctcttcttaatcttaaagtcagtcagtccccgggccttgctctccctccacttccgccgcgacgatctcctcccacccgtagaccaacaacaacggtactaaccagtaccagccccgcatgcctctcgcggcggctgccgcggccgttgccgcatgtccttcgccgatcggcctcacccgctctttgtgccgtatcgaggcgcatccgcggcgccggcggaggttccggttggaggcaaattcgtcggcgtctacgtccgctcccgcgccgaccgcggcggatgagggaggcggagcggggttgtgccctgtggtcaggttcgacatggccgacttcaccgtcgccgaccgcgtcagcgtcgggctccatggacggtcggatgagatgatcttcgaggccacggtgtgcgatccgagcagcgagctgtatgggtcaacggtggtcctgcggcagctgaagagtttgcaggcgaagcgcagggggcgtcgcgctctcgaggtgctgaagaagctggctcgtcgccaaatgatgtaccactcctacgcacttcaggtccatggttacattgctccgtgcaatgccgtggaggaggaagatgtcccgttagtattggttcatgggtatcatgggagtcattccctgcgtcactggttgcaactctcagattggatcccaaccttagaggcaacattagcgttggacgaagaacaagtgaggagggtaggagatgactctgttggaggaccagctgtaactcgacagctgcgtcttatcaggatattgatgagagaccttttgattggtgtaaattatctacatagccatgggctggcacacaccgagcttaggatagagaatgttcacgtgagcccaatagacaagcatgttaaagtcggtattcttggaaatgctgctgattttcaagacaatgatcttagcagcagtacaattgcaagtaacaatgacaggcggaaaatgatgatagcctttgacatgagatgtgttggcttcatcatggcaaagatggttttgagagagctaatggatccttcgactttctttaaattcaaatcattcctgacaaagggaaatgacccatcctgtttgcgtgagttcctactaccaaccctctaccaaaattctccatctgggaatattggtttgcagatgctagataggcagtggggtgctggttggaatcttttagccttattgctggcaacaaaaccagaggaaaggataagttgtgttgatgcattgcgacacccgttcctttgtgggccaaaatggcgtataaatccgtcagcaaatctcattcggtggggcttgggatcaactgctgtccgcatggctgaagattatatatatgggcgtcatcagcgtagacgtttatcatattttgttgaattgatggaggttctaaaccctagtttaagaacacagaattatgccagaacccaattggcctcacgacaaatctggcagtgagggagttttgtctgtcaccgcatcagcaaggatagctgctggtaggatttatattaacgaacatgacagtaaagaggatatggtcacatcttctatgagatatcttcatggtaataaatggagaaaattctcgcaaataaaggagctgccatctagtctccctgcagtaaacattgctatggatgaaatccacgtatcgataagctgcacctcgactatgacagttaattctgcacaaaaggcgctgaaagagatccgtacacaaaccccgccggaaatgttcgatttgtcaaagattgtttgtgggacatacattgatgcgaggttgatgattcttcgtggtgttaacgggtcggctctgctcttcactagagcaaatccaatgattgacacctgaggagactccgtccgccgttatataaggccttgttcggttaatcccgttacctatggattggatgagattggaaaaaaatatgaagaagtttgacttacttgtgatttaaacccatccaatctcactcaatccacatggattgagagctaaccgaacaagccctaacgctgtattctttctttccctgtacattattatgtatttctagccgtacaatcaatttgtaacgagtgtagataacaaggtgtgtaggccatagttagaacgttgaaaattccttctcaagatgatctgttgcttccaagtacggagccttgacagggcttgagctgataaattattactctttccgtttcaaaatgaataaaattcacagttattgaggtcaacttcaaattta

SEQ ID NO: 37024 - DNA, 2329 bp, Zea Mays
cgcgcgcagggctcatggcagctatcgctctgcctcttcccggcacgcaaccacctcacgcctctgcctcttcttaatcttaaagtcagtcagtccccgggccttgctctccctccacttccgccgcgacgatctcctcccacccgtagaccaacaacaacggtactaaccagtaccagccccgcatgcctctcgcggcggctgccgcggccgttgccgcatgtccttcgccgatcggcctcacccgctctttgtgccgtatcgaggcgcatccgcggcgccggcggaggttccggttggaggcaaattcgtcggcgtctacgtccgctcccgcgccgaccgcggcggatgagggaggcggagcggggttgtgccctgtggtcaggttcgacatggccgacttcaccgtcgccgaccgcgtcagcgtcgggctccatggacggtcggatgagatgatcttcgaggccacggtgtgcgatccgagcagcgagctgtatgggtcaacggtggtcctgcggcagctgaagagtttgcaggcgaagcgcagggggcgtcgcgctctcgaggtgctgaagaagctggctcgtcgccaaatgatgtaccactcctacgcacttcaggtccatggttacattgctccgtgcaatgccgtggaggaggaagatgtcccgttagtattggttcatgggtatcatgggagtcattccctgcgtcactggttgcaactctcagattggatcccaaccttagaggcaacattagcgttggacgaagaacaagtgaggagggtaggagatgactctgttggaggaccagctgtaactcgacagctgcgtcttatcaggatattgatgagagaccttttgattggtgtaaattatctacatagccatgggctggcacacaccgagcttaggatagagaatgttcacgtgagcccaatagacaagcatgttaaagtcggtattcttggaaatgctgctgattttcaagacaatgatcttagcagcagtacaattgcaagtaacaatgacaggcggaaaatgatgatagcctttgacatgagatgtgttggcttcatcatggcaaagatggttttgagagagctaatggatccttcgactttctttaaattcaaatcattcctgacaaagggaaatgacccatcctgtttgcgtgagttcctactaccaaccctctaccaaaattctccatctgggaatattggtttgcagatgctagataggcagtggggtgctggttggaatcttttagccttattgctggcaacaaaaccagaggaaaggataagttgtgttgatgcattgcgacacccgttcctttgtgggccaaaatggcgtataaatccgtcagcaaatctcattcggtggggcttgggatcaactgctgtccgcatggctgaagattatatatatgggcgtcatcagcgtagacgtttatcatattttgttgaattgatggaggttctaaaccctagtttaagaacacagaattggcttcacctcctacctggtcgttggcgcctcttgtactgcactggacgacacattggcctaacacttcgtcagccttcccctagaaattatgccagaacccaattggcctcacgacaaatctggcagtgagggagttttgtctgtcaccgcatcagcaaggatagctgctggtaggatttatattaacgaacatgacagtaaagaggatatggtcacatcttctatgagatatcttcatgttaattctgcacaaaaggcgctgaaagagatccgtacacaaaccccgccggaaatgttcgatttgtcaaagattgtttgtgggacatacattgatgcgaggttgatgattcttcgtggtgttaacgggtcggctctgctcttcactagagcaaatccaatgattgacacctgaggagactccgtccgccgttatataaggccttgttcggttaatcccgttacctatggattggatgagattggaaaaaaatatgaagaagtttgacttacttgtgatttaaacccatccaatctcactcaatccacatggattgagagctaaccgaacaagccctaacgctgtattctttctttccctgtacattattatgtatttctagccgtacaatcaatttgtaacgagtgtagataacaaggtgtgtaggccatagttagaacgttgaaaattccttctcaagatgatctgttgcttccaagtacggagccttgacagggcttgagctgataaattattactctttccgtttcaaaatgaataaaattcacagttattgaggtcaacttcaaattta

SEQ ID NO: 37025 - DNA, 1153 bp, Zea Mays
agtcagtccccgggccttgctctccctccacttccgccgcgacgatctcctcccacccgtagaccaacaacaacggtactaaccagtaccagccccgcatgcctctcgcggcggctgccgcggccgttgccgcatgtccttcgccgatcggcctcacccgctctttgtgccgtatcgaggcgcatccgcggcgccggcggaggttccggttggaggcaaattcgtcggcgtctacgtccgctcccgcgccgaccgcggcggatgagggaggcggagcggggttgtgccctgtggtcaggttcgacatggccgacttcaccgtcgccgaccgcgtcagcgtcgggctccatggacggtcggatgagatgatcttcgaggccacggtgtgcgatccgagcagcgagctgtatgggtcaacggtggtcctgcggcagctgaagagtttgcaggcgaagcgcagggggcgtcgcgctctcgaggtgctgaagaagctggctcgtcgccaaatgatgtaccactcctacgcacttcaggtccatggttacattgctccgtgcaatgccgtggaggaggaagatgtcccgttagtattggttcatgggtatcatgggagtcattccctgcgtcactggttgcaactctcagattggatcccaaccttagaggcaacattagcgttggacgaagaacaagtgaggagggtaggagatgactctgttggaggaccagctgtaactcgacagctgcgtcttatcaggatattgatgagagaccttttgattggtgtaaattatctacatagccatgggctggcacacaccgagcttaggatagagaatgttcacgtgagcccaatagacaagcatgttaaagtcggtattcttggaaatgctgctgattttcaagacaatgatcttagcagcagtacaattgcaagtaacaatgacaggcggaaaatgatgatagcctttgacatgagatgtgttggcttcatcatggcaaagatggttttgagagagctaatggatccttcgactttctttaaattcaaatcattcctgacaaagggaaatgacccatcctgtttgcgtgagttcctactaccaaccctctaccaaaattctccatctgggaatattggtttgcagttgtg

SEQ ID NO: 37026 - DNA, 639 bp, Zea Mays
tgacattgttacattggttcatcagatatgtggtgtaaagaacatagattttcccctgggcaattgcattctctctaagtacaacgcatatgtgcttttcaagatcagtgaggaagtggttgttgatgccacagacaaaggaaacatggcacgactgatcaatcattcttgcacaccaaactgctatgcgaggattatgagtgttggacatgatgaaagtcgtattgttctaatagccaagaaaaatgtttgtgctggtgatgagctaacgtatgactacctgtttgatccagatgagggtgatgaacgcgaagtgccatgcctttgccagactgctaactgccggaaattcatgaattagtttacttagatgttagaggatcactgacagtctttctttcttatttacccccgtttttggtatatattgatccttccctattttttgtttacattcattttagaataagtttagttagagctcaaaagtcgagcttccattcctgttaataccacagttgtattcactacggccagttcattctttaaataaatttttttgtaccatgtttagcttgatcatgcacgttagcagacattgacatgtccatattctttaatatacttctgtatcataca

SEQ ID NO: 37027 - DNA, 1064 bp, Zea Mays
acatcaccaccccacactcactatatttcaccactttacaagtatacccttacacttgttctatttacacaaataggtatgtcacctatagaaaaaacataactatgttttattaacatgcacagatctagagtgggagcaactgcgcgttagaggaccttgtcaacaccgctgggatgaaattgataatctgaatacaccaaggatctagagtgggagcaactgcgcgttagaggaccttgtcaacaccgctgggatgaaattgataatctgaatacaccaagggaagagagggatccagaatctttttgtactttcaaagagcgtttgtgttatttacagaaaacagagcatggtagagtatgctttggtagatcagggattcataggtggggtctttttgctcggagagacattcaagaaggagaaatggtccttgagtatcgcggtgagctggtcagatgaagtgtagctgacttacgggaagaaaaataccgtgtgcaagccaaggattgctatcttttcaagatcagtgaggaagtggttgttgatgccacagacaaaggaaacatggcacgactgatcaatcattcttgcacaccaaactgctatgcgaggattatgagtgttggacatgatgaaagtcgtattgttctaatagccaagaaaaatgtttgtgctggtgatgagctaacgtatgactacctgtttgatccagatgagggtgatgaacgcgaagtgccatgcctttgccagactgctaactgccggaaattcatgaattagtttacttagatgttagaggatcactgacagtctttctttcttatttacccccgtttttggtatatattgatccttccctattttttgtttacattcattttagaataagtttagttagagctcaaaagtcgagcttccattcctgttaataccacagttgtattcactacggccagttcattctttaaataaatttttttgtaccatgtttagcttgatcatgcacgttagcagacattgacatgtccatattctttaatatacttctgtatcataca

SEQ ID NO: 37028 - DNA, 1582 bp, Zea Mays
ctgcttcctatagcacacaccaacctgcgacctccacgacgacttcttccctgccgcctcctcacctgacccgagcagtgaccaacagggggcggacgacagccggcctcccgcagccgcggccagaagcccacggcggagggggagcccacggcgaagagggagaagtccgtggagacgtacgcgatggggctggtcagcaacgtccgcgacggcgtgatggcttctgctgcctgttcctcggctgccgacgcgctctggcgccgttggaagacttctccttcctcacgcgtccaagctcgagctccagtggcggtgccggcgatctagagtgggagcaactgcgcgttagaggaccttgtcaacaccgctgggatgaaattgataatctgaatacaccaagggtaattttctgatttactgcataattgtactcggctgcctgttcctcggctgccgacgcgctctggcgccgttggaagacttctccttcctcacgcgtccaagctcgagctccagtggcggtgccggcggtaggaaaggccaaccctagctccgtatacctatactatattgaatattttggtgtgtctcttacacatcaccaccccacactcactatatttcaccactttacaagtatacccttacacttgttctatttacacaaataggtatgtcacctatagaaaaaacataactatgttttattaacatgcacagatctagagtgggagcaactgcgcgttagaggaccttgtcaacaccgctgggatgaaattgataatctgaatacaccaagggaagagagggatccagaatctttttgtactttcaaagagcgtttgtgttatttacagaaaacagagcatggtagagtatgctttggtagatcagggattcataggtggggtctttttgctcggagagacattcaagaaggagaaatggtccttgagtatcgcggtgagctggtcagatgaagtgtagctgacttacgggaagaaaaataccgtgtgcaagccaaggattgctatcttttcaagatcagtgaggaagtggttgttgatgccacagacaaaggaaacatggcacgactgatcaatcattcttgcacaccaaactgctatgcgaggattatgagtgttggacatgatgaaagtcgtattgttctaatagccaagaaaaatgtttgtgctggtgatgagctaacgtatgactacctgtttgatccagatgagggtgatgaacgcgaagtgccatgcctttgccagactgctaactgccggaaattcatgaattagtttacttagatgttagaggatcactgacagtctttctttcttatttacccccgtttttggtatatattgatccttccctattttttgtttacattcattttagaataagtttagttagagctcaaaagtcgagcttccattcctgttaataccacagttgtattcactacggccagttcattctttaaataaatttttttgtaccatgtttagcttgatcatgcacgttagcagacattgacatgtccatattctttaatatacttctgtatcataca

SEQ ID NO: 37029 - DNA, 1196 bp, Zea Mays
ctgtcagttgaacctgcttcctatagcacacaccaacctgcgacctccacgacgacttcttccctgccgcctcctcacctgacccgagcagtgaccaacagggggcggacgacagccggcctcccgcagccgcggccagaagcccacggcggagggggagcccacggcgaagagggagaagtccgtggagacgtacgcgatggggctggtcagcaacgtccgcgacggcgtgatggcttctgctgcctgttcctcggctgccgacgcgctctggcgccgttggaagacttctccttcctcacgcgtccaagctcgagctccagtggcggtgccggcgatctagagtgggagcaactgcgcgttagaggaccttgtcaacaccgctgggatgaaattgataatctgaatacaccaagggaagagagggatccagaatctttttgtactttcaaagagcgtttgtgttatttacagaaaacagagcatggtagagtatgctttggtagatcagggattcataggtggggtctttttgctcggagagacattcaagaaggagaaatggtccttgagtatcgcggtgagctggtcagatgaagtgtagctgacttacgggaagaaaaataccgtgtgcaagccaaggattgctatcttttcaagatcagtgaggaagtggttgttgatgccacagacaaaggaaacatggcacgactgatcaatcattcttgcacaccaaactgctatgcgaggattatgagtgttggacatgatgaaagtcgtattgttctaatagccaagaaaaatgtttgtgctggtgatgagctaacgtatgactacctgtttgatccagatgagggtgatgaacgcgaagtgccatgcctttgccagactgctaactgccggaaattcatgaattagtttacttagatgttagaggatcactgacagtctttctttcttatttacccccgtttttggtatatattgatccttccctattttttgtttacattcattttagaataagtttagttagagctcaaaagtcgagcttccattcctgttaataccacagttgtattcactacggccagttcattctttaaataaatttttttgtaccatgtttagcttgatcatgcacgttagcagacattgacatgtccatattctttaatatacttctgtatcataca

SEQ ID NO: 37030 - DNA, 1952 bp, Zea Mays
gtgccgcacatcacggatgagatacaggactggatcgaacgcgtcgcggtggtcccagtggacggcaaggaagggcctcctgacgtctgcgtcatcgagctcgggggcactataggggacaaaatcttttcgccgcataacgacagtggcattcttgatgcaggggatatcgagtcaatgcctttcattgaagcgttaggtcaattctcgtaccgtgttggacctggaaacttctgtctcgttcatgtcagtcttgttccggttctaaatgtagtcggtgaacagaaaactaagcctacacagcacagtgttcgagggcttagagggcttgggttagcgccggatgttttagcatgtcgcagtactgagccattggaggaacatgtgaaggccaagctttcacagttttgccatgtcccggaccagaaggcccatgaagcgattctgaaggttttagacctccagtatgatggaaaggtgcctcgggaacctgagctaacaaagtggactaaaagagccaccaagtttgacaagttgaagactccggtcaagattgccatggttggaaaatacactggcctgtcggattcctacctgtctgtcataaaggctcttttgcatgcatcggttgctatggaaagaaaacttgtagtcgagtgggttccttcctgcgacctggaagattcttcagctaaagagacccctgaagcccataaaaaagcatggaaattgctgaagggcgcagatggcgtactcgtccctggagggtttggggacaggggagtccagggcaaaatcctcgccgcgaaatacgcacgcgagaacaacgttccttatcttggcatctgcctgggaatgcaaatcgcggtgatcgagtttgcccgctcggtgatgaagctacgaggtgccaatagcacggagttcgatccagctacgacgtcaccctgtgtcatcttcatgccagagggctcaaaaacccaaatgggagccacgatgaggcttgggtcgaggaggacctatttccatgtcagtggctgcaaatctgcgaagctgtacggcaacgccagctctgtagatgaaagacatcgccacagatacgaggtgaaccctgacatggtcccagactttgagaaggccgggcttcagttcgtgggcaaagatgagagtgggaaacgcatggggatcgttgagcttccctctcacaagttcttcatcggtgcacagttccatcctgaattcaagtcgagaccagggaagccatctccgcttttcttagggctgatagccgcggcgtctgggcagctagaaccattgcttcagcgcagcaatccgacaacgaaagcatgttcgatcagtaaagtcccgaaactgaaactgtaccccactgggcctgtgaataatccactgaacagcttggtgaacgggtactacccaaatggcactgggatccacacctagaagcgtagcgcttagcgatggtttggttggtatttgctgctatggtttttttgcttgtacccctcctttttcatgtgttcctttttttcagtttgttatttgtctctgatcaactgagagaagagaaggctaagattcagcaagcccccagctccagcgacacatggttccgacatttttaacgaggaacgccttccagtccgttgaagcgagctagccatagggtggtgaggtctagtgtgatgttgttgttgtttttttctctttcctttttttttggcctggaactaaggcgcgaagtgttttgagtagcgctagtagagcctggaagaagttatctaaactatttgtacattatggaagaacttatctaaggactgaatacacaaatgcttggccatgattgctttgttgccacaatatgaacaaccacgctcagatgaagagtattggtgttgttaaaaaatgccagtgaaattgttgttgttaatgtt

SEQ ID NO: 37031 - DNA, 1724 bp, Zea Mays
ggaaccatgtcgccgttcgagcacggggaggttttcgttttggacgatggcggagaggtggacttggaccttggaaactacgaacgttttctggacatcaaattgacccgcgacaacaatataaccacgggaaagatcttccaggctgtcattaacaaggagaggagaggcgactacctagggaagaccgtccaggtagtgccgcacatcacggatgagatacaggactggatcgaacgcgtcgcggtggtcccagtggacggcaaggaagggcctcctgacgtctgcgtcatcgagctcgggggcactataggggacaaaatcttttcgccgcataacgacagtggcattcttgatgcaggggatatcgagtcaatgcctttcattgaagcgttaggtcaattctcgtaccgtgttggacctggaaacttctgtctcgttcatgtcagtcttgttccggttctaaatgtagtcggtgaacagaaaactaagcctacacagcacagtgttcgagggcttagagggcttgggttagcgccggatgttttagcatgtcgcagtactgagccattggaggaacatgtgaaggccaagctttcacagttttgccatgtcccggaccagaaggcccatgaagcgattctgaagggcgcagatggcgtactcgtccctggagggtttggggacaggggagtccagggcaaaatcctcgccgcgaaatacgcacgcgagaacaacgttccttatcttggcatctgcctgggaatgcaaatcgcggtgatcgagtttgcccgctcggtgatgaagctacgaggtgccaatagcacggagttcgatccagctacgacgtcaccctgtgtcatcttcatgccagagggctcaaaaacccaaatgggagccacgatgaggcttgggtcgaggaggacctatttccatgtcagtggctgcaaatctgcgaagctgtacggcaacgccagctctgtagatgaaagacatcgccacagatacgaggtgaaccctgacatggtcccagactttgagaaggccgggcttcagttcgtgggcaaagatgagagtgggaaacgcatggggatcgttgagcttccctctcacaagttcttcatcggtgcacagttccatcctgaattcaagtcgagaccagggaagccatctccgcttttcttagggctgatagccgcggcgtctgggcagctagaaccattgcttcagcgcagcaatccgacaacgaaagcatgttcgatcagtaaagtcccgaaactgaaactgtaccccactgggcctgtgaataatccactgaacagcttggtgaacgggtactacccaaatgagaagagaaggctaagattcagcaagcccccagctccagcgacacatggttccgacatttttaacgaggaacgccttccagtccgttgaagcgagctagccatagggtggtgaggtctagtgtgatgttgttgttgtttttttctctttcctttttttttggcctggaactaaggcgcgaagtgttttgagtagcgctagtagagcctggaagaagttatctaaactatttgtacattatggaagaacttatctaaggactgaatacacaaatgcttggccatgattgctttgttgccacaatatgaacaaccacgctcagatgaagagtattggtgttgttaaaaaatgccagtgaaattgttgttgttaatgtt

SEQ ID NO: 37032 - DNA, 1943 bp, Zea Mays
tacctcaacaccgatgctggaaccatgtcgccgttcgagcacggggaggttttcgttttggacgatggcggagaggtggacttggaccttggaaactacgaacgttttctggacatcaaattgacccgcgacaacaatataaccacgggaaagatcttccaggctgtcattaacaaggagaggagaggcgactacctagggaagaccgtccaggtagtgccgcacatcacggatgagatacaggactggatcgaacgcgtcgcggtggtcccagtggacggcaaggaagggcctcctgacgtctgcgtcatcgagctcgggggcactataggggacaaaatcttttcgccgcataacgacagtggcattcttgatgcaggggatatcgagtcaatgcctttcattgaagcgttaggtcaattctcgtaccgtgttggacctggaaacttctgtctcgttcatgtcagtcttgttccggttctaaatgtagtcggtgaacagaaaactaagcctacacagcacagtgttcgagggcttagagggcttgggttagcgccggatgttttagcatgtcgcagtactgagccattggaggaacatgtgaaggccaagctttcacagttttgccatgtcccggtctcaaatatagtgaacctccatgacgtgacaaacatctggcacatccccttgctgctaagggaccagaaggcccatgaagcgattctgaagggcgcagatggcgtactcgtccctggagggtttggggacaggggagtccagggcaaaatcctcgccgcgaaatacgcacgcgagaacaacgttccttatcttggcatctgcctgggaatgcaaatcgcggtgatcgagtttgcccgctcggtgatgaagctacgaggtgccaatagcacggagttcgatccagctacgacgtcaccctgtgtcatcttcatgccagagggctcaaaaacccaaatgggagccacgatgaggcttgggtcgaggaggacctatttccatgtcagtggctgcaaatctgcgaagctgtacggcaacgccagctctgtagatgaaagacatcgccacagatacgaggtgaaccctgacatggtcccagactttgagaaggccgggcttcagttcgtgggcaaagatgagagtgggaaacgcatggggatcgttgagcttccctctcacaagttcttcatcggtgcacagttccatcctgaattcaagtcgagaccagggaagccatctccgcttttcttagggctgatagccgcggcgtctgggcagctagaaccattgcttcagcgcagcaatccgacaacgaaagcatgttcgatcagtaaagtcccgaaactgaaactgtaccccactgggcctgtgaataatccactgaacagcttggtgaacgggtactacccaaatggcactgggatccacacctagaagcgtagcgcttagcgatggtttggttggtatttgctgctatggtttttttgcttgtacccctcctttttcatgtgttcctttttttcagtttgttatttgtctctgatcaactgagagaagagaaggctaagattcagcaagcccccagctccagcgacacatggttccgacatttttaacgaggaacgccttccagtccgttgaagcgagctagccatagggtggtgaggtctagtgtgatgttgttgttgtttttttctctttcctttttttttggcctggaactaaggcgcgaagtgttttgagtagcgctagtagagcctggaagaagttatctaaactatttgtacattatggaagaacttatctaaggactgaatacacaaatgcttggccatgattgctttgttgccacaatatgaacaaccacgctcagatgaagagtattggtgttgttaaaaaatgccagtgaaattgttgttgttaatgtt

SEQ ID NO: 37033 - DNA, 2239 bp, Zea Mays
gtcaccaccatcaagatcgatccatacctcaacaccgatgctggaaccatgtcgccgttcgagcacggggaggttttcgttttggacgatggcggagaggtgtggacttggaccttggaaactacgaacgttttctggacatcaaattgacccgcgacaacaatataaccacgggaaagatcttccaggctgtcattaacaaggagaggagaggcgactacctagggaagaccgtccaggtagtgccgcacatcacggatgagatacaggactggatcgaacgcgtcgcggtggtcccagtggacggcaaggaagggcctcctgacgtctgcgtcatcgagctcgggggcactataggggatatcgagtcaatgcctttcattgaagcgttaggtcaattctcgtaccgtgttggacctggaaacttctgtctcgttcatgtcagtcttgttccggttctaaatgtagtcggtgaacagaaaactaagcctacacagcacagtgttcgagggcttagagggcttgggttagcgccggatgttttagcatgtcgcagtactgagccattggaggaacatgtgaaggccaagctttcacagttttgccatgtcccggtctcaaatatagtgaacctccatgacgtgacaaacatctggcacatccccttgctgctaagggaccagaaggcccatgaagcgattctgaaggttttagacctccagtatgatggaaaggtgcctcgggaacctgagctaacaaagtggactaaaagagccaccaagtttgacaagttgaagactccggtcaagattgccatggttggaaaatacactggcctgtcggattcctacctgtctgtcataaaggctcttttgcatgcatcggttgctatggaaagaaaacttgtagtcgagtgggttccttcctgcgacctggaagattcttcagctaaagagacccctgaagcccataaaaaagcatggaaattgctgaagtccgtctcacggaattccattccatcccagggcgcagatggcgtactcgtccctggagggtttggggacaggggagtccagggcaaaatcctcgccgcgaaatacgcacgcgagaacaacgttccttatcttggcatctgcctgggaatgcaaatcgcggtgatcgagtttgcccgctcggtgatgaagctacgaggtgccaatagcacggagttcgatccagctacgacgtcaccctgtgtcatcttcatgccagagggctcaaaaacccaaatgggagccacgatgaggcttgggtcgaggaggacctatttccatgtcagtggctgcaaatctgcgaagctgtacggcaacgccagctctgtagatgaaagacatcgccacagatacgaggtgaaccctgacatggtcccagactttgagaaggccgggcttcagttcgtgggcaaagatgagagtgggaaacgcatggggatcgttgagcttccctctcacaagttcttcatcggtgcacagttccatcctgaattcaagtcgagaccagggaagccatctccgcttttcttagggctgatagccgcggcgtctgggcagctagaaccattgcttcagcgcagcaatccgacaacgaaagcatgttcgatcagtaaagtcccgaaactgaaactgtaccccactgggcctgtgaataatccactgaacagcttggtgaacgggtactacccaaatggcactgggatccacacctagaagcgtagcgcttagcgatggtttggttggtatttgctgctatggtttttttgcttgtacccctcctttttcatgtgttcctttttttcagtttgttatttgtctctgatcaactgagagaagagaaggctaagattcagcaagcccccagctccagcgacacatggttccgacatttttaacgaggaacgccttccagtccgttgaagcgagctagccatagggtggtgaggtctagtgtgatgttgttgttgtttttttctctttcctttttttttggcctggaactaaggcgcgaagtgttttgagtagcgctagtagagcctggaagaagttatctaaactatttgtacattatggaagaacttatctaaggactgaatacacaaatgcttggccatgattgctttgttgccacaatatgaacaaccacgctcagatgaagagtattggtgttgttaaaaaatgccagtgaaattgttgttgttaatgtt

SEQ ID NO: 37034 - DNA, 2281 bp, Zea Mays
gtgctcaaggcctgcggcctccgcgtcaccaccatcaagatcgatccatacctcaacaccgatgctggaaccatgtcgccgttcgagcacggggaggttttcgttttggacgatggcggagagaggtggacttggaccttggaaactacgaacgttttctggacatcaaattgacccgcgacaacaatataaccacgggaaagatcttccaggctgtcattaacaaggagaggagaggcgactacctagggaagaccgtccaggtagtgccgcacatcacggatgagatacaggactggatcgaacgcgtcgcggtggtcccagtggacggcaaggaagggcctcctgacgtctgcgtcatcgagctcgggggcactataggggacaaaatcttttcgccgcataacgacagtggcattcttgatgcaggggatatcgagtcaatgcctttcattgaagcgttaggtcaattctcgtaccgtgttggacctggaaacttctgtctcgttcatgtcagtcttgttccggttctaaatgtagtcggtgaacagaaaactaagcctacacagcacagtgttcgagggcttagagggcttgggttagcgccggatgttttagcatgtcgcagtactgagccattggaggaacatgtgaaggccaagctttcacagttttgccatgtcccggtctcaaatatagtgaacctccatgacgtgacaaacatctggcacatccccttgctgctaagggaccagaaggcccatgaagcgattctgaaggttttagacctccagtatgatggaaaggtgcctcgggaacctgagctaacaaagtggactaaaagagccaccaagtttgacaagttgaagactccggtcaagattgccatggttggaaaatacactggcctgtcggattcctacctgtctgtcataaaggctcttttgcatgcatcggttgctatggaaagaaaacttgtagtcgagtgggttccttcctgcgacctggaagattcttcagctaaagagacccctgaagcccataaaaaagcatggaaattgctgaagggcgcagatggcgtactcgtccctggagggtttggggacaggggagtccagggcaaaatcctcgccgcgaaatacgcacgcgagaacaacgttccttatcttggcatctgcctgggaatgcaaatcgcggtgatcgagtttgcccgctcggtgatgaagctacgaggtgccaatagcacggagttcgatccagctacgacgtcaccctgtgtcatcttcatgccagagggctcaaaaacccaaatgggagccacgatgaggcttgggtcgaggaggacctatttccatgtcagtggctgcaaatctgcgaagctgtacggcaacgccagctctgtagatgaaagacatcgccacagatacgaggtgaaccctgacatggtcccagactttgagaaggccgggcttcagttcgtgggcaaagatgagagtgggaaacgcatggggatcgttgagcttccctctcacaagttcttcatcggtgcacagttccatcctgaattcaagtcgagaccagggaagccatctccgcttttcttagggctgatagccgcggcgtctgggcagctagaaccattgcttcagcgcagcaatccgacaacgaaagcatgttcgatcagtaaagtcccgaaactgaaactgtaccccactgggcctgtgaataatccactgaacagcttggtgaacgggtactacccaaatggcactgggatccacacctagaagcgtagcgcttagcgatggtttggttggtatttgctgctatggtttttttgcttgtacccctcctttttcatgtgttcctttttttcagtttgttatttgtctctgatcaactgagagaagagaaggctaagattcagcaagcccccagctccagcgacacatggttccgacatttttaacgaggaacgccttccagtccgttgaagcgagctagccatagggtggtgaggtctagtgtgatgttgttgttgtttttttctctttcctttttttttggcctggaactaaggcgcgaagtgttttgagtagcgctagtagagcctggaagaagttatctaaactatttgtacattatggaagaacttatctaaggactgaatacacaaatgcttggccatgattgctttgttgccacaatatgaacaaccacgctcagatgaagagtattggtgttgttaaaaaatgccagtgaaattgttgttgttaatgtt

SEQ ID NO: 37035 - DNA, 2419 bp, Zea Mays
ggaagcgctgccgccaggcccgcccctgcctgccctgagggttctatttaacccccctcgtctccccctccgtttccagcctcaaactcttgccctccccccggcaccacactagcctagtgagaagtgcagcagcagcaccagcggcagaagtgttacttagttgctcctcctacctgtgctgctgcgcaggagcagagcctgaaaggacgacggccgtcggcgtaaggggagcgagcgagcgagcggccatgaagtacgtgctggtgaccggaggggtggtgagcgggctcggcaagggcgtgacggccagcagcatcggcgtcgtgctcaaggcctgcggcctccgcgtcaccaccatcaagatcgatccatacctcaacaccgatgctggaaccatgtcgccgttcgagcacggggaggttttcgttttggacgatggcggagaggtggacttggaccttggaaactacgaacgttttctggacatcaaattgacccgcgacaacaatataaccacgggaaagatcttccaggctgtcattaacaaggagaggagaggcgactacctagggaagaccgtccaggtagtgccgcacatcacggatgagatacaggactggatcgaacgcgtcgcggtggtcccagtggacggcaaggaagggcctcctgacgtctgcgtcatcgagctcgggggcactataggggatatcgagtcaatgcctttcattgaagcgttaggtcaattctcgtaccgtgttggacctggaaacttctgtctcgttcatgtcagtcttgttccggttctaaatgtagtcggtgaacagaaaactaagcctacacagcacagtgttcgagggcttagagggcttgggttagcgccggatgttttagcatgtcgcagtactgagccattggaggaacatgtgaaggccaagctttcacagttttgccatgtcccggtctcaaatatagtgaacctccatgacgtgacaaacatctggcacatccccttgctgctaagggaccagaaggcccatgaagcgattctgaaggttttagacctccagtatgatggaaaggtgcctcgggaacctgagctaacaaagtggactaaaagagccaccaagtttgacaagttgaagactccggtcaagattgccatggttggaaaatacactggcctgtcggattcctacctgtctgtcataaaggctcttttgcatgcatcggttgctatggaaagaaaacttgtagtcgagtgggttccttcctgcgacctggaagattcttcagctaaagagacccctgaagcccataaaaaagcatggaaattgctgaagggcgcagatggcgtactcgtccctggagggtttggggacaggggagtccagggcaaaatcctcgccgcgaaatacgcacgcgagaacaacgttccttatcttggcatctgcctgggaatgcaaatcgcggtgatcgagtttgcccgctcggtgatgaagctacgaggtgccaatagcacggagttcgatccagctacgacgtcaccctgtgtcatcttcatgccagagggctcaaaaacccaaatgggagccacgatgaggcttgggtcgaggaggacctatttccatgtcagtggctgcaaatctgcgaagctgtacggcaacgccagctctgtagatgaaagacatcgccacagatacgaggtgaaccctgacatggtcccagactttgagaaggccgggcttcagttcgtgggcaaagatgagagtgggaaacgcatggggatcgttgagcttccctctcacaagttcttcatcggtgcacagttccatcctgaattcaagtcgagaccagggaagccatctccgcttttcttagggctgatagccgcggcgtctgggcagctagaaccattgcttcagcgcagcaatccgacaacgaaagcatgttcgatcagtaaagtcccgaaactgaaactgtaccccactgggcctgtgaataatccactgaacagcttggtgaacgggtactacccaaatgagaagagaaggctaagattcagcaagcccccagctccagcgacacatggttccgacatttttaacgaggaacgccttccagtccgttgaagcgagctagccatagggtggtgaggtctagtgtgatgttgttgttgtttttttctctttcctttttttttggcctggaactaaggcgcgaagtgttttgagtagcgctagtagagcctggaagaagttatctaaactatttgtacattatggaagaacttatctaaggactgaatacacaaatgcttggccatgattgctttgttgccacaatatgaacaaccacgctcagatgaagagtattggtgttgttaaaaaatgccagtgaaattgttgttgttaatgtt

SEQ ID NO: 37036 - DNA, 2574 bp, Zea Mays
ggaagcgctgccgccaggcccgcccctgcctgccctgagggttctatttaacccccctcgtctccccctccgtttccagcctcaaactcttgccctccccccggcaccacactagcctagtgagaagtgcagcagcagcaccagcggcagaagtgttacttagttgctcctcctacctgtgctgctgcgcaggagcagagcctgaaaggacgacggccgtcggcgtaaggggagcgagcgagcgagcggccatgaagtacgtgctggtgaccggaggggtggtgagcgggctcggcaagggcgtgacggccagcagcatcggcgtcgtgctcaaggcctgcggcctccgcgtcaccaccatcaagatcgatccatacctcaacaccgatgctggaaccatgtcgccgttcgagcacggggaggttttcgttttggacgatggcggagaggtgtggacttggaccttggaaactacgaacgttttctggacatcaaattgacccgcgacaacaatataaccacgggaaagatcttccaggctgtcattaacaaggagaggagaggcgactacctagggaagaccgtccaggtagtgccgcacatcacggatgagatacaggactggatcgaacgcgtcgcggtggtcccagtggacggcaaggaagggcctcctgacgtctgcgtcatcgagctcgggggcactataggggacaaaatcttttcgccgcataacgacagtggcattcttgatgcaggggatatcgagtcaatgcctttcattgaagcgttaggtcaattctcgtaccgtgttggacctggaaacttctgtctcgttcatgtcagtcttgttccggttctaaatgtagtcggtgaacagaaaactaagcctacacagcacagtgttcgagggcttagagggcttgggttagcgccggatgttttagcatgtcgcagtactgagccattggaggaacatgtgaaggccaagctttcacagttttgccatgtcccggaccagaaggcccatgaagcgattctgaaggttttagacctccagtatgatggaaaggtgcctcgggaacctgagctaacaaagtggactaaaagagccaccaagtttgacaagttgaagactccggtcaagattgccatggttggaaaatacactggcctgtcggattcctacctgtctgtcataaaggctcttttgcatgcatcggttgctatggaaagaaaacttgtagtcgagtgggttccttcctgcgacctggaagattcttcagctaaagagacccctgaagcccataaaaaagcatggaaattgctgaagtccgtctcacggaattccattccatcccagggcgcagatggcgtactcgtccctggagggtttggggacaggggagtccagggcaaaatcctcgccgcgaaatacgcacgcgagaacaacgttccttatcttggcatctgcctgggaatgcaaatcgcggtgatcgagtttgcccgctcggtgatgaagctacgaggtgccaatagcacggagttcgatccagctacgacgtcaccctgtgtcatcttcatgccagagggctcaaaaacccaaatgggagccacgatgaggcttgggtcgaggaggacctatttccatgtcagtggctgcaaatctgcgaagctgtacggcaacgccagctctgtagatgaaagacatcgccacagatacgaggtgaaccctgacatggtcccagactttgagaaggccgggcttcagttcgtgggcaaagatgagagtgggaaacgcatggggatcgttgagcttccctctcacaagttcttcatcggtgcacagttccatcctgaattcaagtcgagaccagggaagccatctccgcttttcttagggctgatagccgcggcgtctgggcagctagaaccattgcttcagcgcagcaatccgacaacgaaagcatgttcgatcagtaaagtcccgaaactgaaactgtaccccactgggcctgtgaataatccactgaacagcttggtgaacgggtactacccaaatggcactgggatccacacctagaagcgtagcgcttagcgatggtttggttggtatttgctgctatggtttttttgcttgtacccctcctttttcatgtgttcctttttttcagtttgttatttgtctctgatcaactgagagaagagaaggctaagattcagcaagcccccagctccagcgacacatggttccgacatttttaacgaggaacgccttccagtccgttgaagcgagctagccatagggtggtgaggtctagtgtgatgttgttgttgtttttttctctttcctttttttttggcctggaactaaggcgcgaagtgttttgagtagcgctagtagagcctggaagaagttatctaaactatttgtacattatggaagaacttatctaaggactgaatacacaaatgcttggccatgattgctttgttgccacaatatgaacaaccacgctcagatgaagagtattggtgttgttaaaaaatgccagtgaaattgttgttgttaatgtt

SEQ ID NO: 37037 - DNA, 2605 bp, Zea Mays
ggaagcgctgccgccaggcccgcccctgcctgccctgagggttctatttaacccccctcgtctccccctccgtttccagcctcaaactcttgccctccccccggcaccacactagcctagtgagaagtgcagcagcagcaccagcggcagaagtgttacttagttgctcctcctacctgtgctgctgcgcaggagcagagcctgaaaggacgacggccgtcggcgtaaggggagcgagcgagcgagcggccatgaagtacgtgctggtgaccggaggggtggtgagcgggctcggcaagggcgtgacggccagcagcatcggcgtcgtgctcaaggcctgcggcctccgcgtcaccaccatcaagatcgatccatacctcaacaccgatgctggaaccatgtcgccgttcgagcacggggaggttttcgttttggacgatggcggagaggtggacttggaccttggaaactacgaacgttttctggacatcaaattgacccgcgacaacaatataaccacgggaaagatcttccaggctgtcattaacaaggagaggagaggcgactacctagggaagaccgtccaggtagtgccgcacatcacggatgagatacaggactggatcgaacgcgtcgcggtggtcccagtggacggcaaggaagggcctcctgacgtctgcgtcatcgagctcgggggcactataggggacaaaatcttttcgccgcataacgacagtggcattcttgatgcaggggatatcgagtcaatgcctttcattgaagcgttaggtcaattctcgtaccgtgttggacctggaaacttctgtctcgttcatgtcagtcttgttccggttctaaatgtagtcggtgaacagaaaactaagcctacacagcacagtgttcgagggcttagagggcttgggttagcgccggatgttttagcatgtcgcagtactgagccattggaggaacatgtgaaggccaagctttcacagttttgccatgtcccggtctcaaatatagtgaacctccatgacgtgacaaacatctggcacatccccttgctgctaagggaccagaaggcccatgaagcgattctgaaggttttagacctccagtatgatggaaaggtgcctcgggaacctgagctaacaaagtggactaaaagagccaccaagtttgacaagttgaagactccggtcaagattgccatggttggaaaatacactggcctgtcggattcctacctgtctgtcataaaggctcttttgcatgcatcggttgctatggaaagaaaacttgtagtcgagtgggttccttcctgcgacctggaagattcttcagctaaagagacccctgaagcccataaaaaagcatggaaattgctgaagggcgcagatggcgtactcgtccctggagggtttggggacaggggagtccagggcaaaatcctcgccgcgaaatacgcacgcgagaacaacgttccttatcttggcatctgcctgggaatgcaaatcgcggtgatcgagtttgcccgctcggtgatgaagctacgaggtgccaatagcacggagttcgatccagctacgacgtcaccctgtgtcatcttcatgccagagggctcaaaaacccaaatgggagccacgatgaggcttgggtcgaggaggacctatttccatgtcagtggctgcaaatctgcgaagctgtacggcaacgccagctctgtagatgaaagacatcgccacagatacgaggtgaaccctgacatggtcccagactttgagaaggccgggcttcagttcgtgggcaaagatgagagtgggaaacgcatggggatcgttgagcttccctctcacaagttcttcatcggtgcacagttccatcctgaattcaagtcgagaccagggaagccatctccgcttttcttagggctgatagccgcggcgtctgggcagctagaaccattgcttcagcgcagcaatccgacaacgaaagcatgttcgatcagtaaagtcccgaaactgaaactgtaccccactgggcctgtgaataatccactgaacagcttggtgaacgggtactacccaaatggcactgggatccacacctagaagcgtagcgcttagcgatggtttggttggtatttgctgctatggtttttttgcttgtacccctcctttttcatgtgttcctttttttcagtttgttatttgtctctgatcaactgagagaagagaaggctaagattcagcaagcccccagctccagcgacacatggttccgacatttttaacgaggaacgccttccagtccgttgaagcgagctagccatagggtggtgaggtctagtgtgatgttgttgttgtttttttctctttcctttttttttggcctggaactaaggcgcgaagtgttttgagtagcgctagtagagcctggaagaagttatctaaactatttgtacattatggaagaacttatctaaggactgaatacacaaatgcttggccatgattgctttgttgccacaatatgaacaaccacgctcagatgaagagtattggtgttgttaaaaaatgccagtgaaattgttgttgttaatgtt

SEQ ID NO: 37038 - DNA, 2356 bp, Zea Mays
ggaagcgctgccgccaggcccgcccctgcctgccctgagggttctatttaacccccctcgtctccccctccgtttccagcctcaaactcttgccctccccccggcaccacactagcctagtgagaagtgcagcagcagcaccagcggcagaagtgttacttagttgctcctcctacctgtgctgctgcgcaggagcagagcctgaaaggacgacggccgtcggcgtaaggggagcgagcgagcgagcggccatgaagtacgtgctggtgaccggaggggtggtgagcgggctcggcaagggcgtgacggccagcagcatcggcgtcgtgctcaaggcctgcggcctccgcgtcaccaccatcaagatcgatccatacctcaacaccgatgctggaaccatgtcgccgttcgagcacggggaggttttcgttttggacgatggcggagaggtggacttggaccttggaaactacgaacgttttctggacatcaaattgacccgcgacaacaatataaccacgggaaagatcttccaggctgtcattaacaaggagaggagaggcgactacctagggaagaccgtccaggtagtgccgcacatcacggatgagatacaggactggatcgaacgcgtcgcggtggtcccagtggacggcaaggaagggcctcctgacgtctgcgtcatcgagctcgggggcactataggggatatcgagtcaatgcctttcattgaagcgttaggtcaattctcgtaccgtgttggacctggaaacttctgtctcgttcatgtcagtcttgttccggttctaaatgtagtcggtgaacagaaaactaagcctacacagcacagtgttcgagggcttagagggcttgggttagcgccggatgttttagcatgtcgcagtactgagccattggaggaacatgtgaaggccaagctttcacagttttgccatgtcccggaccagaaggcccatgaagcgattctgaaggttttagacctccagtatgatggaaaggtgcctcgggaacctgagctaacaaagtggactaaaagagccaccaagtttgacaagttgaagactccggtcaagattgccatggttggaaaatacactggcctgtcggattcctacctgtctgtcataaaggctcttttgcatgcatcggttgctatggaaagaaaacttgtagtcgagtgggttccttcctgcgacctggaagattcttcagctaaagagacccctgaagcccataaaaaagcatggaaattgctgaagggcgcagatggcgtactcgtccctggagggtttggggacaggggagtccagggcaaaatcctcgccgcgaaatacgcacgcgagaacaacgttccttatcttggcatctgcctgggaatgcaaatcgcggtgatcgagtttgcccgctcggtgatgaagctacgaggtgccaatagcacggagttcgatccagctacgacgtcaccctgtgtcatcttcatgccagagggctcaaaaacccaaatgggagccacgatgaggcttgggtcgaggaggacctatttccatgtcagtggctgcaaatctgcgaagctgtacggcaacgccagctctgtagatgaaagacatcgccacagatacgaggtgaaccctgacatggtcccagactttgagaaggccgggcttcagttcgtgggcaaagatgagagtgggaaacgcatggggatcgttgagcttccctctcacaagttcttcatcggtgcacagttccatcctgaattcaagtcgagaccagggaagccatctccgcttttcttagggctgatagccgcggcgtctgggcagctagaaccattgcttcagcgcagcaatccgacaacgaaagcatgttcgatcagtaaagtcccgaaactgaaactgtaccccactgggcctgtgaataatccactgaacagcttggtgaacgggtactacccaaatgagaagagaaggctaagattcagcaagcccccagctccagcgacacatggttccgacatttttaacgaggaacgccttccagtccgttgaagcgagctagccatagggtggtgaggtctagtgtgatgttgttgttgtttttttctctttcctttttttttggcctggaactaaggcgcgaagtgttttgagtagcgctagtagagcctggaagaagttatctaaactatttgtacattatggaagaacttatctaaggactgaatacacaaatgcttggccatgattgctttgttgccacaatatgaacaaccacgctcagatgaagagtattggtgttgttaaaaaatgccagtgaaattgttgttgttaatgtt

SEQ ID NO: 37039 - DNA, 2517 bp, Zea Mays
ggaagcgctgccgccaggcccgcccctgcctgccctgagggttctatttaacccccctcgtctccccctccgtttccagcctcaaactcttgccctccccccggcaccacactagcctagtgagaagtgcagcagcagcaccagcggcagaagtgttacttagttgctcctcctacctgtgctgctgcgcaggagcagagcctgaaaggacgacggccgtcggcgtaaggggagcgagcgagcgagcggccatgaagtacgtgctggtgaccggaggggtggtgagcgggctcggcaagggcgtgacggccagcagcatcggcgtcgtgctcaaggcctgcggcctccgcgtcaccaccatcaagatcgatccatacctcaacaccgatgctggaaccatgtcgccgttcgagcacggggaggttttcgttttggacgatggcggagagaggtggacttggaccttggaaactacgaacgttttctggacatcaaattgacccgcgacaacaatataaccacgggaaagatcttccaggctgtcattaacaaggagaggagaggcgactacctagggaagaccgtccaggtagtgccgcacatcacggatgagatacaggactggatcgaacgcgtcgcggtggtcccagtggacggcaaggaagggcctcctgacgtctgcgtcatcgagctcgggggcactataggggatatcgagtcaatgcctttcattgaagcgttaggtcaattctcgtaccgtgttggacctggaaacttctgtctcgttcatgtcagtcttgttccggttctaaatgtagtcggtgaacagaaaactaagcctacacagcacagtgttcgagggcttagagggcttgggttagcgccggatgttttagcatgtcgcagtactgagccattggaggaacatgtgaaggccaagctttcacagttttgccatgtcccggtctcaaatatagtgaacctccatgacgtgacaaacatctggcacatccccttgctgctaagggaccagaaggcccatgaagcgattctgaaggttttagacctccagtatgatggaaaggtgcctcgggaacctgagctaacaaagtggactaaaagagccaccaagtttgacaagttgaagactccggtcaagattgccatggttggaaaatacactggcctgtcggattcctacctgtctgtcataaaggctcttttgcatgcatcggttgctatggaaagaaaacttgtagtcgagtgggttccttcctgcgacctggaagattcttcagctaaagagacccctgaagcccataaaaaagcatggaaattgctgaagggcgcagatggcgtactcgtccctggagggtttggggacaggggagtccagggcaaaatcctcgccgcgaaatacgcacgcgagaacaacgttccttatcttggcatctgcctgggaatgcaaatcgcggtgatcgagtttgcccgctcggtgatgaagctacgaggtgccaatagcacggagttcgatccagctacgacgtcaccctgtgtcatcttcatgccagagggctcaaaaacccaaatgggagccacgatgaggcttgggtcgaggaggacctatttccatgtcagtggctgcaaatctgcgaagctgtacggcaacgccagctctgtagatgaaagacatcgccacagatacgaggtgaaccctgacatggtcccagactttgagaaggccgggcttcagttcgtgggcaaagatgagagtgggaaacgcatggggttccatcctgaattcaagtcgagaccagggaagccatctccgcttttcttagggctgatagccgcggcgtctgggcagctagaaccattgcttcagcgcagcaatccgacaacgaaagcatgttcgatcagtaaagtcccgaaactgaaactgtaccccactgggcctgtgaataatccactgaacagcttggtgaacgggtactacccaaatggcactgggatccacacctagaagcgtagcgcttagcgatggtttggttggtatttgctgctatggtttttttgcttgtacccctcctttttcatgtgttcctttttttcagtttgttatttgtctctgatcaactgagagaagagaaggctaagattcagcaagcccccagctccagcgacacatggttccgacatttttaacgaggaacgccttccagtccgttgaagcgagctagccatagggtggtgaggtctagtgtgatgttgttgttgtttttttctctttcctttttttttggcctggaactaaggcgcgaagtgttttgagtagcgctagtagagcctggaagaagttatctaaactatttgtacattatggaagaacttatctaaggactgaatacacaaatgcttggccatgattgctttgttgccacaatatgaacaaccacgctcagatgaagagtattggtgttgttaaaaaatgccagtgaaattgttgttgttaatgtt

SEQ ID NO: 37040 - DNA, 2722 bp, Zea Mays
ggtgcccgccgtcgctcgcccaggcccagtcgcagagccgttgcgtgcccgccgtcgctcgcccagctgctgccgccaccgctcgcccagtctaggtccagccgctgccccgcccagccgctcgcggctcgtccaagtgtccgccaccgctcactcagtctaccttcagttcttgttcttgatacacgggtgctcagttccttcagttcttgttcttgatatacgggtgctcagttcatgatacatgggtgctaactgcctgctagacgtgttatcattgcttatgtggtttctacgtgcaggggtacaaattttgcaagctgctttaatttatctgcaatcagcaagggcatttgagtaagaactgccctgagaacaaacatggcatctatccaaagatccatacctcaacaccgatgctggaaccatgtcgccgttcgagcacggggaggttttcgttttggacgatggcggagaggtggacttggaccttggaaactacgaacgttttctggacatcaaattgacccgcgacaacaatataaccacgggaaagatcttccagggctgtcattaacaaggagaggagaggcgactacctagggaagaccgtccaggtagtgccgcacatcacggatgagatacaggactggatcgaacgcgtcgcggtggtcccagtggacggcaaggaagggcctcctgacgtctgcgtcatcgagctcgggggcactataggggacaaaatcttttcgccgcataacgacagtggcattcttgatgcaggggatatcgagtcaatgcctttcattgaagcgttaggtcaattctcgtaccgtgttggacctggaaacttctgtctcgttcatgtcagtcttgttccggttctaaatgtagtcggtgaacagaaaactaagcctacacagcacagtgttcgagggcttagagggcttgggttagcgccggatgttttagcatgtcgcagtactgagccattggaggaacatgtgaaggccaagctttcacagttttgccatgtcccggtctcaaatatagtgaacctccatgacgtgacaaacatctggcacatccccttgctgctaagggaccagaaggcccatgaagcgattctgaaggttttagacctccagtatgatggaaaggtgcctcgggaacctgagctaacaaagtggactaaaagagccaccaagtttgacaagttgaagactccggtcaagattgccatggttggaaaatacactggcctgtcggattcctacctgtctgtcataaaggctcttttgcatgcatcggttgctatggaaagaaaacttgtagtcgagtgggttccttcctgcgacctggaagattcttcagctaaagagacccctgaagcccataaaaaagcatggaaattgctgaaggtaggtgcaggcatcaaacggtagtttcttgaaagtcatgtgcttatgtacatacagtccgtctcacggaattccattccatcccagggcgcagatggcgtactcgtccctggagggtttggggacaggggagtccagggcaaaatcctcgccgcgaaatacgcacgcgagaacaacgttccttatcttggcatctgcctgggaatgcaaatcgcggtgatcgagtttgcccgctcggtgatgaagctacgaggtgccaatagcacggagttcgatccagctacgacgtcaccctgtgtcatcttcatgccagagggctcaaaaacccaaatgggagccacgatgaggcttgggtcgaggaggacctatttccatgtcagtggctgcaaatctgcgaagctgtacggcaacgccagctctgtagatgaaagacatcgccacagatacgaggtgaaccctgacatggtcccagactttgagaaggccgggcttcagttcgtgggcaaagatgagagtgggaaacgcatggggatcgttgagcttccctctcacaagttcttcatcggtgcacagttccatcctgaattcaagtcgagaccagggaagccatctccgcttttcttagggctgatagccgcggcgtctgggcagctagaaccattgcttcagcgcagcaatccgacaacgaaagcatgttcgatcagtaaagtcccgaaactgaaactgtaccccactgggcctgtgaataatccactgaacagcttggtgaacgggtactacccaaatggcactgggatccacacctagaagcgtagcgcttagcgatggtttggttggtatttgctgctatggtttttttgcttgtacccctcctttttcatgtgttcctttttttcagtttgttatttgtctctgatcaactgagagaagagaaggctaagattcagcaagcccccagctccagcgacacatggttccgacatttttaacgaggaacgccttccagtccgttgaagcgagctagccatagggtggtgaggtctagtgtgatgttgttgttgtttttttctctttcctttttttttggcctggaactaaggcgcgaagtgttttgagtagcgctagtagagcctggaagaagttatctaaactatttgtacattatggaagaacttatctaaggactgaatacacaaatgcttggccatgattgctttgttgccacaatatgaacaaccacgctcagatgaagagtattggtgttgttaaaaaatgccagtgaaattgttgttgttaatgtt

SEQ ID NO: 37041 - DNA, 906 bp, Zea Mays
ccgaaagctgctgcctccccaccggtcgccgctcgctcagccggaagccgctgtctatccggtgcccgccgtcgctcgcccaggcccagtcgcagagccgttgcgtgcccgccgtcgctcgcccagctgctgccgccaccgctcgcccagtctaggtccagccgctgccccgcccagccgctcgcggctcgtccaagtgtccgccaccgctcactcagtctaccttcagttcttgttcttgatacacgggggtacaaattttgcaagctgctttaatttatctgcaatcagcaagggcatttgagtaagaactgccctgagaacaaacatggcatctatccaaagacctacagattaatgcatgggccgttcactgtgcgagcgagctgaaaaagcgaggtgctatggaccaatgcaattgacgcacacaccgcgcaccgcacactctctagtctctagaaacacacgtacgtggagcgtggacggcaggtttggtatcgatttggcctcgcaagtttgaataacgccacgccaccacctcgtgacgcctgtacaacaaggtttggtatacaaactgtccggagttgaacggcgacggagaagtccatgcatgcaccatgcacgcgcaactggccggtaggctgcaggacagtactactagggcgccatgcatcctgtgctactattcgctggagagctcatctcgttgtgctagctgtcgttgtccaaatgcaaaacgtgcttaggcatgtaattttaatttcacaccgaattggaacgaacatcctttttttcgtaacaggagtacatcagtacttcctaacactctaacaggtgcactcaagtgtatggttgttcttttctctacagtttaagtatttgtgtggccgcctaacttataacaag

SEQ ID NO: 37042 - DNA, 1606 bp, Zea Mays
ggtgcccgccgtcgctcgcccaggcccagtcgcagagccgttgcgtgcccgccgtcgctcgcccagctgctgccgccaccgctcgcccagtctaggtccagccgctgccccgcccagccgctcgcggctcgtccaagtgtccgccaccgctcactcagtctaccttcagttcttgttcttgatacacgggggtacaaattttgcaagctgctttaatttatctgcaatcagcaagggcatttgagtaagaactgccctgagaacaaacatggcatctatccaaagttgcctaaaatggagaaaaaagaagcttgtattgcctctaccactcgtcactggaagtcagccccctctttaactcatttctagatccgccactggacatgccaacatccaaacatgctatatataccgtacaacatacatagacggcattccctctttcaaaatgtcctatatatgctagtatttagggcctgtttagtccagggactaaagtgtagctagtggactaaagtttagtctctaacatatttggctatagagaataaaaatattcagagcacgttaaattaatcataaggagatcaaaatacaccttagcattttcccacaattagtgcaactgaaataaacgagagccaaaaaagtgaaattaatatggtttagtttcttttagttatcctttgagggactagatactaaaacagtttagtcttaacgtttgataatttagaaactaaatgagactaaaataaagagactaatttttagtcgctcaaaccaaacgaagccttagctgggaaagatatgtgtgttaccctaaataggaaccattgtcatccgtcaccggtacagagtatcggtgtcaacgacgacgttatgcaaggaagaagaagcgctcggcggcggcgacatcacgagtagcgcttggggaaggccaggaacgtatagtgtgtttggtttgagggatagagtgatccatcttcttcttactcctcatttttttatttggtttgtggaatagaatgagttgatccatcaccacctcattcctcataagctaataattagtatatagatgaggagtgagttgattttaccaaaattgatggaatgaacttatgatgcatcatcttataaagtataaagtgactccacaaaccaaacacactagtagaatagactgtaattggtggatgacaaccaaacaacaagtatcgaattaattaatacaacctcaattattcactccgatccaatctgaaattacccaaacaaacccgtaatccgtttgctttacgttttcgtttatcgttgaaccaaacaccatcactgtccacttccaccccatgcatcgcgcgtcgattaggagggggcatacctacacctgcagtagagcgactactataccctgtgacggtacacactacacatggcaacaggcaaggcaacgcaccgtcctttttttttcttgaaaggtctcaagaccatatgctatgcatctcccattgctgacatgcatatgcatagaatgggaggagagagtactggcacgtattatatgcggacacgtagctgatcggcggcagtacgtacgtgcagt

SEQ ID NO: 37043 - DNA, 836 bp, Zea Mays
agaactttataatcaccaatactcctcatgggtaagaatctcaagttttcaatgtaaattattagccataaatttgtggtcaaacataccgacaatctagtaagctccccatgatttccaagacggagtgccaggcctcgcagcatttgtccatggagtgctccctttacagaagctgcagccgctaatctctttaaaacttcacgagcaatgtcagattgaccagtggcatctgctgcatcaataaggtcaaaaaactccttgacgaatttcactattccctgcacggcatctgtaagactttcctgcttagcttgcttagctactgccaaactaagaatctgggtaacgtcagtggcatcagcagcagctgtttcttgtcccacatctcggctattgctcattgttaatagacaagcaagtgctcttttcaggtcattgctctgcattgcaaggtcgaactccagcctcttagatattccaggcaaatggagagcttcagtggcatagcccatacccagcataaactgagccaggtcatcgtgatgctctctgccaagtctcgttgccctgcataatgggtatatatgttattcttcttctcaggtcctaaacacaaaaaggggcaatgctctacaaacataccatttcacagcactaacagggtccccatatgctgcaaggcaacggcatcttataccaggatggctgagtgataaggcatgtgcacacatatacctgtaaggcacatgaaatattgcatagttacatccaggtaagcatatcaaagagtaacaaaatgtaacaatgtaagttgtttgaacaaaaatttatgg

SEQ ID NO: 37044 - DNA, 990 bp, Zea Mays
ccgttggggctggatttcgccgtcgcaacaccgaactactgggtgcacaagggcattgccttcatctgcgagatcaggacctccttgtgcggctcgccgacacatacgacacaagccattgtccgcctccagcccgacataggtagcagcggcgatgacacatccttccatctgcaacaacccatggaggccgacggcggtgcatctaggctagcgctcgctgcgggtgcccgtggacaagcaatcgctcgggatggcggtggaggtggatgcgagtgctcgcatcttatgtgccttgcctggatgcttttggcgagatgtgtgcttggaaaacttcaggtgcatcgtctggtgaagcatgtgtgtccaaaagtgaatattcaaaaagataatggggtgcagatgaagattattggtactcatgtcgatgctacagaaattgtctacgatgaggactcctacaataagattcatgcttccccgcaagtcccctcaactctgaaggcatgcctgtttctgtatcatgtttccatttcatccttgaactcatggaatccatcgatggtgtggaattcagtttaaaattggaagtcaatactcctcagacaagaatagactttcaagaggaagggatctgatctagatcctcgaagttatatatctggaaaacaggctcttcagatatcgaacctcctttatataaatgttgttaatcagcttccagcatttgtttcatttgagttgtgtttactgcctagctctccatccaacaattgatatcttactgactggtggtcgagattcaatttgcagggcccagaacatctgcaatttattttttgataagtcctccaagatttgccctaccatgtggcaaccattgatccatgcccaaaatttgcctgccactggtgttcttatcccaacactcgatcaacatgcaagtagaaatgaagcctagagccaaacgatgcgagaggagtatggtct

SEQ ID NO: 37045 - DNA, 1563 bp, Zea Mays
gagatctgcggccccttccatggtcaaagggccgttggggctggatttcgccgtcgcaacaccgaactactgggtgcacaagggcattgccttcatctgcgagatcagcaaatggaaccagcgaaacagataaaggtcatgaaaggattctagaaacgatcaacacagttggacatgacggacctccttgtgcggctcgccgacacatacgacacaagccattgtccgcctccagcccgacataggtagcagcggcgatgacacatccttccatctgcaacaacccatggaggccgacggcggtgcatctaggctagcgctcgctgcgggtgcccgtggacaagcaatcgctcgggatggcggtggaggtggatgcgaggtgggagcccatgggggcgcaggagtactactactactggcgggccatgtacaacgcccgcggaaacagcaactacaattaccgtggagttgatattgaaggacgcccgattatggtggttgttggtgcacagttccttttttaatgccttgatcttgaatggtttgttctacatgtagtgatggtacggtaatgtatcatgatgtcctaaagcatttgatcaagtgtcagtatgcactttataatcatctggggtgtgtatatcatgtacatttgtatatcaagtgtcctgctgccccacgctctagaatttttttagagcaggtcatgcacatttgtagatcgacaacaaccagccttgtctcgatgttgtgcagtgctcgcatcttatgtgccttgcctggatgcttttggcgagatgtgtgcttggaaaacttcaggtgcatcgtctggtgaagcatgtgtgtccaaaagtgaatattcaaaaagataatggggtgcagatgaagattattggtactcatgtcgatgctacagaaattgtctacgatgaggactcctacaataaggtatacatagactggactacagatttcagtctaccttttctccagtgaactttcaactgatttcccaatattccatgacttattccttgcaagattcatgcttccccgcaagtcccctcaactctgaaggcatgcctgtttctgtatcatgtttccatttcatccttgaactcatggaatccatcgatggtgtggaattcagtttaaaattggaagtcaatactcctcagacaagaatagactttcaagaggaagggatctgatctagatcctcgaagttatatatctggaaaacaggctcttcagatatcgaacctcctttatataaatgttgttaatcagcttccagcatttgtttcatttgagttgtgtttactgcctagctctccatccaacaattgatatcttactgactggtggtcgagattcaatttgcagggcccagaacatctgcaatttattttttgataagtcctccaagatttgccctaccatgtggcaaccattgatccatgcccaaaatttgcctgccactggtgttcttatcccaacactcgatcaacatgcaagtagaaatgaagcctagagccaaacgatgcgagaggagtatggtct

SEQ ID NO: 37046 - DNA, 891 bp, Zea Mays
ccgttggggctggatttcgccgtcgcaacaccgaactactgggtgcacaagggcattgccttcatctgcgagatcaggacctccttgtgcggctcgccgacacatacgacacaagccattgtccgcctccagcccgacataggtagcagcggcgatgacacatccttccatctgcaacaacccatggaggccgacggcggtgcatctaggctagcgctcgctgcgggtgcccgtggacaagcaatcgctcgggatggcggtggaggtggatgcgagtgctcgcatcttatgtgccttgcctggatgcttttggcgagatgtgtgcttggaaaacttcaggtgcatcgtctggtgaagcatgtgtgtccaaaagtgaatattcaaaaagataatggggtgcagatgaagattattggtactcatgtcgatgctacagaaattgtctacgatgaggactcctacaataagattcatgcttccccgcaagtcccctcaactctgaaggcatgcctgtttctgtatcatgtttccatttcatccttgaactcatggaatccatcgatggtgtggaattcagtttaaaattggaagtcaatactcctcagacaagaatagactttcaagaggaagggatctgatctagatcctcgaagttatatatctggaaaacaggctcttcagatatcgaacctcctttatataaatgttgttaatcagcttccagcatttgtttcatttgagttgtgtttactgcctagctctccatccaacaattgatatcttactgactggtggtcgagattcaatttgcagggcccagaacatctgcaatttattttttgataagtcctccaagatttgtgatgctaaaattattgcaatcgattgaag

SEQ ID NO: 37047 - DNA, 1109 bp, Zea Mays
tccattgccatctctagatgaaactacccacatttcgtttctcttcctctccggtccccactagtccccttcccttccctcgcctaccttcgcacgggtgctctgcccgttcgacggccacgccgcgccgcccagctgctccggcacccgcccttcttcgtcgagctcgggatcagcatctcgcttgttctgggctccccattcggcctctcctcgccctaactctattttgcagcatgagaccagcacaacagcccgaatcataggcttgacgcagagaccccatctcatctgcgctcccgcgcgtggcctaacgctaacggagccagaagcaaaggagaggattccacaagcttcgagttgccgaaacattttgttaaatctactgcttgtgtgggatcattagtgcaaatccggtgcttgcgcgtgcaggctgtgctacccatgcgtcttggctattgtgaataaaagggtttagagggatgtcttcagaggagctgagggcgagcttttcagatttggcggtgggttcgccaacccagacagagggcaaaacgtatccttcaggtgatttgtcgtctgaggaggtcatgcaagtcacttgtttcacagaggatcttcatgatgtagtacttcactttcagatagtgaggttttctaaacagatctatgtgtgggttggatgcaacacagcaaagtttggccatttatacgctgctgcaaccactaggccggataacagagtgagcgtgacctctgtactaggaggaacatctgataacaccggatcaagtatggctcgccgtctaggtactgtttctgtttgcagttacagtaactaattccgctgcattcacgattagcttttagtaccagaaaggctgcatcctacatgtcccagtgttgaagaccggtctgaacattgtcctagcatgcagcatcccaaaagacagccccattcttgaggcagctgcggagaggaagctggtggagaagctgaaaggtttgggctacattaaaaccgcagctgtgaatgctaacacttccacggcaccatgatccgtggcatgatctaatttgacccaaaccgtagcgaaaagccattttgg

SEQ ID NO: 37048 - DNA, 1664 bp, Zea Mays
tccattgccatctctagatgaaactacccacatttcgtttctcttcctctccggtccccactagtccccttcccttccctcgcctaccttcgcacgggtgctctgcccgttcgacggccacgccgcgccgcccagctgctccggcacccgcccttcttcgtcgagctcgggatcagcatctcgcttgttctgggctccccattcggcctctcctcgccctaactctattttgcagcatgagaccagcacaacagcccgaatcataggcttgacgcagagaccccatctcatctgcgctcccgcgcgtggcctaacgctaacggagccagaagcaaaggagaggattccacaagcttcgagttgccgaaacattttgttaaatctactgcttgtgtgggatcattagtgcaaatccggtgcttgcgcgtgcaggctgtgctacccatgcgtcttggctattgtgaataaaaggtttcgcctgttgcatctgtcacttgcgatatacccgcgctctgaaatctcgccctagttggtaaaatacaactggtttgcccccaattaggactagtttggatactttgggattagagtgttttggagggattggagagggtgtaaatccccaatagatcagatactctctcaatacatgtcaatccactccaatcccactcattactagagtatccaaactaagccttaggtgactgcaaaacttcatttcaattactctggccctcttttgtgatcatggacatcaagcaaagtgtgtagtaggatgcccctttagggcttgataaaaggagatgatcatgttactcacatatctgaagatgtaacttcatctcgtttcagggtttagagggatgtcttcagaggagctgagggcgagcttttcagatttggcggtgggttcgccaacccagacagagggcaaaacgtatccttcaggtgatttgtcgtctgaggaggtcatgcaagtcacttgtttcacagaggatcttcatgatgtagtacttcactttcagatagtgaggttttctaaacagatctatgtgtgggttggatgcaacacagcaaagtttggccatttatacgctgctgcaaccactaggccgagtgagcgtgacctctgtactaggaggaacatctgataacaccggatcaagtatggctcgccgtctaggcagctgcggagaggaagctggtggagaagctgaaaggtttgggctacattaaaaccgcagctgtgaatgctaacacttccacggcaccatgatccgtggcatgatctagtgagctttcggtcgacgttcatcactagatgcatcatgatcatgagcagttgtgatgtttggtgggcttgattggctaactgtttcatctgttctttcgcgtggtaaaagttattatgaacattttggtgtatggagtgtttaaaagcactagagctaatagatagttggctaaaactactggtgaatttagctagttaactattagctaacttgctaaaaatagttaatagttgaattattaactagtatgtttggatgtctttagctaattttaacagctaactattagctctagtgcatttaaacacacctgtaatgtacttccttttctcgtcctaaaatgagtttccatctcaacatttcaag

SEQ ID NO: 37049 - DNA, 1366 bp, Zea Mays
tccattgccatctctagatgaaactacccacatttcgtttctcttcctctccggtccccactagtccccttcccttccctcgcctaccttcgcacgggtgctctgcccgttcgacggccacgccgcgccgcccagctgctccggcacccgcccttcttcgtcgagctcgggatcagcatctcgcttgttctgggctccccattcggcctctcctcgccctaactctattttgcagcatgagaccagcacaacagcccgaatcataggcttgacgcagagaccccatctcatctgcgctcccgcgcgtggcctaacgctaacggagccagaagcaaaggagaggattccacaagcttcgagttgccgaaacattttgttaaatctactgcttgtgtgggatcattagtgcaaatccggtgcttgcgcgtgcaggctgtgctacccatgcgtcttggctattgtgaataaaagggtttagagggatgtcttcagaggagctgagggcgagcttttcagatttggcggtgggttcgccaacccagacagagggcaaaacgtatccttcaggtgatttgtcgtctgaggaggtcatgcaagtcacttgtttcacagaggatcttcatgatgtagtacttcactttcagatagtgaggttttctaaacagatctatgtgtgggttggatgcaacacagcaaagtttggccatttatacgctgctgcaaccactaggccggataacagagtgagcgtgacctctgtactaggaggaacatctgataacaccggatcaataccagaaaggctgcatcctacatgtcccagtgttgaagaccggtctgaacattgtcctagcatgcagcatcccaaaagacagccccattcttgaggcagctgcggagaggaagctggtggagaagctgaaaggtttgggctacattaaaaccgcagctgtgaatgctaacacttccacggcaccatgatccgtggcatgatctagtgagctttcggtcgacgttcatcactagatgcatcatgatcatgagcagttgtgatgtttggtgggcttgattggctaactgtttcatctgttctttcgcgtggtaaaagttattatgaacattttggtgtatggagtgtttaaaagcactagagctaatagatagttggctaaaactactggtgaatttagctagttaactattagctaacttgctaaaaatagttaatagttgaattattaactagtatgtttggatgtctttagctaattttaacagctaactattagctctagtgcatttaaacacacctgtaatgtacttccttttctcgtcctaaaatgagtttccatctcaacatttcaag

SEQ ID NO: 37050 - DNA, 1775 bp, Zea Mays
tccattgccatctctagatgaaactacccacatttcgtttctcttcctctccggtccccactagtccccttcccttccctcgcctaccttcgcacgggtgctctgcccgttcgacggccacgccgcgccgcccagctgctccggcacccgcccttcttcgtcgagctcgggatcagcatctcgcttgttctgggctccccattcggcctctcctcgccctaactctattttgcagcatgagaccagcacaacagcccgaatcataggcttgacgcagagaccccatctcatctgcgctcccgcgcgtggcctaacgctaacggagccagaagcaaaggagaggattccacaagcttcgagttgccgaaacattttgttaaatctactgcttgtgtgggatcattagtgcaaatccggtgcttgcgcgtgcaggctgtgctacccatgcgtcttggctattgtgaataaaaggtttcgcctgttgcatctgtcacttgcgatatacccgcgctctgaaatctcgccctagttggtaaaatacaactggtttgcccccaattaggactagtttggatactttgggattagagtgttttggagggattggagagggtgtaaatccccaatagatcagatactctctcaatacatgtcaatccactccaatcccactcattactagagtatccaaactaagccttaggtgactgcaaaacttcatttcaattactctggccctcttttgtgatcatggacatcaagcaaagtgtgtagtaggatgcccctttagggcttgataaaaggagatgatcatgttactcacatatctgaagatgtaacttcatctcgtttcagggtttagagggatgtcttcagaggagctgagggcgagcttttcagatttggcggtgggttcgccaacccagacagagggcaaaacgtatccttcaggtgatttgtcgtctgaggaggtcatgcaagtcacttgtttcacagaggatcttcatgatgtagtacttcactttcagatagtgaggttttctaaacagatctatgtgtgggttggatgcaacacagcaaagtttggccatttatacgctgctgcaaccactaggccggataacagagtgagcgtgacctctgtactaggaggaacatctgataacaccggatcaagtatggctcgccgtctagcttttagtaccagaaaggctgcatcctacatgtcccagtgttgaagaccggtctgaacattgtcctagcatgcagcatcccaaaagacagccccattcttgaggcagctgcggagaggaagctggtggagaagctgaaaggtttgggctacattaaaaccgcagctgtgaatgctaacacttccacggcaccatgatccgtggcatgatctagtgagctttcggtcgacgttcatcactagatgcatcatgatcatgagcagttgtgatgtttggtgggcttgattggctaactgtttcatctgttctttcgcgtggtaaaagttattatgaacattttggtgtatggagtgtttaaaagcactagagctaatagatagttggctaaaactactggtgaatttagctagttaactattagctaacttgctaaaaatagttaatagttgaattattaactagtatgtttggatgtctttagctaattttaacagctaactattagctctagtgcatttaaacacacctgtaatgtacttccttttctcgtcctaaaatgagtttccatctcaacatttcaag

SEQ ID NO: 37051 - DNA, 1750 bp, Zea Mays
tccattgccatctctagatgaaactacccacatttcgtttctcttcctctccggtccccactagtccccttcccttccctcgcctaccttcgcacgggtgctctgcccgttcgacggccacgccgcgccgcccagctgctccggcacccgcccttcttcgtcgagctcgggatcagcatctcgcttgttctgggctccccattcggcctctcctcgccctaactctattttgcagcatgagaccagcacaacagcccgaatcataggcttgacgcagagaccccatctcatctgcgctcccgcgcgtggcctaacgctaacggagccagaagcaaaggagaggattccacaagcttcgagttgccgaaacattttgttaaatctactgcttgtgtgggatcattagtgcaaatccggtgcttgcgcgtgcaggctgtgctacccatgcgtcttggctattgtgaataaaaggtttcgcctgttgcatctgtcacttgcgatatacccgcgctctgaaatctcgccctagttggtaaaatacaactggtttgcccccaattaggactagtttggatactttgggattagagtgttttggagggattggagagggtgtaaatccccaatagatcagatactctctcaatacatgtcaatccactccaatcccactcattactagagtatccaaactaagccttaggtgactgcaaaacttcatttcaattactctggccctcttttgtgatcatggacatcaagcaaagtgtgtagtaggatgcccctttagggcttgataaaaggagatgatcatgttactcacatatctgaagatgtaacttcatctcgtttcagggtttagagggatgtcttcagaggagctgagggcgagcttttcagatttggcggtgggttcgccaacccagacagagggcaaaacgtatccttcaggtgatttgtcgtctgaggaggtcatgcaagtcacttgtttcacagaggatcttcatgatgtagtacttcactttcagatagtgaggttttctaaacagatctatgtgtgggttggatgcaacacagcaaagtttggccatttatacgctgctgcaaccactaggccggataacagagtgagcgtgacctctgtactaggaggaacatctgataacaccggatcaataccagaaaggctgcatcctacatgtcccagtgttgaagaccggtctgaacattgtcctagcatgcagcatcccaaaagacagccccattcttgaggcagctgcggagaggaagctggtggagaagctgaaaggtttgggctacattaaaaccgcagctgtgaatgctaacacttccacggcaccatgatccgtggcatgatctagtgagctttcggtcgacgttcatcactagatgcatcatgatcatgagcagttgtgatgtttggtgggcttgattggctaactgtttcatctgttctttcgcgtggtaaaagttattatgaacattttggtgtatggagtgtttaaaagcactagagctaatagatagttggctaaaactactggtgaatttagctagttaactattagctaacttgctaaaaatagttaatagttgaattattaactagtatgtttggatgtctttagctaattttaacagctaactattagctctagtgcatttaaacacacctgtaatgtacttccttttctcgtcctaaaatgagtttccatctcaacatttcaag

SEQ ID NO: 37052 - DNA, 1659 bp, Zea Mays
tccattgccatctctagatgaaactacccacatttcgtttctcttcctctccggtccccactagtccccttcccttccctcgcctaccttcgcacgggtgctctgcccgttcgacggccacgccgcgccgcccagctgctccggcacccgcccttcttcgtcgagctcgggatcagcatctcgcttgttctgggctccccattcggcctctcctcgccctaactctattttgcagcatgagaccagcacaacagcccgaatcataggcttgacgcagagaccccatctcatctgcgctcccgcgcgtggcctaacgctaacggagccagaagcaaaggagaggattccacaagcttcgagttgccgaaacattttgttaaatctactgcttgtgtgggatcattagtgcaaatccggtgcttgcgcgtgcaggctgtgctacccatgcgtcttggctattgtgaataaaaggtttcgcctgttgcatctgtcacttgcgatatacccgcgctctgaaatctcgccctagttggtaaaatacaactggtttgcccccaattaggactagtttggatactttgggattagagtgttttggagggattggagagggtgtaaatccccaatagatcagatactctctcaatacatgtcaatccactccaatcccactcattactagagtatccaaactaagccttaggtgactgcaaaacttcatttcaattactctggccctcttttgtgatcatggacatcaagcaaagtgtgtagtaggatgcccctttagggcttgataaaaggagatgatcatgttactcacatatctgaagatgtaacttcatctcgtttcagggtttagagggatgtcttcagaggagctgagggcgagcttttcagatttggcggtgggttcgccaacccagacagagggcaaaacgtatccttcagatctatgtgtgggttggatgcaacacagcaaagtttggccatttatacgctgctgcaaccactaggccggataacagagtgagcgtgacctctgtactaggaggaacatctgataacaccggatcaacttttagtaccagaaaggctgcatcctacatgtcccagtgttgaagaccggtctgaacattgtcctagcatgcagcatcccaaaagacagccccattcttgaggcagctgcggagaggaagctggtggagaagctgaaaggtttgggctacattaaaaccgcagctgtgaatgctaacacttccacggcaccatgatccgtggcatgatctagtgagctttcggtcgacgttcatcactagatgcatcatgatcatgagcagttgtgatgtttggtgggcttgattggctaactgtttcatctgttctttcgcgtggtaaaagttattatgaacattttggtgtatggagtgtttaaaagcactagagctaatagatagttggctaaaactactggtgaatttagctagttaactattagctaacttgctaaaaatagttaatagttgaattattaactagtatgtttggatgtctttagctaattttaacagctaactattagctctagtgcatttaaacacacctgtaatgtacttccttttctcgtcctaaaatgagtttccatctcaacatttcaag

SEQ ID NO: 37053 - DNA, 649 bp, Zea Mays
agtgatgtagccgtaggcccactgcattgattgcttgcgccgcgtacttttacaccgggatcaaactccagtcggtgaagctggcaatgaagcacctgaaacgggtttcctccgagctcgaggtgatcaagggaggccctgaagaggaggagcaggagctgatgctccaaggagtacggttcgccttcagggtacaccagttcgcaggtgggttcgacgtggacaccatgcgagccttccaggagctcaaggagaaggcgtccatgtgccgggtacagcggcagaagcagcaccgtcacctgcgccagcacaggctcgttgccagggcctgagaggaggagactgaggagtgtgtgaggaccagagcatgcagttcttattttttatatggtcggattatctatacgccatcatctcgtcgtcgccgccacagtgccatagtatgatttgttcattgtttttttttttgcgagaaatagttgatcgtgtattctgctgtaaacgctccagtactgtaactaatgaacagcctttgtacctttttttaggagaaatatgtgtttattctctttcgttcttccgatgggttagaaaccagcttagaaaacttagtcatgtttgagttggacttgtgttgctctcatccggg

SEQ ID NO: 37054 - DNA, 2940 bp, Zea Mays
gtcggctccccgccacggccctttcaacccaaaagacccgtttctcggacgccgcgccccgcgcctccagcttaaaccccgaagggcagttcctagtgcatcgccgccgcggccgccgctgagagtagtcatgtgctagtgcgccccggcgcagtcctaacggtacgtaggtctctccacggtggtttagtgaagttaagaacaccgccatggtgacaggccgggtcaaggcggccatgggcttccagcgcagccccaagtcgcaggtgccggaggcggcgtctccttctcgggcgcctacgtcggggtccgtgtccaccgccgggtcggcgccgtccaaggcgtcggcgctcgcgcggtccttcggcgcgtacttcccgcgctcttcggcgcaggtgcgccccgccgcccgcgcgccgccgcaggtcgccgagctgctgcgcgccatcgagcagctccaggagcgggagtcgcgcctccgcgtggagctgctggagcagaagatactcaaggagaccgtcgccatcgtcccgttcctggaggccgagctcgcggccaagaaggccgagctccagaggtgcagggacaccgcggagcggctggaggccgagaacgggcggctgtgcgccgagctcgacgccgccgcgctcgaggtcacgagcaggaagcagaggatcgtcgagctggagaaggagatggcggagctgaggacgcggcaggacgcggcagcggacgccgacgactgctcctcgtccgcttcggcgccgagcgagcgtctcgagagctccagcgctgcgccaaagccaaaccgcgcgagtttagctcagcttgatcctccagcgccgccagcgccagggccagcgcctttgaagtccaagtcctacttctccgcgagctcgtcgcacccttcgcccgcaagctcgtcgccgccgccctcgccgtcttcctccacgtcgacctcgtcttcgccagcgcactcccgctcgtcgtcggacacggcagccgctccaaggccccgcgtggtagagctctcaaagctcccgcccatacctccgccgccgccgccttgccctcctccgccacctcccagcaggagcaagagatcctctcccccgaactcagccagcgtggacggaagcgcagccgccgctccgcctcccccgccgccgccgccgccgccgcctccccctccggcaaggaggcagttcggcgccgcgccagcaccgcctgcaggggcatcgtcggggcagggcgacgtgaggcgcgtgcccgaggtggtggagttctaccactcgttaatgcggcgggagtccaagagggacggcagcggcacagcaagtgaggccgcgaacggaggcggcggcggcgcggcggcgacgcgcgacatgatcggagagatcgagaaccggtctgcgcatctcctcgcggtgcgtaaagctgaagcatccatccatccgtaatcacctcgttctcgttttccgaaccgtgaccaccgccgccggtacgcagctactacgcgcgttaggtcgggtagataggcgtcctcttcagctgctagccttctaaccactgtccgaatggaacgacccgaagaacgcttcgtgtaggttggttggttggtttggtgacgcacagtcgtggaacagtggaggcgtcgttctccgtcgtcatttatgacaatattacaagcggtctccgtcgtcatttatgacaatattacaagcggtctccgtcgttattacaagagaagcggtttggttgggtagatatacggctgctacggtcaatgcatgcatgatccgtttgctctcgagttatcctcctcgatgtccatgccagaaatccaaatgcattctcattgctgaaatgttgacggtacattgtgctgatactacgggcgggctggtaaactagaaacgtaatcaagtcggacgtggagaggcagggcgacttcatccggttcctgatcaaggaggtggagggcgcggcgttcgtggacatcgaggacgtcgtgagcttcgtcaagtggctggacgacgagctctcgcgcctggtggacgagcgcgcggtgctgaagcacttcgagtggccggagaacaaggcggacgcgctccgcgaggcggcgttcggctactgcgacctcaagaagctggagcgggaggcggcctccttccgcgacgacgcgcgccagccctgcgccgcggcgctcaagaagatgcaggcgctcttcgagaagctggagcacggcgtgtataacctcgcccgcgtccgggacgccgccaccggccgctacacccggttccagatcccgtgggagtggatgaagcaggacaccggcatcgtcagccagatcaaactccagtcggtgaagctggcaatgaagcacctgaaacgggtttcctccgagctcgaggtgatcaagggaggccctgaagaggaggagcaggagctgatgctccaaggagtacggttcgccttcagggtacaccagttcgcaggtgggttcgacgtggacaccatgcgagccttccaggagctcaaggagaaggcgtccatgtgccgggtacagcggcagaagcagcaccgtcacctgcgccagcacaggctcgttgccagggcctgagaggaggagactgaggagtgtgtgaggaccagagcatgcagttcttattttttatatggtcggattatctatacgccatcatctcgtcgtcgccgccacagtgccatagtatgatttgttcattgtttttttttttgcgagaaatagttgatcgtgtattctgctgtaaacgctccagtactgtaactaatgaacagcctttgtacctttttttaggagaaatatgtgtttattctctttcgttcttccgatgggttagaaaccagcttagaaaacttagtcatgtttgagttggacttgtgttgctctcatccggg

SEQ ID NO: 37055 - DNA, 1181 bp, Zea Mays
gtcggctccccgccacggccctttcaacccaaaagacccgtttctcggacgccgcgccccgcgcctccagcttaaaccccgaagggcagttcctagtgcatcgccgccgcggccgccgctgagagtagtcatgtgctagtgcgccccggcgcagtcctaacgatcaagtcggacgtggagaggcagggcgacttcatccggttcctgatcaaggaggtggagggcgcggcgttcgtggacatcgaggacgtcgtgagcttcgtcaagtggctggacgacgagctctcgcgcctggtggacgagcgcgcggtgctgaagcacttcgagtggccggagaacaaggcggacgcgctccgcgaggcggcgttcggctactgcgacctcaagaagctggagcgggaggcggcctccttccgcgacgacgcgcgccagccctgcgccgcggcgctcaagaagatgcaggcgctcttcgagaagctggagcacggcgtgtataacctcgcccgcgtccgggacgccgccaccggccgctacacccggttccagatcccgtgggagtggatgaagcaggacaccggcatcgtcagccagatcaaactccagtcggtgaagctggcaatgaagcacctgaaacgggtttcctccgagctcgaggtgatcaagggaggccctgaagaggaggagcaggagctgatgctccaaggagtacggttcgccttcagggtacaccagttcgcaggtgggttcgacgtggacaccatgcgagccttccaggagctcaaggagaaggcgtccatgtgccgggtacagcggcagaagcagcaccgtcacctgcgccagcacaggctcgttgccagggcctgagaggaggagactgaggagtgtgtgaggaccagagcatgcagttcttattttttatatggtcggattatctatacgccatcatctcgtcgtcgccgccacagtgccatagtatgatttgttcattgtttttttttttgcgagaaatagttgatcgtgtattctgctgtaaacgctccagtactgtaactaatgaacagcctttgtacctttttttaggagaaatatgtgtttattctctttcgttcttccgatgggttagaaaccagcttagaaaacttagtcatgtttgagttggacttgtgttgctctcatccggg

SEQ ID NO: 37056 - DNA, 2311 bp, Zea Mays
gtcggctccccgccacggccctttcaacccaaaagacccgtttctcggacgccgcgccccgcgcctccagcttaaaccccgaagggcagttcctagtgcatcgccgccgcggccgccgctgagagtagtcatgtgctagtgcgccccggcgcagtcctaacggtacgtaggtctctccacggtggtttagtgaagttaagaacaccgccatggtgacaggccgggtcaaggcggccatgggcttccagcgcagccccaagtcgcaggtgccggaggcggcgtctccttctcgggcgcctacgtcggggtccgtgtccaccgccgggtcggcgccgtccaaggcgtcggcgctcgcgcggtccttcggcgcgtacttcccgcgctcttcggcgcaggtgcgccccgccgcccgcgcgccgccgcaggtcgccgagctgctgcgcgccatcgagcagctccaggagcgggagtcgcgcctccgcgtggagctgctggagcagaagatactcaaggagaccgtcgccatcgtcccgttcctggaggccgagctcgcggccaagaaggccgagctccagaggtgcagggacaccgcggagcggctggaggccgagaacgggcggctgtgcgccgagctcgacgccgccgcgctcgaggtcacgagcaggaagcagaggatcgtcgagctggagaaggagatggcggagctgaggacgcggcaggacgcggcagcggacgccgacgactgctcctcgtccgcttcggcgccgagcgagcgtctcgagagctccagcgctgcgccaaagccaaaccgcgcgagtttagctcagcttgatcctccagcgccgccagcgccagggccagcgcctttgaagtccaagtcctacttctccgcgagctcgtcgcacccttcgcccgcaagctcgtcgccgccgccctcgccgtcttcctccacgtcgacctcgtcttcgccagcgcactcccgctcgtcgtcggacacggcagccgctccaaggccccgcgtggtagagctctcaaagctcccgcccatacctccgccgccgccgccttgccctcctccgccacctcccagcaggagcaagagatcctctcccccgaactcagccagcgtggacggaagcgcagccgccgctccgcctcccccgccgccgccgccgccgccgcctccccctccggcaaggaggcagttcggcgccgcgccagcaccgcctgcaggggcatcgtcggggcagggcgacgtgaggcgcgtgcccgaggtggtggagttctaccactcgttaatgcggcgggagtccaagagggacggcagcggcacagcaagtgaggccgcgaacggaggcggcggcggcgcggcggcgacgcgcgacatgatcggagagatcgagaaccggtctgcgcatctcctcgcgatcaagtcggacgtggagaggcagggcgacttcatccggttcctgatcaaggaggtggagggcgcggcgttcggctactgcgacctcaagaagctggagcgggaggcggcctccttccgcgacgacgcgcgccagccctgcgccgcggcgctcaagaagatgcaggcgctcttcgagaagctggagcacggcgtgtataacctcgcccgcgtccgggacgccgccaccggccgctacacccggttccagatcccgtgggagtggatgaagcaggacaccggcatcgtcagccagatcaaactccagtcggtgaagctggcaatgaagcacctgaaacgggtttcctccgagctcgaggtgatcaagggaggccctgaagaggaggagcaggagctgatgctccaaggagtacggttcgccttcagggtacaccagttcgcaggtgggttcgacgtggacaccatgcgagccttccaggagctcaaggagaaggcgtccatgtgccgggtacagcggcagaagcagcaccgtcacctgcgccagcacaggctcgttgccagggcctgagaggaggagactgaggagtgtgtgaggaccagagcatgcagttcttattttttatatggtcggattatctatacgccatcatctcgtcgtcgccgccacagtgccatagtatgatttgttcattgtttttttttttgcgagaaatagttgatcgtgtattctgctgtaaacgctccagtactgtaactaatgaacagcctttgtacctttttttaggagaaatatgtgtttattctctttcgttcttccgatgggttagaaaccagcttagaaaacttagtcatgtttgagttggacttgtgttgctctcatccggg

SEQ ID NO: 37057 - DNA, 1543 bp, Zea Mays
ttggcgcagtggtcatggacatcgtgctgttaaaaacgaagaagggatgacttgtactgtcgttgtgcgacgatgcacaggagaagtcaggaatgctcagaaagaagttcagcggaagagttcgggctggcgaaggtgacggcgatccaggcgggcacggcgccaggggacttccagaacggcgccaacttcgccatcatctcggccaccgccaacaacggctccttcttcgcgggcaacggcatggacatcaggcccttctcgctggacacgcagatgctgtggttcaggacccacctccgcgagctcgtgcaggcggcggcggcggcacagcagaacggcagcgtgggcgcgctgctgagcggcgcgctggtggcgctgggcgagatcggagggaacgactacaacttcgccttctcgcggggcgtgccgcgggacgcggtgcgcaggttcgtgccggccgtggtggacaagctggcgggcgccatggaggagctcatcgccatgggggcgcgcgccttcgtggtgcccgggaacctacccttcggctgcacgccgctgtacctgcagcggttccgcgccaacggcgggtggtgggactacgacccggccacgggctgcctcgcctggttcaaccgcttcgcccagtaccacaaccgggtgctcgcggcgcgcctcgacaggctccggcgcctgcacccggacgtgaccatcgtctacgccgactggtacgaggccacgatgagcatcttccaggaccccgggaagctagggttcacaaacgctctgcggacttgctgcgggaaccagaccgtgccgtgtggcaggcccgggtgctccgtctgcaaggacccgtccacgtacgggtcctgggacgggacgcacccgacggaggcggtgtacaaggtgatcgccgacggggtgctgcacgggccgcacgcgtcccctgttcctctcgccgacacctgtcctccgacatgacccttagaagatttataattggcagctttaagagcggtggtaacatctgaatcgtacttgcgtgattttaaggatggcacgataatagctttgtttaagaatacaggtgaggttggcatatttcgatagcataagcatacacacgaagctctgaagtgataattgagtttgtataaacatcatcattgatttagggggtgtttggttagagggactaaagattagtctctagtttttagtctcttttagtctcttttttaccaaacattaggactaaaatatgaactaaaatgatttagtctgtagtccttcacatatgtgctaaaagggactaaaccatattaattccacatttaccctttatttagttcaattgtactaatagtaggagaatgttaaaggctattttagtcttattatgagtcatttagaatattcttactatttttagcccttataaccaaacatgttagagactaaactttagtctcctaactaaactttagtctctagactaaacaaactaaacatggccttattgttgatcctatccatctttctt

SEQ ID NO: 37058 - DNA, 2506 bp, Zea Mays
ccctcttctcttctcgtctcccctccgccgcttccgttgctcgcagtgctgcctcccctcctctcttcactcgtcaggcccttccgccgtcccggaggctcgaacccctcggcccgcggacgggaccctaaacccgccccaccactcgcgcggggttcgcccgcgacgcatgcgcggcggcggctggtaccctcggcagccggcgatcgccggaaatctgcggggacagtgcggcggcttgcacgagtgccggacacggcgggagtggggaacgtaggggagatggcggcgggaggaaagggctgggcggagcgggtacgccgcggggcgaggaccgcttggttcatggtggccatggtggcctcgctgctcgtggcgtcgtcgccggcgctggtggcggcgggcgacatggcagtggcgctctggctcgaggcgcggctcggctgcttccgaggcgacggcctgcggggccacctccagcgctaccgttttcggaactcgcttgccgacatacctctcgtctccgtcgttcgatccatcgtcatcacctgtgtgtacctcatgtctgatacttctggcctctctcatggtccttaccttggaacaacaactttctgttccttggcttctctgctcatcttgttaattaaggcatctgtttatagtccggcgcaggacattgggcctgagctctcgccgtcgttaccagatcacaagctcaatctcaagaatctatggggaatgcctgtacttttcctgtcttccttggtgtttgctcttggccatgttattgttgcttacagaacaagcggcagggctcgacggaagcttctcattcaccgcattgaccctgaatcgattttagcatacaagaatgccttttctggatgctacaaggttccacggtctcctacaccatacagcggaaagctttttacaaggagtgaaagtgagactaagagaaaatcacttatccaggacgatcgtgatttgccaatcagttttcttgcagacagtgatagcatgttcattgcttgccaggggatcactatacactacaaagtttccgatccagcagccagcctaccttcatcccctggcttcttttcagagagagatactcatcacgatgtaatttcatcaagcatttctcctagaagacagaggcatgagagtccaccatctgcttcctctaatacccgtcgcgttctgaataggagctttagccatcaataccataatacttcgctatatgcaccactattggtagaaccagtggcatctccaactttgttggatgatattcctctgatgtgtattgatgatggcaatgctgatggatgtctgagtcatgtgggctttgaccttgaggctggagggcagggtaaattcgctgtagttttggtgcatggatttggagggggagtattctcgtggagacatgtttccaatttgttagctcgacaattgggatgcactgtgatggcatttgatcgcccaggatggggattaacatctcgacctcgtaggaaggactgggaagataagaagttaccgaatccatatgagctggagtctcagagatgggcttgcactctgtggttttagttggtcatgatgatgggggcttgcttgccttgaaggctgcggagaagctgcgcacttatggaggtgacagagaggttgaagtgaagggagtagttcttattggtgtgagcttatcaagagaagtcattcctgcatttgctcgtatactcctgcatacacctctgaggaaaaagcacatggttcgaccacttctacgtactgaaatcgttcaagttatcaatcggcgggcatggtatgatgccacaaagttgacgacagaaatacttaacctatacaaggctccgctatttgttgagggctgggatgaagcacttcatgaagtaggccggctttcgttttctactgtcctgccatcaaaacgagcagcggatctactaagatcagtggaagaccttccggttctggtggtagcgggctccgaggatgctcttgtttctctgaagtcggcacaagccatggcttcgaaatttgtaaattctaggatagtaattatatcggggtgtggacatctgccgcacgaggagtgccccaaggcgttgctctcggctcttgctcctttcatctctacattggtaccctcagaagatttgttgcaaagactgtagaatatactcgttcctttttcgtttttttaagaacttttttctagctggtgagtttgtatgagcccattgtagcgcgaagtagtagtggagcctgacccaaaatctcaagggttcctagagctcccctgatttttttgtcacatgttaatggttccccctgaacgatttcaattaagcaagttgaatgtgtacagcacatgctttgttctgttccttgcccagcctaggtggggagaacaggcttagtacaatggcgatagctatcttggtttgaagccatctccgtggaagcc

SEQ ID NO: 37059 - DNA, 1126 bp, Zea Mays
aaacagctagcaagagatctgtgcaccagtgaacgaagaatcctgtatcgcacacaatatattggatatgactcagcatgtttccatgatttcaattacactgtcccccagagagctggacaagcacactcccgggtaccaagctccagtgtatgttgaacaaccaaggcaacagcaggtgccaccaccacatcgccaaccacgcagaccaccagcacaattccagcagctggagtatgaagattcttatgcacggggtcgaggaagaggcgtgggcgtggaaggggctggggtagaggtggctacggtggctatggtggatatggaaacaaccaaggtggctatcatcagggtggtgggtattatgacaatcaaggtggagataatggctatgataatcaagacagatatagtggctatgataatcaaagtgggtatggtggtggatatggctataaccaaggcagatatgggaactatcaaggcaatgacacatcttgataagttgatccagaaaatggtggatataaccgagacacaggaagtggtatgcgaggaagaggcaattggggttaccgaggaggggtgaaccaagcacaaaaacatcagctcatgctcatgtggtattttaagccctgcctctatatggacgccggcctcgcttccgcggtcaccgcgcttcggacctgcaccgatgtcgcgcacgtgctcgagcagtttcgcctcgcctggtgcagcaagctcgcccgggacgcccgcaccgtcgttccgttaaggacctctgcttcgacctattcatcattaggggtggaaacagagctttcaatgcatgctggaggtgcgcgatgtgatcgatattatccatgcttgataaatgatgacaatggtgatggctatgatatatggtcaatattgtattgatctttttcccgagttttaggttgtcatgttgtttgctggaatggagatatttcattgttcacttggttcatgtgacagagttaattaccttatttacgtgctttcttagtaccttttttctgagatttgagttgtaagtaacacttccctaatcgcgttatcattataactcaatgacattattaaaatcatatatagaagtcta

SEQ ID NO: 37060 - DNA, 1207 bp, Zea Mays
tgctaaacagctagcaagagatctgtgcaccagtgaacgaagaatcctgtatcgcacacaatatattggatatgactcagcatgtttccatgatttcaattacactgtcccccagagagctggacaagcacactcccgggtaccaagctccagtgtatgttgaacaaccaaggcaacagcaggtgccaccaccacatcgccaaccacgcagaccaccagcacaattccagcagctggagtatgaagattcttatgcacggggtcgaggaagaggcgtgggcgtggaaggggctggggtagaggtggctacggtggctatggtggatatggaaacaaccaaggtggctatcatcagggtggtgggtattatgacaatcaaggtggagataatggctatgataatcaagacagatatagtggctatgataatcaaagtgggtatggtggtggatatggctataaccaaggcagatatgggaactatcaagaaaatggtggatataaccgagacacaggaagtggtatgcgaggaagaggcaattggggttaccgaggagagtgttgtcgtcgactgtatctccaaaattcctttcgacaccattcaattgccttcctccgactacattgtgatcattgaccaccattgttctctgtactatgacaggggtgaaccaagcacaaaaacatcagctcatgctcatgtggtattttaagccctgcctctatatggacgccggcctcgcttccgcggtcaccgcgcttcggacctgcaccgatgtcgcgcacgtgctcgagcagtttcgcctcgcctggtgcagcaagctcgcccgggacgcccgcaccgtcgttccgttaaggacctctgcttcgacctattcatcattaggggtggaaacagagctttcaatgcatgctggaggtgcgcgatgtgatcgatattatccatgcttgataaatgatgacaatggtgatggctatgatatatggtcaatattgtattgatctttttcccgagttttaggttgtcatgttgtttgctggaatggagatatttcattgttcacttggttcatgtgacagagttaattaccttatttacgtgctttcttagtaccttttttctgagatttgagttgtaagtaacacttccctaatcgcgttatcattataactcaatgacattattaaaatcatatatagaagtcta

SEQ ID NO: 37061 - DNA, 1100 bp, Zea Mays
tgctaaacagctagcaagagatctgtgcaccagtgaacgaagaatcctgtatcgcacacaatatattggatatgactcagcatgtttccatgatttcaattacactgtcccccagagagctggacaagcacactcccgggtaccaagctccagtgtatgttgaacaaccaaggcaacagcaggtgccaccaccacatcgccaaccacgcagaccaccagcacaattccagcagctggagtatgaagattcttatgcacggggtcgaggaagaggcgtgggcgtggaaggggctggggtagaggtggctacggtggctatggtggatatggaaacaaccaaggtggctatcatcagggtggtgggtattatgacaatcaaggtggagataatggctatgataatcaagacagatatagtggctatgataatcaaagtgggtatggtggtggatatggctataaccaaggcagatatgggaactatcaagaaaatggtggatataaccgagacacaggaagtggtatgcgaggaagaggcaattggggttaccgaggaggggtgaaccaagcacaaaaacatcagctcatgctcatgtggtattttaagccctgcctctatatggacgccggcctcgcttccgcggtcaccgcgcttcggacctgcaccgatgtcgcgcacgtgctcgagcagtttcgcctcgcctggtgcagcaagctcgcccgggacgcccgcaccgtcgttccgttaaggacctctgcttcgacctattcatcattaggggtggaaacagagctttcaatgcatgctggaggtgcgcgatgtgatcgatattatccatgcttgataaatgatgacaatggtgatggctatgatatatggtcaatattgtattgatctttttcccgagttttaggttgtcatgttgtttgctggaatggagatatttcattgttcacttggttcatgtgacagagttaattaccttatttacgtgctttcttagtaccttttttctgagatttgagttgtaagtaacacttccctaatcgcgttatcattataactcaatgacattattaaaatcatatatagaagtcta

SEQ ID NO: 37062 - DNA, 279 bp, Zea Mays
ggagacggtttatacaacttcattaagaggatggccagttgagcgatggcttatgccttccttgtggttagtccacctgacatgagtcaatgctttgaggagatggctgctgctaaatctaataaaacttcatccaaacctggattgaattatcctggcctggaagaacagacccttcagtttatcttggactgctgtgaatctaatatagaaaatatacaaagtacttagagggtggcgctggctctccagaagtttcaatgaatgcaaagcaagcga

SEQ ID NO: 37063 - DNA, 1037 bp, Zea Mays
ctcctccatcccatcgtctccccggaaaccttgtcgtcaccctctcccgcgaactccgtgtcgatagttccgctcttcggctcgggcgctcggtcgttccgttccccattcttctcgtacgcggccgattgtgaccctcgccctcgcctccccacaccacctaaaatgccctgcctccgcgcccgctcgtcatccccgcgccgcctcgtggacgccccggtcggcgatgtggcgggagcatgcggcccgctcctcaggctcctctcggcgtgcggcggggtctggcccacctcgccggtccccggcgccgcggcctcctcctccaccttctctagggacgactcagaaggcagtgacggcctcctccggggatgactcggaatcgaggccggcccgtgctcgtgaatcctccgtcgggcgcggcgccatcggcgttcctctgctgtgtgatccctaaaaccccgcggtgctctagcgaccccgcgatatgggacgacgacgacgacgggaggcgtttcggccgtgcttcgtggatttaggtgcagggattagctgggaatacgatcgtcgcagttgctgcactcgggctcttcctcgccaagaggaacataaacacacctcaggtggtatcctctcatggggtttaatgtggcctctcattgccaagaagaaggggagttggtacccagctaacctggaagactcaagtttacatgggttgcaggcttacagggttttcatttccatcgctttgatccttggagacggtttatacaacttcattaaggatggccagttgagcgatggcttatgccttccttgtggttagtccacctgacatgagtcaatgctttgaggagatggctgctgctaaatctaataaaacttcatccaaacctggattgaattatcctggcctggaagaacagacccttcagtttatcttggactgctgtgaatctaatatagaaaatatacaaagtacttagagggtggcgctggctctccagaagtttcaatgaatgcaaagcaagcga

SEQ ID NO: 37064 - DNA, 929 bp, Zea Mays
ctccccatccgcgcttgactacgtccgccctagcgctcctccatcccatcgtctccccggaaaccttgtcgtcaccctctcccgcgaactccgtgtcgatagttccgctcttcggctcgggcgctcggtcgttccgttccccattcttctcgtacgcggccgattgtgaccctcgccctcgcctccccacaccacctaaaatgccctgcctccgcgcccgctcgtcatccccgcgccgcctcgtggacgccccggtcggcgatgtggcgggagcatgcggcccgctcctcaggctcctctcggcgtgcggcggggtctggcccacctcgccggtccccggcgccgcggcctcctcctccaccttctctagggacgactcagaaggcagtgacggcctcctccggggatgactcggaatcgaggccggcccgtgctcgtgaatcctccgtcgggcgcggcgccatcggcgttcctctgctgtgtgatccctaaaaccccgcggtgctctagcgaccccgcgatatgggacgacgacgacgacgggaggcgtttcggccgtgcttcgtggatttatatccttgatttttgtttttgatctcaaggattagctgggaatacgatcgtcgcagttgctgcactcgggctcttcctcgccaagaggaacataaacacacctcaggatggccagttgagcgatggcttatgccttccttgtggttagtccacctgacatgagtcaatgctttgaggagatggctgctgctaaatctaataaaacttcatccaaacctggattgaattatcctggcctggaagaacagacccttcagtttatcttggactgctgtgaatctaatatagaaaatatacaaagtacttagagggtggcgctggctctccagaagtttcaatgaatgcaaagcaagcga

SEQ ID NO: 37065 - DNA, 2534 bp, Zea Mays
ctccccatccgcgcttgactacgtccgccctagcgctcctccatcccatcgtctccccggaaaccttgtcgtcaccctctcccgcgaactccgtgtcgatagttccgctcttcggctcgggcgctcggtcgttccgttccccattcttctcgtacgcggccgattgtgaccctcgccctcgcctccccacaccacctaaaatgccctgcctccgcgcccgctcgtcatccccgcgccgcctcgtggacgccccggtcggcgatgtggcgggagcatgcggcccgctcctcaggctcctctcggcgtgcggcggggtctggcccacctcgccggtccccggcgccgcggcctcctcctccaccttctctagggacgactcagaaggcagtgacggcctcctccggggatgactcggaatcgaggccggcccgtgctcgtgaatcctccgtcgggcgcggcgccatcggcgttcctctgctgtgtgatccctaaaaccccgcggtgctctagcgaccccgcgatatgggacgacgacgacgacgggaggcgtttcggccgtgcttcgtggatttatatccttgatttttgtttttgatctcaaggattagctgggaatacgatcgtcgcagttgctgcactcgggctcttcctcgccaagaggaacataaacacacctcaggcgtccaagtagtgatgttctgcctcccgacgctcccctcccgggatctcggtcgcgctttcgtcgccgccatcatcggctccgctccctcccgggatctcggtcgcgctttcattgccgccacgcccatgcccctccattatctgtgttgtgcccttccattctccgcacagtacccctccatcgtcgtcccctcgcccccatccgtcgtctccctcgctccgctcggacaatcgtcgccttccccaatgccatcgagacaatcgccgccttccccctcgctgccccccgcgatttgaaccaccactcaaaggcgagggcgaggggcaccaaacaccaacccgagtcccgagcacgagcgcccaaccaaatggcgccgcacaccactgctggaggcgagggcggggccggggccgaggatgaggtgtccgaggcggcgactgcatcccccgcgctgcggcaccgccacgcgggcaagggcgagggcgaggggctgggcggcaatggcgtcgctgggggcgacgaccaggcgtatgtggagcgggtgttcgcggacaaggcggtgccgtcgtggcaggagcagctcacgctgcgggcattcgtcgtcagcgcgctgctggccgtcatgttcagcgtcatagtcatgaagctcaaccttaccacggggatcatcccctccctcaatgtctccgctgggctgctcggcttcttcttcgtccgcatgtggaccgccgccgccgagaggatgggcttcctccgccagcccttcaccaggcaggcctaactgtatatcatcactgacttgagagataatggcttatgagatactactctgaaagtctgaattttagatttctccaagccacatctcattatcatacatcactaaattaacgatagtgactgatttgaaatgggtgtcctgtcaatttaagcatgcacgtcctactatgctatcctactaatagtaggccctcataaatctaagttgtgtgatggtatataggtcactgctccctgcttctagatgaagggcgcctcatctcatctcattattagtgatgactgatgatgaaggaagggtcctttcatttcggttcatgggaccatgcatctgatttgggcaagaaaaaaatgtgtctgtgacaactgaaccatttctctgaagacagctgattcatgccttgcataaacactacacgtcacatgtggtgcaaaaagtcaaatctcctgccatgtgtgcaaggtttaggtggtactgatgcagacatgcctagctatgtactaactcacctctcaagttattgacactatcttaattcagtagcacaggtctgttactgttaactgcataattataatggcgtgtgcagaggtttaatgtggcctctcattgccaagaagaaggggagttggtactgtttgcatctggcttattctggtggtatcctctcatggggtttaatgtggcctctcattgccaagaagaaggggagttggtacccagctaacctggaagactcaagtttacatgggttgcaggcttacagggttttcatttccatcgctttgatccttggagacggtttatacaacttcattaaggatggccagttgagcgatggcttatgccttccttgtggttagtccacctgacatgagtcaatgctttgaggagatggctgctgctaaatctaataaaacttcatccaaacctggattgaattatcctggcctggaagaacagacccttcagtttatcttggactgctgtgaatctaatatagaaaatatacaaagtacttagagggtggcgctggctctccagaagtttcaatgaatgcaaagcaagcga

SEQ ID NO: 37066 - DNA, 736 bp, Zea Mays
ggtcaccgccaacaagccaccgcatgttcttgtagaagaaatctgagagccatcaacattgctatgcgggtgagagaaaggaggaagtcacctcgtgtctacgccatcgacaagcattggagtttggtctggacagcatccgggaaaccaggaattcgtcgccggagtacatcaccgccgcggtgctcctttgtttcgtggacaaggactgctactactcatgggccgattgacaagtcgcagaagcgttgaaaactcaaggtgggcaacttattatccctgtcactctgcttcatgttgctgcatttgctcttgggtactggttatcgagattatctacctttggggaatcaacctctaggaccatctcaattgaatgtgggatgcagagttctgcacttggatttttacttgctcaaaagcagtttacaaatgcactcgttgttgttacttcagctgtcagcgttgtgcgcatgcatggctcttggaaggagtgtccttgcagtttactggagaaacaaatggcttccagcgaatgacaaaaatgatttcaaggagtaaagaaactcaacacatgagctcctagttttccatgttccaatactttaggcgtagataggaaggcctgcactattgttgattatcattaggggttccgctttgcctacatttattgtgtactatagtatttcatacccggtacgttcataaataaatcaatttctgcagttgtcct

SEQ ID NO: 37067 - DNA, 238 bp, Zea Mays
ggtcaccgccaacaagccaccgcatgttcttgtagaagaaatctgagagccatcaacattgctatgcgggtgagagaaaggaggaagtcacctcgtgtctacgccatcgacaagcattggagtttggtctggacagcatccgggaaaccaggaattcgtcgccggagtacatcaccgccgcggtgctcctttgtttcgtggacaaggactgctactactcatgggccgtgaggacacg

SEQ ID NO: 37068 - DNA, 679 bp, Zea Mays
tccaataagtcattcctcgacttcttgtcccactgcttttgtccgcaagcggaagtacggaactattgagaaggatcaagaaagcaaggaagcacctctcttctacagcactgccaccttctccagctaaccacttccccaacccccaatccatatctagcattctactgtagtggcaacgatgatggccgtgtctctgcagctgcgcccaatccctcgtctccctccgtcgagaaatcgctgcgcaggcacaagtccgcggatggccgccttgagctgcagatacaaccagagatgccctgtcgttcatgtcatccggcgtgctggccgcattcgtgctcgtggtggccagtccggcagaagctagaccttcgagattggagaacaaaaggaaagccctggagaagcttgagaagctccgggagaaggcgttaggcccgaaggagaagagcggagccaccggtaacggtaaggagatgccccctccggcgaacttgctaatccctcctgccgccgtggaggctttcttgtgaaaggcagtctgccgatggacccttcccttgtgttaaatggcgaggctagtctgagtttgtacgttgttggagtcttgtatgactatgccaactggaaaatgaaatgaaagtgagcttgcatgcttagctgaaagtttatagatatg

SEQ ID NO: 37069 - DNA, 2010 bp, Zea Mays
cgcactttaaccccctggatcccccgccggccatcgcccagcggccaacgaactctccccttccacccgccagtcgccacctcgcctcgccatggcagaccggccaccgccggggccacgcgcagcagccctgctgcccaacccggtcacccggcgcggccacgcggcgtcgtcgacggatcgccagcactcgctgctcgggcgcgccgtccagacgctccacgcccacggctccacccagctcctgcgcttcctcgcgcttgccgtcacgctgaccgcgctcctcgtcctggccagcgtgacgctcacggccgcgctcgccgcgctggtcctgctcagcccgctcgtgctcctcaccgtcccgctctgggcgcccgtagcggtactggcgctgctgacgggggccgcctcgctcgtcgcctgctgcgccggcctggccgcggtcgccgcgggcacgtgggcgcaccggtacttcacggggcgctactccgtcggcgcgcaccgggtgcagtccgccgatcagtacgcccgcgggggcacggtcgcggacgtggccagccgagtgagggggtactacgacgcctacgcgcgagagtacggcgggtacccgccgcgcccgcactctcgggtcaaggacgccgcgcccggggcgtagcgtagcttgtgtgtgctgagcggtctctccctctctctctccctctctttgctccctcgtgctcacgtgctgtacatatgtttcgtcgttctagcagtcgtgtttcgctagaagcggtatatggccactgatacgcagagtaaaaacttcacaaactcgacgccagaagccactggctgtaaaaacttcacaaactcatcatcactcgacaactgtactatactccgcactgtaaaacttcacgacgaacccaacatcactcctcgaactcgacaacaatacggaggagtcgaagacgtacgttgacatcactcaacaacaatacggagctgaagacatacacagtgaaacttaaactaaacaccataattcggtggccaacactgttgtatacattttgaatgcacttcaacacccgggttaatcaaaccattagggccagtttgatagcagggattgaggagactaaaatctccttcctatttacttctctcaaactagtccttaacttcggtagaacaaaaaactgatgaagatggacgctcctcgtgtcccaatgggtgatctgcgcgacgaccctggtggccctcggtcgtgctccaactctaaccctctcaagtcagctcccccttggttcgaagggtgtgtgcttgcctccagcgaacaactctgacctcatcgagcatactagggtcacctccaaactaaagagaaagcgtcgggtgaattctgagcttccccaacgcgtcaatgaaggtccggtagcatcttctccacccttccttctatccttactatcttctccacccttccttcgatccttactagggcagcccaaatattgagtgggggtctaaacaaaggattactaacgaataagcctttgtaactacaataaataaggtaaaaagtctactaaaccaaggaaattgagtgggggcctatgtctccacttagtccaacgtcggtcgccctcttgaaccttaggtttgaaacgcccggtaccttgatgcaacgtagtttttttgaaagtttccaatatgtcgttcacccacactctattgtcgctaggctgacatcatccgtctggttctcactagctcacctctcccctcactactctcccaagtttgtatgtgacatgttgaatttcctgttgtccatgccctcggattgtcttagtgtgtcttgcatcgctaagtttgtgtttagactaagggttgttaactagaacgtcgcaaacaatttggtcatcattggtcccccgcgtctttgaagatcgggcctcacccctcaccctcatttggaagacaccatggctgttgcccgaaggttgaaggaactcccagaatgcg

SEQ ID NO: 37070 - DNA, 544 bp, Zea Mays
atgcacggcatggaacggaacacggggacgttgacgcgaagggactccaaggtccaaaccctacacctacacctaaaaagctacacgggcccgcgctggttttctccatccatcatcaaatttacacagcacaaccactttgcccccctggccctaacaaccaaactctctcggctccttcccctaccggccggagtcgcatgcggtgggactaggctaaaacgccgcggacgggcggcgcgggtggaaggggctcgcggcgggcggcgggcgtggggtgcgcgcggccgttgcggcggtgatgcgctcgcagcgcgggcacatggtgagcgcggacgccggttctcctcggtcagcgagccgaagcagcgcttcaggggcacacactggttcggattttggagactactacagacacagcagcaaatcctcgtcacgtgccagtctttggaggtggtggtcatggagttcttcgcgagtcacggtcacgggtgacggttccatgcaagaattaaagcggcttagtgctcttgttttatgttaa

SEQ ID NO: 37071 - DNA, 734 bp, Zea Mays
atgcacggcatggaacggaacacggggacgttgacgcgaagggactccaaggtccaaaccctacacctacacctaaaaagctacacgggcccgcgctggttttctccatccatcatcaaatttacacagcacaaccactttgcccccctggccctaacaaccaaactctctcggctccttcccctaccggccggagtcgcatgcggtgggactaggctaaaacgccgcggacgggcggcgcgggtggaaggggctcgcggcgggcggcgggcgtggggtgcgcgcggccgttgcggcggtgatgcgctcgcagcgcgggcacatggtgagcgcggacgccggttctcctcggtcagcgagccgaagcagcgcttcaggtactcgcactccagctccgtctgcttaagcttcgtcctagccctgcggttctggaaccagacctccacctgcctgggccgcagcttgagcttgacagccaaggcctccttttgcttcggtgtgagggtgtggttgaggcggaagctctcctccaggaggcgggactgctccttggacagccggagcttcttggcgcggtgcggcccgccggcgccgccgcgctcgtcctcctcctcctccacgctccccattgggaactcctcctcctcgccgccgctcgccggctggttcatgtccaggtccctcatgttgttcccgttcccgctcccgttgttgttgttgcatccaaacccctc

SEQ ID NO: 37072 - DNA, 1240 bp, Zea Mays
ctttttcactgtttatagttaagtttgctggcggtaagcgagagccgaagccgagagatctgtcatctttgtcgaggcctagcaaagctctagctggtggcagagcctaaatgcagggaagggggcctccgaagctgtgccagtgcggcgtgtacgagccgcggcggtgcaggaataactgaaaaggtgcttttacgggcgcccggatggtggcggtggcggtggcggtcgagtgtttccccggccggaccacaccgcggctccaatcgcgaactgttggagccggaaagtccaagggagctcgcacggcgccaattattgatgattcatctcatctcatcaccaccacctctttctttggagtctgtggcacatctccatgccggcggtcgtggccaagtccatcgccatcctctcggacgccgggctggggatggccatgtttagcctgggattgtttatggcgctgcagccgaagctcatcgcgtgcggatggcgcgccacaggcgtctccatggccgtccgcttcctcgccggccctgccgtcatggccgccgcgtccctggccatcggcctccgagggacccttttgcggatcgccattgtgcaggcggctctaccgcaagggatcgtgcccttcgtgttcgcgaaagaatacaacgtccacccggccatcctgagcactatggtaatttttggcatgatgatagcgctgccgattaccttgatctactacatccttcttggactgaagccagtgtagtgtagctgcttcgttcgtcctgctgcacacacatgatgaggcatgcatgagcgaggtcctagtagaccaccatggacgacgctgagctggttgcactcgagcgtggcccacatgcatggctggagccttgtaattttgagtcagctccagtgttccctttgtgggggtgattagacatgcatgcggtttttgttgcttattactaatccatcttgtcgtttgaggattgcatgtagtgtcgtccatgcccatataaaccctagtttaagctttgagggccctctatcctagagatctcgatttgctcgtagcgagaaatgaaccatacatgcgtgacgatatttgctcgctgcattgggatttgggaaacggatatactgcgaagacgagaagtttactgtgcgcatcatcggtttgtgcgaagctgagttcaaaggaaaatacagtcaatatatactccctcctatttgcattcac

SEQ ID NO: 37073 - DNA, 3585 bp, Zea Mays
aaagaaatcaatgttgattttcatgcccccctggaaataaatgaatcttgattcaaatcccacgagtttgcatccgcgtcaaatgggctgcgcgtctccgtcgtttcttccgagcacacggcagcccaccggatcggtcgatctagagatggtgtttgtttgtcgcagtcgcaaccgaatcacactgctcccatataaatagaatggcgccggcgaccggcgttgcccacttcacattcacaagaccggaggagcccactcctgcatgtaactcagatactccacccgagagtccgcaccaactcacatcacacctcaccttccactccagaagaagaagccagaccggaatcccgagagccctgcccctgctccctcggttcctcctccgttgggcgtttggccgccgggggtggtgggccgagaccgagatgatatcgtggaacgatgtatacacggtgctgaccgcgatggtgcccctgtacgtggccatgttcctggcgtacgggtcggtgcggtggtggcgcatcttcacggcggaccagtgctccggcatcaaccgcttcgtggccatcttcgccgtgccgctgctgtccttccacttcatctccaccaacgacccgtacgccatgaacctccggttcctggccgcggacacgctgcagaagctggtcgtcctcgcggggctggccgcgtgctcgcgcctgccctccaggctggcggcgccgcggctggactggtccatcacgctcttctccgtgtcgacgctgcccaacacgctggtgatgggcatcccgctgctgatcgccatgtacggtccctacgccgggtccctgatggtgcaggtggtggtgctccagtgcatcatctggtacacgctgctgctgttcctcttcgagttccgcgccgcgcggacgctcatcgcggaccagttcccggacaccgcggcggccatcgcgtcgctgcacgtggacccggacgtggtgtcgctggagggcgggcgcgccgagacggaggccgaggtggcggaggacggccggctgcacgtgacggtgcgccggtcgtcggcgtcgcggcggtcgctgctgatggcgacgccgcggccgtccaacctgacgggcgcggagatatactcgatgagctcgtcgcggcagcacagcccgcggggctccaacttcaaccacgccgacttcttcgccatggtcgacggcgcgccgcccccgccggcgcccggcgcgcgcgcctcgagcttcggcgccgccgagctgtactcgatgcactcatcgcgggggccgacgccgcggcagtccaacttcgacgagcgctcggcctcggcccggtcgtcgaggcccgcggccgtgcccagccacgacgccaaggagctccacatgttcgtgtggagctcgggcgcctcccccgtctcggacgtcagcggcctgccggccttcaccggtggtggcgcgggtggcgtcaacgtcggcgccaaggaaattcgcatggttgtccccgccgagatgccgcagaacggctcggccggcaaagagaacgagaacaacggtgcagcagcagcagcgacgggggaagccgagggtttcggcttcagatcaggcggcaagacgacggcggaggacgccgaggcgggagaagcagcagggcccgagcagctaacgaagctggggtccaggtactcgacggccgagctgcgcgcgaaggacgacggcggtggcgcgggctcggcggcgcagcagatgccgccggcgagcgtgatgacccgcctgatactaatcatggtgtggcgcaagctgatccgcaacccgaacacgtactccagcctcatcggcctcgcctggtccctcgtcgcgttccggtggcacatctccatgccggcggtcgtggccaagtccatcgccatcctctcggacgccgggctggggatggccatgtttagcctgggattgtttatggcgctgcagccgaagctcatcgcgtgcggatggcgcgccacaggcgtctccatggccgtccgcttcctcgccggccctgccgtcatggccgccgcgtccctggccatcggcctccgagggacccttttgcggatcgccattgtgcaggtaaatccatatacggtctggttaatttggatgcatatgtactaatctctctgtccacgtatatgaatttgagaggttattattagagcggttagatatagaatttaaatttaaaatttacactaaaccactctaacctatatggattgaggtaaataagttctacttgtctgctttagagaattactagtagccttcaaaagtgagttctcgtcttgcccaattcaataatcactggtccaggtagacaataactgatcaggtggagctcctggctttatatcaatcctagtggcaaccacaatatgtttggagatacatggtctagtatcagtgacattagatgaaccaaacagcaccttagtgcatatgaactgcttttgtgaaatgcattgtggttgctctaagttagtgtccctatttcttacccaaggctcctacattatagcattagcatacatcctttctaggctcaatttttagcagtaggccactactagccccaaatcaggatcttactttcatgactccattgtcagtcacatctcagctccttttcttctctctccaatcttgcaccactgtccatagccaccgacttttgttgtcacctgccatgcatggccctcttactgccgctggctgtcatcattgctccctcgctccacagttgttagtcagagaggttaggcttccagtagagggacaattaacctataggaggtgaggtttaggctggaagggagagtctccttgcctctttgctggaggaccgccaagagggcacgtacgcatgtgaagagcgcggagctcatgcagaggctgttgtgaggatgcaacaacggcggctctaccgcaagggatcgtgcccttcgtgttcgcgaaagaatacaacgtccacccggccatcctgagcactatggtaatttttggcatgatgatagcgctgccgattaccttgatctactacatccttcttggactgaagccagtgtagtgtagctgcttcgttcgtcctgctgcacacacatgatgaggcatgcatgagcgaggtcctagtagaccaccatggacgacgctgagctggttgcactcgagcgtggcccacatgcatggctggagccttgtaattttgagtcagctccagtgttccctttgtgggggtgattagacatgcatgcggtttttgttgcttattactaatccatcttgtcgtttgaggattgcatgtagtgtcgtccatgcccatataaaccctagtttaagctttgagggccctctatcctagagatctcgatttgctcgtagcgagaaatgaaccatacatgcgtgacgatatttgctcgctgcattgggatttgggaaacggatatactgcgaagacgagaagtttactgtgcgcatcatcggtttgtgcgaagctgagttcaaaggaaaatacagtcaatatatactccctcctatttgcattcac

SEQ ID NO: 37074 - DNA, 2019 bp, Zea Mays
caaccgagtccaccgccgtccgccgcagcctctaggccagggccagctaatttctcgcaggccgcgaacatgacactcacagccagttctagagcctgcaagattctcgtcctatcgccatctgttgcgtgctcgcacctcgccgcgcccccaagggctcacgctcgtgacgcgtcccacgcccccaccgcctcacgagcacgcccccccgtcgactcgcccgctccatcgcccccacgcacccgctgccggccaaaagccaattcgaatctccccgctgcgcggcggggcctctgcttccgcaatgcgggcctccgtcgaggaggcgggcgcgctcctggcgcggagcgactcagccggccgccgccgccgctccccgccgccggtgcagaccgcgtccccgaggcccggtagcctcaggcgccagtcgtcgtcgttccgcgaggacgtcgggcacgccgcctccgagacttacctcgtctcgcgcctcaccttcaccctcctccagtacctcgggttaggttaccgatggatgtcacaacttctttcactcacaatctatgcaattgtacttatgccaggatttatacaagttggatattactatttcttttcgagccaagtgcgtagaagtgtagtctatggagaccaacccagaaacaggttggatctatacataccagaagataatagtaggccctgtccagtggtggcctttgtgactggtggagcatggattattggttacaaggcatggggtgctcttctaggacgacgattggcagagcgaggaataatagttgcttgcattgattacagaaatttcccacaaggtacaataggggacatggttcatgatgcttctcaggggatttcttttgtgtgcaacaacatcgccagccatggaggagatcctaatcagatctacttgataggtcagtcagcaggtgcacatattgcagcgtgtgccctcatggagcaagcagtaaaagaatctggtgggaatcctgtttcttggagtcttacccaaatcaaagcatacttcggtttatctggaggatacaatatgcataatttggttgaccatttccacgagcgtggtcttaatcgctcaatattcctcagcataatggaaggagaggaatcattgtcacgttattctcctgaaattgttgcaaagacgtcaagtgctgaaaccatagctcttctgcctcttgttgttcttatgcatggaactgaagattattcaataccatcatcttccagtcaaacttttgttgacgtcctccaacaagctggtgctcaagcaaggttactattgtacgaagggaaaacacatacagatatctttgtacaggaccctctaaggggtggaagagatccattggttgaagacgtgttgtctattattcatgctgatgatgcaaatgcatgtcaaaagattgctttagcaccaactcctaggagattagttttcgagtggcaattaaagttggcacgcaaaattagtccattctagcagtatgaaccatggagaagcttggagctatggattttgcaccttcatgaggaaagggtgctcgtctgctcggggagccgttgagctggattggatcaggttactttgagacagggacttcaattctgctacaacctactcgacgtgatcttcattccactgcaaccagtcttcaagtagagtcaaggacatgtactgccaagatgaggagcatgaaggatgccgcgatgagttcgtgagaggtctaggccgtcatctcccagtcaactatggttgtggaggatcgttgtcttcagatcatataattatatagctaatttgtacagaactcatattatataataaagatgtgacattcgtttatgtaacatgagtcatcgtatgtgtgagacttgatcctagcacaaatttgattcgcgcttaaatttgtccttaatttcgggtgtgacaaatatactttattatttactcttttaatatattaaatttgaaattataat

SEQ ID NO: 37075 - DNA, 2123 bp, Zea Mays
caaccgagtccaccgccgtccgccgcagcctctaggccagggccagctaatttctcgcaggccgcgaacatgacactcacagccagttctagagcctgcaagattctcgtcctatcgccatctgttgcgtgctcgcacctcgccgcgcccccaagggctcacgctcgtgacgcgtcccacgcccccaccgcctcacgagcacgcccccccgtcgactcgcccgctccatcgcccccacgcacccgctgccggccaaaagccaattcgaatctccccgctgcgcggcggggcctctgcttccgcaatgcgggcctccgtcgaggaggcgggcgcgctcctggcgcggagcgactcagccggccgccgccgccgctccccgccgccggtgcagaccgcgtccccgaggcccggtagcctcaggcgccagtcgtcgtcgttccgcgaggacgtcgggcacgccgcctccgagacttacctcgtctcgcgcctcaccttcaccctcctccagtacctcgggttaggttaccgatggatgtcacaacttctttcactcacaatctatgcaattgtacttatgccaggatttatacaagttggatattactatttcttttcgagccaagtgcgtagaagtgtagtctatggagaccaacccagaaacaggttggatctatacataccagaagataatagtaggccctgtccagtggtggcctttgtgactggtggagcatggattattggttacaaggcatggggtgctcttctaggacgacgattggcagagcgaggaataatagttgcttgcattgattacagaaatttcccacaaggtacaataggggacatggttcatgatgcttctcaggggatttcttttgtgtgcaacaacatcgccagccatggaggagatcctaatcagatctacttgataggtcagtcagcaggtgcacatattgcagcgtgtgccctcatggagcaagcagtaaaagaatctggtgggaatcctgtttcttggagtcttacccaaatcaaagcatacttcggtttatctggaggatacaatatgcataatttggttgaccatttccacgagcgtggtcttaatcgctcaatattcctcagcataatggaaggagaggaatcattgtcacgttattctcctgaaattgttgcaaagacgtcaagtgctgaaaccatagctcttctgcctcttgttgttcttatgcatggaactgaagattattcaataccatcatcttccaggttgatgtttttcttttggatggataatctattgattgacccatcatgtaacaaatacagccttctcaattcatgttaccagctactctatcttctatgcgcagtcaaacttttgttgacgtcctccaacaagctggtgctcaagcaaggttactattgtacgaagggaaaacacatacagatatctttgtacaggaccctctaaggggtggaagagatccattggttgaagacgtgttgtctattattcatgctgatgatgcaaatgcatgtcaaaagattgctttagcaccaactcctaggagattagttttcgagtggcaattaaagttggcacgcaaaattagtccattctagcagtatgaaccatggagaagcttggagctatggattttgcaccttcatgaggaaagggtgctcgtctgctcggggagccgttgagctggattggatcaggttactttgagacagggacttcaattctgctacaacctactcgacgtgatcttcattccactgcaaccagtcttcaagtagagtcaaggacatgtactgccaagatgaggagcatgaaggatgccgcgatgagttcgtgagaggtctaggccgtcatctcccagtcaactatggttgtggaggatcgttgtcttcagatcatataattatatagctaatttgtacagaactcatattatataataaagatgtgacattcgtttatgtaacatgagtcatcgtatgtgtgagacttgatcctagcacaaatttgattcgcgcttaaatttgtccttaatttcgggtgtgacaaatatactttattatttactcttttaatatattaaatttgaaattataat

SEQ ID NO: 37076 - DNA, 1937 bp, Zea Mays
caaccgagtccaccgccgtccgccgcagcctctaggccagggccagctaatttctcgcaggccgcgaacatgacactcacagccagttctagagcctgcaagattctcgtcctatcgccatctgttgcgtgctcgcacctcgccgcgcccccaagggctcacgctcgtgacgcgtcccacgcccccaccgcctcacgagcacgcccccccgtcgactcgcccgctccatcgcccccacgcacccgctgccggccaaaagccaattcgaatctccccgctgcgcggcggggcctctgcttccgcaatgcgggcctccgtcgaggaggcgggcgcgctcctggcgcggagcgactcagccggccgccgccgccgctccccgccgccggtgcagaccgcgtccccgaggcccggtagcctcaggcgccagtcgtcgtcgttccgcgaggacgtcgggcacgccgcctccgagacttacctcgtctcgcgcctcaccttcaccctcctccagtacctcgggttaggttaccgatggatgtcacaacttctttcactcacaatctatgcaattgtacttatgccaggatttatacaagttggatattactatttcttttcgagccaagtgcgtagaagtgtagtctatggagaccaacccagaaacaggttggatctatacataccagaagataatagtaggccctgtccagtggtggcctttgtgactggtggagcatggattattggttacaaggcatggggtgctcttctaggacgacgattggcagagcgaggaataatagttgcttgcattgattacagaaatttcccacaaggtacaataggggacatggttcatgatgcttctcaggggatttcttttgtgtgcaacaacatcgccagccatggaggagatcctaatcagatctacttgataggtcagtcagcaggtgcacatattgcagcgtgtgccctcatggagcaagcagtaaaagaatctggtgggaatcctgtttcttggagtcttacccaaatcaaagcatacttcggtttatctggaggatacaatatgcataatttggttgaccatttccacgagcgtggtcttaatcgctcaatattcctcagcataatggaaggagaggaatcattgtcacgttattctcctgaaattgttgcaaagacgtcaagtgctgaaaccatagctcttctgcctcttgttgttcttatgcatggaactgaagattattcaataccatcatcttccagtcaaacttttgttgacgtcctccaacaagctggtgctcaagcaaggttactattgtacgaagggaaaacacatacagatatctttgtacaggaccctctaaggggtggaagagatccattggttgaagacgtgttgtctattattcatgctgatgatgcaaatgcatgtcaaaagattgctttagcaccaactcctaggagattagttttcgagtggcaattaaagttggcacgcaaaattagtccattctagcagtatgaaccatggagaagcttggagctatggattttgcaccttcatgaggaaagggtgctcgtctgctcggggagccgttgagctggattggatcaggtcaaggacatgtactgccaagatgaggagcatgaaggatgccgcgatgagttcgtgagaggtctaggccgtcatctcccagtcaactatggttgtggaggatcgttgtcttcagatcatataattatatagctaatttgtacagaactcatattatataataaagatgtgacattcgtttatgtaacatgagtcatcgtatgtgtgagacttgatcctagcacaaatttgattcgcgcttaaatttgtccttaatttcgggtgtgacaaatatactttattatttactcttttaatatattaaatttgaaattataat

SEQ ID NO: 37077 - DNA, 1952 bp, Zea Mays
caaccgagtccaccgccgtccgccgcagcctctaggccagggccagctaatttctcgcaggccgcgaacatgacactcacagccagttctagagcctgcaagattctcgtcctatcgccatctgttgcgtgctcgcacctcgccgcgcccccaagggctcacgctcgtgacgcgtcccacgcccccaccgcctcacgagcacgcccccccgtcgactcgcccgctccatcgcccccacgcacccgctgccggccaaaagccaattcgaatctccccgctgcgcggcggggcctctgcttccgcaatgcgggcctccgtcgaggaggcgggcgcgctcctggcgcggagcgactcagccggccgccgccgccgctccccgccgccggtgcagaccgcgtccccgaggcccggtagcctcaggcgccagtcgtcgtcgttccgcgaggacgtcgggcacgccgcctccgagacttacctcgtctcgcgcctcaccttcaccctcctccagtacctcgggttaggttaccgatggatgtcacaacttctttcactcacaatctatgcaattgtacttatgccaggatttatacaagttggatattactatttcttttcgagccaagtgcgtagaagtgtagtctatggagaccaacccagaaacaggttggatctatacataccagaagataatagtaggccctgtccagtggtggcctttgtgactggtggagcatggattattggttacaaggcatggggtgctcttctaggacgacgattggcagagcgaggaataatagttgcttgcattgattacagaaatttcccacaaggtacaataggggacatggttcatgatgcttctcaggggatttcttttgtgtgcaacaacatcgccagccatggaggagatcctaatcaaatttatgtctgtaggatctacttgataggtcagtcagcaggtgcacatattgcagcgtgtgccctcatggagcaagcagtaaaagaatctggtgggaatcctgtttcttggagtcttacccaaatcaaagcatacttcggtttatctggaggatacaatatgcataatttggttgaccatttccacgagcgtggtcttaatcgctcaatattcctcagcataatggaaggagaggaatcattgtcacgttattctcctgaaattgttgcaaagacgtcaagtgctgaaaccatagctcttctgcctcttgttgttcttatgcatggaactgaagattattcaataccatcatcttccagtcaaacttttgttgacgtcctccaacaagctggtgctcaagcaaggttactattgtacgaagggaaaacacatacagatatctttgtacaggaccctctaaggggtggaagagatccattggttgaagacgtgttgtctattattcatgctgatgatgcaaatgcatgtcaaaagattgctttagcaccaactcctaggagattagttttcgagtggcaattaaagttggcacgcaaaattagtccattctagcagtatgaaccatggagaagcttggagctatggattttgcaccttcatgaggaaagggtgctcgtctgctcggggagccgttgagctggattggatcaggtcaaggacatgtactgccaagatgaggagcatgaaggatgccgcgatgagttcgtgagaggtctaggccgtcatctcccagtcaactatggttgtggaggatcgttgtcttcagatcatataattatatagctaatttgtacagaactcatattatataataaagatgtgacattcgtttatgtaacatgagtcatcgtatgtgtgagacttgatcctagcacaaatttgattcgcgcttaaatttgtccttaatttcgggtgtgacaaatatactttattatttactcttttaatatattaaatttgaaattataat

SEQ ID NO: 37078 - DNA, 2041 bp, Zea Mays
caaccgagtccaccgccgtccgccgcagcctctaggccagggccagctaatttctcgcaggccgcgaacatgacactcacagccagttctagagcctgcaagattctcgtcctatcgccatctgttgcgtgctcgcacctcgccgcgcccccaagggctcacgctcgtgacgcgtcccacgcccccaccgcctcacgagcacgcccccccgtcgactcgcccgctccatcgcccccacgcacccgctgccggccaaaagccaattcgaatctccccgctgcgcggcggggcctctgcttccgcaatgcgggcctccgtcgaggaggcgggcgcgctcctggcgcggagcgactcagccggccgccgccgccgctccccgccgccggtgcagaccgcgtccccgaggcccggtagcctcaggcgccagtcgtcgtcgttccgcgaggacgtcgggcacgccgcctccgagacttacctcgtctcgcgcctcaccttcaccctcctccagtacctcgggttaggttaccgatggatgtcacaacttctttcactcacaatctatgcaattgtacttatgccaggatttatacaagttggatattactatttcttttcgagccaagtgcgtagaagtgtagtctatggagaccaacccagaaacaggttggatctatacataccagaagataatagtaggccctgtccagtggtggcctttgtgactggtggagcatggattattggttacaaggcatggggtgctcttctaggacgacgattggcagagcgaggaataatagttgcttgcattgattacagaaatttcccacaaggtacaataggggacatggttcatgatgcttctcaggggatttcttttgtgtgcaacaacatcgccagccatggaggagatcctaatcagatctacttgataggtcagtcagcaggtgcacatattgcagcgtgtgccctcatggagcaagcagtaaaagaatctggtgggaatcctgtttcttggagtcttacccaaatcaaagcatacttcggtttatctggaggatacaatatgcataatttggttgaccatttccacgagcgtggtcttaatcgctcaatattcctcagcataatggaaggagaggaatcattgtcacgttattctcctgaaattgttgcaaagacgtcaagtgctgaaaccatagctcttctgcctcttgttgttcttatgcatggaactgaagattattcaataccatcatcttccaggttgatgtttttcttttggatggataatctattgattgacccatcatgtaacaaatacagccttctcaattcatgttaccagctactctatcttctatgcgcagtcaaacttttgttgacgtcctccaacaagctggtgctcaagcaaggttactattgtacgaagggaaaacacatacagatatctttgtacaggaccctctaaggggtggaagagatccattggttgaagacgtgttgtctattattcatgctgatgatgcaaatgcatgtcaaaagattgctttagcaccaactcctaggagattagttttcgagtggcaattaaagttggcacgcaaaattagtccattctagcagtatgaaccatggagaagcttggagctatggattttgcaccttcatgaggaaagggtgctcgtctgctcggggagccgttgagctggattggatcaggtcaaggacatgtactgccaagatgaggagcatgaaggatgccgcgatgagttcgtgagaggtctaggccgtcatctcccagtcaactatggttgtggaggatcgttgtcttcagatcatataattatatagctaatttgtacagaactcatattatataataaagatgtgacattcgtttatgtaacatgagtcatcgtatgtgtgagacttgatcctagcacaaatttgattcgcgcttaaatttgtccttaatttcgggtgtgacaaatatactttattatttactcttttaatatattaaatttgaaattataat

SEQ ID NO: 37079 - DNA, 1651 bp, Zea Mays
caaccgagtccaccgccgtccgccgcagcctctaggccagggccagctaatttctcgcaggccgcgaacatgacactcacagccagttctagagcctgcaagattctcgtcctatcgccatctgttgcgtgctcgcacctcgccgcgcccccaagggctcacgctcgtgacgcgtcccacgcccccaccgcctcacgagcacgcccccccgtcgactcgcccgctccatcgcccccacgcacccgctgccggccaaaagccaattcgaatctccccgctgcgcggcggggcctctgcttccgcaatgcgggcctccgtcgaggaggcgggcgcgctcctggcgcggagcgactcagccggccgccgccgccgctccccgccgccggtgcagaccgcgtccccgaggcccggtagcctcaggcgccagtcgtcgtcgttccgcgaggacgtcgggcacgccgcctccgagacttacctcgtctcgcgcctcaccttcaccctcctccagtacctcgggttaggttaccgatggatgtcacaacttctttcactcacaatctatgcaattgtacttatgccaggatttatacaagttggatattactatttcttttcgagccaagtgcgtagaagtgtagtctatggagaccaacccagaaacaggttggatctatacataccagaagataatagtaggccctgtccagtggtggcctttgtgactggtggagcatggattattggttacaaggcatggggtgctcttctaggacgacgattggcagagcgaggaataatagttgcttgcattgattacagaaatttcccacaaggtacaataggggacatggttcatgatgcttctcaggggatttcttttgtgtgcaacaacatcgccagccatggaggagatcctaatcagatctacttgataggtcagtcagcaggtgcacatattgcagcgtgtgccctcatggagcaagcagtaaaagaatctggtgggaatcctgtttcttggagtcttacccaaatcaaagcatacttcggtttatctggaggatacaatatgcataatttggttgaccatttccacgagcgtggtcttaatcgctcaatattcctcagcataatggaaggagaggaatcattgtcacgttattctcctgaaattgttgcaaagacgtcaagtgctgaaaccatagctcttctgcctcttgttgttcttatgcatggaactgaagattattcaataccatcatcttccaggttgatgtttttcttttggatggataatctattgattgacccatcatgtaacaaatacagccttctcaattcatgttaccagctactctatcttctatgcgcagtcaaacttttgttgacgtcctccaacaagctggtgctcaagcaaggttactattgtacgaagggaaaacacatacagatatctttgtacaggaccctctaaggggtggaagagatccattggttgaagacgtgttgtctattattcatgctgatgatgcaaatgcatgtcaaaagattgctttagcaccaactcctaggagattagttttcgagtggcaattaaagttggcacgcaaaattagtccattctagcaggttttaggtatgaattattttaaag

SEQ ID NO: 37080 - DNA, 2005 bp, Zea Mays
atttctttatctagttagatatagctttattactctaataacatgattaataaatcctgaccatccattcacttatgagattctgaatacgaattgtgaacagtgaaaagagggcttcagccttcagatgaagatatttttccatatgaagactggctgtctgaactggctaaaataaaacacgcttgaattggtctagataagatattaactccacaatccaactgttctttacaaacccttcaactaagcctcaattttgtttagtactatcctttacctaactgagaatggtccggtactcccaatagatagacacaccaatcgacaaaccaactggacttaaaagatgaatttcttaaaacatatagaaaatttatatcaaacaacagctgtcgcaaaaaaaaattgcaagactattacccaagcactaacagaaaaatgtaatgaccgctggtccaactgtagagacaatatgcttcgtgctggtccagaagaattagtgcctacaaaatccattctcagaaagaactaaagaaaaatgtgagatgataattcataaggtgaaggagtgtgctccttatcacctgaatcaggaggccttgcattctcatcagctgaagtagatgcaccacctgaagatgctgagggctgaatagatgtggttgaggacattcctccaacagaaaaatcagaatcctgcatccaaagtcagcagataaaccatcatagaaccatgttatgcttatgaaagagtgtcacttaaactctaaatactgatcgaggttgtcatcgttcagaaaattatcaggcaatatagcaggttaatcattgctaaacagacatcttagcatttaaacaacatttaaacgcgctaaacagatgtttaggcatattaggcgtgcaatgacatcaaacacaagtatatcaccaaaacgatgtaggcaaatatattaaattattcatgacaactgttcagtaatctcattgatagagttttgttgagggtgggagggttgataaataaatactcctaaataaatgagcagaagtcaccaaatcaaattgttactgactcaggttgtcgatagaccaatgaggcacaatatagagctcgagacagagccgcatcagtactctgctttgttgctgaaatctttcctaaatgaactgctgactgaattacaaagatgacattcagtcatacttcatcagataagtacaagatgaacagatcatttcaacagtccatagcaaaattgtacagtcccagagtaacatgctgacctaaccgaatatctggacaagttacaaggaacaggtaccaaactaaaatagaacctaaaaaaacattccacggatgtctgcagcagtgtcacctgctacagttgagaagagatcaaatacgtcccagaacaaacttggccagactccagagagaatgactctgaaagatacccacataacgaggcaagaatatggtgagtttcttaaagaaagaaacgaacgggagctctatttcttccgtccttcatatcaagtgaaagacgaatgggctccccaggccacaagcttggaaccggccaaggaggacagggcatcgccacaggccacaacagaacgagagcatgatgaggcctccgcgaccaattttctctgaaactaagcctgcctcggccttgcaggtttgtagcactcgatctttactctctcgctgaagatccgctcacgcatcaccatcccatctttgttgcagaaaaaatatggccaaggaaactcaggcttatgcggcggcagtgggagcagcggcggcacttgtgcgcaatgcggggagccaaatcggatttggggatttgcacccaccaaaaacaaacaggcatacagaagcgcagaagagagataagcagcaaacctgacctgcgtaaaataattttcggcctgcactgtaggacagagagcgccaatcgcaccttccgatgcaggccaagcaaggaaagagagggag

SEQ ID NO: 37081 - DNA, 4576 bp, Zea Mays
atcgggtcatgaagaaaaggggtgtaacggtggatataagggttaattgtccgcccaatttttagccagatagctctatgataagcggcagtgaagggagaatggtacatgagcttcagcaactgcaacaccagcaaaagaggatgagattagaatttaatgaaccatcatattccacaaatattataaaggctattggtacagtcctcacgttctaaatgtggtggatgtaacagagttcagccatccagaagcaaagattgttgcctagattcccttctaattgcgaatgggcatggttatattagacaatttggcatagccattgtatgatttgtctgctcctaccattaaattcttacctatccatccacatatatgcaagtccacatgcactacaaaatttcactctgataattgattattctaatatttgcccaccagcaagcattagctatggggaggagatttgcagcaagtgaaatatcattatgctaggtcaaaggtatgccaacaagggccagccatgtaaaacatatacacctaatgtgtgatgacaaaataacatattagtatatccaagacagcgtaatgatactctttaggttaggtttcttgcgctgtttataaagcaggtgaatcttcattcactaacctgccaatacatgaatgtttgcataagatttcgctgtcgcctgcacaggtagtaataggcattggaagttaggtgacaaatagaagagagggagagggagaaaattaaaggaaaagactagaatcaactcacgagaacagggataggatcaaaagaaagcccgtcaaaatctctgcatttgaacgtagaaactggactgcatttgtgtttgtctcaacccatgtacaaggttgctccaagtatgtcctgcaaattaacatgttcatatgtgataataattttaccaacagatcaaaaggacaaatattattttgattacataaaagggaacatgtatgtgtttttttctggaatacgcaagagagttgcgcatcaataatattaaggagataacagagatccaaaatggaccaagtacaagaaaacctccttacggaggccagaatttagagtacagaaacacacgcacatcgaagaactctacaagtctacagacaactcagcactagctaggccaaaaactctaccacatagctagaaccggagctcatcgatctgaaggaaagacaaagctttgatctatgttagagaccaaaggacaacttcctccctagctgcctgaaaggccgcaaccagactccggctgcagccattgaacacacacttgttcctatgcttccagataatccaagctcctaaaataaccaaagagttgaagtctttccttgccacctcaatcactctggaactacaactcatccaccatgtctcaaaggaatggtcatcctgttggggacagagtccttgccagcatccaatcttcaagagctcaaaccaaaattgtttggcaaagatgcaccagactagcaaatgattgattgattcagcagcctgatcacacaacaagcacctctctgaatggttgagaccttgcttggcaagtctatcggttgtccaacatctgtcatgctcaacaaactaaatgataattttgcactttctagaagcccaagacttccataccctttcagccggtccaaattccacagttccttgaaagagagccctataagctgaacctgtagaaaaggaacatgaagcagcaaccttctagatatgttggtcttgtaccccggctgcagcaccctgccttctaaaacttcacaaaggtcaagaaactcagcagtaactcttactgaaagcgcgcctctcaagcttgccatccactgaaaacttgggagatcatcttggaccgtcaaggaatcaatcagaagtctaggaatcagccccaacaacgcaggtgcaaagtcttggatacagttgtcattcagccaacaatctttccaaaaaagagtgttagagccatccccaagctatgtcacaacttctcccacaagagatcgcacttccgggcacacatgaatggggaaagaagaccatgatctgctaggatcagtttttgtaaccatgaccatcgtgcttgcaaagcccagtaaggctccagaggtcactgatcccaagaccacctagatctttgggcctagtaaccttcggccaagctagagacaatgacctcccttggcctccttccttcctctccaaaggaaccctctttgcaacttgtcaatcgccttaatgggccaagctaggagatctaatgccgatgtcccagtggaggctattctgggggtggcggaggatgcttcgtttcaggtgatgtgtgatgggccctgcttttggcgggcgccgaggagacaggtttttttgctgacccgattgatgagtaagtccaaacgctggttgttgctggtatcgctctgggcctacagccggctggacaggagcgccttctagttgcgccaatgcctggggttgcctctgcagaagcggcgaaatgtggagatcatgctaggcagctggggcaagctcgcccccttgtcacctacttccgtcggagaagaagggtggatcgttcaaagacgcagtctcccagtgtgagaactcctcccctcctccctccaatgcggtaaagttcattgacagaatgatcaaagaggcctgtggtgctctacgggttcctagtgggaattatcggcgggctgctgctcccactcccgctggtggtaaacctcggaaaagcaggaggattgctagagtcggggttgagcggttgccagttccattgccagctaagctgggtaggaagaggattctcatggaacaaggtattgttgggtctgatcggtcagagttcgtctcctctaagactcttgacgagtatgcccgagtgttcagtaagcagctgtcggaggtccagatcaaagccttagccgcgctttttggctggactattcaagtggaaatgcaagggtacctctgatttatttttttgggctggtgctggtagttcactaattgtttccaatggatccttccaagtttttgatctggaatgttcgtggccttaacccagctagaaaagacacagtgtgttctctagtcgatgatgcacgtgttgatgtggtttgcctacaggaaactaagatgatgaatatgtccagattttgtgttatgaggactttggggctagatttttgcatttttttattcgggcttctaatggtgctagtggaaggatcctggtgtcatggaagagtcacgtaggttttcgggataatggtcgagtggatgatcatggaagagtcacgtaggtttcctggtgtctcgatggaattctgtccggagaatggttacccatggtggctgacctgtgtggctgtgtctacgggcctcaaggaaaccaggaaaaaatcagttcttacaatcgttgcgagatattcgggctcactatagtgagccttggcatgttttcggcgatttcaatctcattctaaatgaggaagataagaataatcccaatctagaccgtgtcatgatggggaggtttagaaaatgggctgacgatatggttcttaaggaggttcgcttgttggttgcaaattcacttggtcaaatggtcaggacagccctactctagtgaagctagacagggttttccgctttgcatcttgggaggatcgtttccctgattgttacagagttctgctttccaacaactccgaccactgtccagtgttgttggggctccatgactttagtagagttaagggaagatttcactttaaggacttttggaccaagatggagggtttccaggaggtgtctcgggcctaggaatctgtcccggctggcagatgtcctctcatatcattctaaaaaaaataacaacatcaaaatgtttgcagagctggagtgatatgaaaattggggatgtcaaaattcagcttgaaatggcaaaagatcttttacaccatttggagattgttagactgtgtatgtgtgtgggccggcaccactgttgggctgtcggcccattagggttagggttaattctctctatataggtaaccttctcctatgcaatacgacaagacatcacattccaacatggtatcaactaggtcatctcctttccaccctacagccgtcagccgctaggtccggcgaccgctgcttccgtgccgctgcccccgggaggagtgttcttaaggcgtcgccgaggcatccaggcgctcggagaatacttggcgccttgcccgcttaggcgctaaggcggtgatcccatttgcttgctcgccttacagtcgtaagtaagaacactgcccgagaggttcatccttcactcccgggggtagcctcccttcccaacctgtcacccctcaacgtcggcgcgcccctgcctcctctcgcccggccccggcgtggccatgatggccctgagctcctttcctcgccagccctggcggttggcggcctcgctcctctccccaacgacaatgccgacgcagccatgggcgtcgc

SEQ ID NO: 37082 - DNA, 609 bp, Zea Mays
cgacaatgggtcgacaatgggtggaaatgattcttcaggcattggaatatgagaaagaacatggcaaagtgctagatgagttctttctctccactgccggcaagttccagacagagatcggtaagagctgggccgctgaagtaaactcgaggagaaaggagggatgcggaaagcaggagccttcatcaaacttccacggaaacgtgttgtgatggggacggtgtggccaactagagcctggcaagtttaagtggccctggagccaacttcagcggtgggctgatggcagttcaccgattgacacggctgttcagccttcctaaataataacaggagggttatggagtgaacactagattttagtctggttagctgaaatgttcgtagttgctcgaagaccaaggggtaggtaaaactgtgtagtgtttcgttgtagcctggaatccagcgaggatgagatacttcttcttttttcaactccgtgaataatgaaagggcaatggtgtttgcccttctcatcttccctgcccatttttattgggcaaaatctatgcacacagttacttagggcctgtttggaagcaccggtttttaaaagtctagtttata

SEQ ID NO: 37083 - DNA, 1469 bp, Zea Mays
tggccatctctagcacagcccggccggcgtcgttcatctgtgtttggtagtacggtcgttccgacggtcggatgctcacaagagaaaagagatgctgtgtgcaagctgcagagactggcgtccgacccgatcccactcccacggtcccacctcgcctctcgcgctcctgcccacccagcctgtccgccgtctggtgtccgcctgttccccaaaagcaaagagaggcgcagagccgccgccgttgatctctgacctttccgatccagagcctagctctcaccgtctaccggagctctcaccatggcggtgagctcgcggtttccctcccaacccgcggcgcgtggcctcctgcgccgcaccccgcagcgcatcctccccgtcgagcgcacgccgcgccgcctcgccctggtcgtcaccgccgtctctgggggacctgtacctggcggatcgcccgttcccaggcggccgccaccgccggaggacgccgcgaccgtggcaccgacctcagtgccgtcgtcggccgcctcggccatcgatttcctcaccctgtgtcaccgcctcaagaccaccaaaaggaaaggatggataaaccatagcatcaagggccctgagtccattgctgatcacatgtaccgaatggccttgatggctctgattgctggtgatctgcctgctgtggatcgagaaagctattgttggtgacattaccccatcggatggtatacctaaggctgaaaaaagccggcgcgaacaagcagcactagatgaaatgtgccaagttcttggtggtgggccagctgctgatgagattaaagagttgtgggaagaatatgagaacaattcttctattgaagccaatcttgtaaaagattttgataaagtggaaatgattcttcaggcattggaatatgagaaagaacatggcaaagtgctagatgagttctttctctccactgccggcaagttccagacagagatcggtaagagctgggccgctgaagtaaactcgaggagaaaggagggatgcggaaagcaggagccttcatcaaacttccacggaaacgtgttgtgatggggacggtgtggccaactagagcctggcaagtttaagtggccctggagccaacttcagcggtgggctgatggcagttcaccgattgacacggctgttcagccttcctaaataataacaggagggttatggagtgaacactagattttagtctggttagctgaaatgttcgtagttgctcgaagaccaaggggtaggtaaaactgtgtagtgtttcgttgtagcctggaatccagcgaggatgagatacttcttcttttttcaactccgtgaataatgaaagggcaatggtgtttgcccttctcatcttccctgcccatttttattgggcaaaatctatgcacacagttacttagggcctgtttggaagcaccggtttttaaaagtctagtttata

SEQ ID NO: 37084 - DNA, 1344 bp, Zea Mays
tggccatctctagcacagcccggccggcgtcgttcatctgtgtttggtagtacggtcgttccgacggtcggatgctcacaagagaaaagagatgctgtgtgcaagctgcagagactggcgtccgacccgatcccactcccacggtcccacctcgcctctcgcgctcctgcccacccagcctgtccgccgtctggtgtccgcctgttccccaaaagcaaagagaggcgcagagccgccgccgttgatctctgacctttccgatccagagcctagctctcaccgtctaccggagctctcaccatggcggtgagctcgcggtttccctcccaacccgcggcgcgtggcctcctgcgccgcaccccgcagcgcatcctccccgtcgagcgcacgccgcgccgcctcgccctggtcgtcaccgccgtctctgggggacctgtacctggcggatcgcccgttcccaggcggccgccaccgccggaggacgccgcgaccgtggcaccgacctcagtgccgtcgtcggccgcctcggccatcgatttcctcaccctgtgtcaccgcctcaagctattgttggtgacattaccccatcggatggtatacctaaggctgaaaaaagccggcgcgaacaagcagcactagatgaaatgtgccaagttcttggtggtgggccagctgctgatgagattaaagagttgtgggaagaatatgagaacaattcttctattgaagccaatcttgtaaaagattttgataaagtggaaatgattcttcaggcattggaatatgagaaagaacatggcaaagtgctagatgagttctttctctccactgccggcaagttccagacagagatcggtaagagctgggccgctgaagtaaactcgaggagaaaggagggatgcggaaagcaggagccttcatcaaacttccacggaaacgtgttgtgatggggacggtgtggccaactagagcctggcaagtttaagtggccctggagccaacttcagcggtgggctgatggcagttcaccgattgacacggctgttcagccttcctaaataataacaggagggttatggagtgaacactagattttagtctggttagctgaaatgttcgtagttgctcgaagaccaaggggtaggtaaaactgtgtagtgtttcgttgtagcctggaatccagcgaggatgagatacttcttcttttttcaactccgtgaataatgaaagggcaatggtgtttgcccttctcatcttccctgcccatttttattgggcaaaatctatgcacacagttacttagggcctgtttggaagcaccggtttttaaaagtctagtttata

SEQ ID NO: 37085 - DNA, 1466 bp, Zea Mays
tggccatctctagcacagcccggccggcgtcgttcatctgtgtttggtagtacggtcgttccgacggtcggatgctcacaagagaaaagagatgctgtgtgcaagctgcagagactggcgtccgacccgatcccactcccacggtcccacctcgcctctcgcgctcctgcccacccagcctgtccgccgtctggtgtccgcctgttccccaaaagcaaagagaggcgcagagccgccgccgttgatctctgacctttccgatccagagcctagctctcaccgtctaccggagctctcaccatggcggtgagctcgcggtttccctcccaacccgcggcgcgtggcctcctgcgccgcaccccgcagcgcatcctccccgtcgagcgcacgccgcgccgcctcgccctggtcgtcaccgccgtctctgggggacctgtacctggcggatcgcccgttcccaggcggccgccaccgccggaggacgccgcgaccgtggcaccgacctcagtgccgtcgtcggccgcctcggccatcgatttcctcaccctgtgtcaccgcctcaagaccaccaaaaggaaaggatggataaaccatagcatcaagggccctgagtccattgctgatcacatgtaccgaatggccttgatggctctgattgctggtgatctgcctgctgtggatcgagaaaggtgtatcaaaattgctattgtgcatgacattgcagaaggctgaaaaaagccggcgcgaacaagcagcactagatgaaatgtgccaagttcttggtggtgggccagctgctgatgagattaaagagttgtgggaagaatatgagaacaattcttctattgaagccaatcttgtaaaagattttgataaagtggaaatgattcttcaggcattggaatatgagaaagaacatggcaaagtgctagatgagttctttctctccactgccggcaagttccagacagagatcggtaagagctgggccgctgaagtaaactcgaggagaaaggagggatgcggaaagcaggagccttcatcaaacttccacggaaacgtgttgtgatggggacggtgtggccaactagagcctggcaagtttaagtggccctggagccaacttcagcggtgggctgatggcagttcaccgattgacacggctgttcagccttcctaaataataacaggagggttatggagtgaacactagattttagtctggttagctgaaatgttcgtagttgctcgaagaccaaggggtaggtaaaactgtgtagtgtttcgttgtagcctggaatccagcgaggatgagatacttcttcttttttcaactccgtgaataatgaaagggcaatggtgtttgcccttctcatcttccctgcccatttttattgggcaaaatctatgcacacagttacttagggcctgtttggaagcaccggtttttaaaagtctagtttata

SEQ ID NO: 37086 - DNA, 1122 bp, Zea Mays
tgatgctccgatgcgtcctaatttgtttcaaagcatgcaatatatccccaaagctagtcttgtaactgctgtttattggggctataatgggcgcaagagatttaaatatacaaacggaacatggacagcttggcatgccaagcaatatttgctgtgttgttgttgagtaccttgctggaggtgcgctgaaaaattttctgataaagaacaggagaaggaaacttgcctttaaagttgtggtccaaatagctcttgaccttgccaggggattatgctacctccactcaaagaaaatagtgcaccgtgatgtcaagactgaaaacatgcttctggacaagacgagaacggtaaagatcgctgattttggtgttgctcgagtcgaggcttcaaatcctagcgatatgacgggagaaacagggacgcttggttacatggctcctgaggttctcaatggccatgcttacaacaggaagtgtgacgtgtacagctttgggatctgcctgtgggagatatactgctgtgacatgccgtaccctgatctcagtttttctgaggtcacctctgccgtcgttcgccagaatctgaggcctgagataccgcgctgctgcccgagctcgctagcgaatgtgatgaagcgatgctgggacgcgaacccggacaagcgtcccgagatggcggaggtggtgtccatgctggaggcgatcgacacgtccaagggtggcggcatgatccctaaggaccagacgcagggctgcctctcgtgcttccgccagtaccgaggtccctaacgcagggttgtttatttatacccggtgaaatgatgatattggtctctacactacaactcagtgtaatctaatcgcagaagtggctatataatggagaagcttatcattgcttgccatgggtgtaaatggatggggcggggtggttgacgattggtgtgcttgtatgctcgcttcgagttataatgcttgctgtaagttaaggtgtggacggagttgctgttgccgtttgctcacatcgttaaattcgtgggcgtgacatgaagcaaggttatgtactacgtattggattaaccatctatttacataatgttaattattaaattacacgtgaacc

SEQ ID NO: 37087 - DNA, 1542 bp, Zea Mays
caagccaccgcctggccgtctcccccagaatccacccgcctggccgcctccccaagccaccgcttggtcgtctcctcgcctgaagccgctggctgtctcccccagaatccccccgcctggccgcctcccccaagccaccgcctggtcgtctcctcgcctgaagccgccgcccgcatggatcccgtcgaccaaggggcgccacaccccaaacagcgccgccgcagctccaaatccccctcaactgcgccgccgcaaccacagcagcgccgccgtacctccttgcttgctgccctagatgcgatagggagagtagaacctggcaccttcgatagtcgacagagcacaccatcggcatctgtacatcgatctactgtgggcagcgctgatccctcgacggtgatgcctgattacagtaaaattgcttgactggggcgaagatggccatagatcagaacaagaaattggtgcactaagagcagcgtttgcacaagaggtcgctgtctggcataagcttgagcatccaaacgttactaagtttattggggctataatgggcgcaagagatttaaatatacaaacggaacatggacagcttggcatgccaagcaatatttgctgtgttgttgttgagtaccttgctggaggtgcgctgaaaaattttctgataaagaacaggagaaggaaacttgcctttaaagttgtggtccaaatagctcttgaccttgccaggggattatgctacctccactcaaagaaaatagtgcaccgtgatgtcaagactgaaaacatgcttctggacaagacgagaacggtaaagatcgctgattttggtgttgctcgagtcgaggcttcaaatcctagcgatatgacgggagaaacagggacgcttggttacatggctcctgagctttgggatctgcctgtgggagatatactgctgtgacatgccgtaccctgatctcagtttttctgaggtcacctctgccgtcgttcgccagaatctgaggcctgagataccgcgctgctgcccgagctcgctagcgaatgtgatgaagcgatgctgggacgcgaacccggacaagcgtcccgagatggcggaggtggtgtccatgctggaggcgatcgacacgtccaagggtggcggcatgatccctaaggaccagacgcagggctgcctctcgtgcttccgccagtaccgaggtccctaacgcagggttgtttatttatacccggtgaaatgatgatattggtctctacactacaactcagtgtaatctaatcgcagaagtggctatataatggagaagcttatcattgcttgccatgggtgtaaatggatggggcggggtggttgacgattggtgtgcttgtatgctcgcttcgagttataatgcttgctgtaagttaaggtgtggacggagttgctgttgccgtttgctcacatcgttaaattcgtgggcgtgacatgaagcaaggttatgtactacgtattggattaaccatctatttacataatgttaattattaaattacacgtgaacc

SEQ ID NO: 37088 - DNA, 1953 bp, Zea Mays
caagccaccgcctggccgtctcccccagaatccacccgcctggccgcctccccaagccaccgcttggtcgtctcctcgcctgaagccgctggctgtctcccccagaatccccccgcctggccgcctcccccaagccaccgcctggtcgtctcctcgcctgaagccgccgcccgcatggatcccgtcgaccaaggggcgccacaccccaaacagcgccgccgcagctccaaatccccctcaactgcgccgccgcaaccacagcagcgccgccgtacctccttgcttgctgccctagatgcgatagggagagtagaacctggcaccttcgatagtcgacagagcacaccatcggcatctgtacatcgatctactgtgggcagcgctgatccctcgacggtgatgcctgattacagtaaaattgcttgactggggcgaagatggccatagatcagaacaagaaattggtgcactaagagcagcgtttgcacaagaggtcgctgtctggcataagcttgagcatccaaacgttactaagtttattggggctataatgggcgcaagagatttaaatatacaaacggaacatggacagcttggcatgccaagcaatatttgctgtgttgttgttgagtaccttgctggaggtgcgctgaaaaattttctgataaagaacaggagaaggaaacttgcctttaaagttgtggtccaaatagctcttgaccttgccaggggattatgctacctccactcaaagaaaatagtgcaccgtgatgtcaagactgaaaacatgcttctggacaagacgagaacggtaaagatcgctgattttggtgttgctcgagtcgaggcttcaaatcctagcgatatgacgggagaaacagggacgcttggttacatggctcctgaggtatttgattttaaccatcggtctgtgttcctaaatctaaaactgcacacctggagaagctatcctttatatcgataggtatttgcacggaaactacttaagtataagctggaaacgtgccctgcatgtaatagctgaagtatcttaaagaccacacagttacgtggcctctaatatctccagtaaattggtcgaaactgttcccttcttgaagctgcactatccattgtctcacaccgatgcatcatctgcaaggcagcaggattttttcattgatctgaaattcgggatcctttctctgcacttgcacttttatttcctgtttcttgaaagagcatatctgggttacattggcatatgcatgcaggttctcaatggccatgcttacaacaggaagtgtgacgtgtacagctttgggatctgcctgtgggagatatactgctgtgacatgccgtaccctgatctcagtttttctgaggtcacctctgccgtcgttcgccagaatctgaggcctgagataccgcgctgctgcccgagctcgctagcgaatgtgatgaagcgatgctgggacgcgaacccggacaagcgtcccgagatggcggaggtggtgtccatgctggaggcgatcgacacgtccaagggtggcggcatgatccctaaggaccagacgcagggctgcctctcgtgcttccgccagtaccgaggtccctaacgcagggttgtttatttatacccggtgaaatgatgatattggtctctacactacaactcagtgtaatctaatcgcagaagtggctatataatggagaagcttatcattgcttgccatgggtgtaaatggatggggcggggtggttgacgattggtgtgcttgtatgctcgcttcgagttataatgcttgctgtaagttaaggtgtggacggagttgctgttgccgtttgctcacatcgttaaattcgtgggcgtgacatgaagcaaggttatgtactacgtattggattaaccatctatttacataatgttaattattaaattacacgtgaacc

SEQ ID NO: 37089 - DNA, 1438 bp, Zea Mays
cacgaaaccccttgtgggacccacaaccgcaacacgagtcctcggctcctgacctccgggtctggcctccggcgtcacttgccctcccgtaccccgtgcggccgtgcctacttcggcaacccactatctcatgcgctcacatggagactcccgcacgaactggaatcatctccgcctcgccacctcttcatcttcttccccagtagccgccgccaccaccactgcagcagccaaaccacgtgacacctcccgcgccgctcaaccccacagcatccgttgccaccgccgctcacctccccggcgctcccggctacaaccactgcaagcatgaggcagccaaccagcgcgggcggcgacgctgggttcttgcgcgcggaccagatcgacctcaagagcctggacgagcagctcgagcgccacctcggacatcccgcggagcgggtagttggcccagtctctgggacagggagccgccgcggcgaaacggccaagctgggtccggaggagctgacgccactgcagcggtgccgtgaggactgggagatcgaccctaccaagctcatcatcaagggcgtcatcgcgcgcggcacctttggcaccgtccaccgcggcgtctacgacggccaggacgtcgctgtaaaattgcttgactggggcgaagatggccatagatcagaacaagaaattggtgcactaagagcagcgtttgcacaagaggtcgctgtctggcataagcttgagcatccaaacgttactaaggttctcaatggccatgcttacaacaggaagtgtgacgtgtacagctttgggatctgcctgtgggagatatactgctgtgacatgccgtaccctgatctcagtttttctgaggtcacctctgccgtcgttcgccagaatctgaggcctgagataccgcgctgctgcccgagctcgctagcgaatgtgatgaagcgatgctgggacgcgaacccggacaagcgtcccgagatggcggaggtggtgtccatgctggaggcgatcgacacgtccaagggtggcggcatgatccctaaggaccagacgcagggctgcctctcgtgcttccgccagtaccgaggtccctaacgcagggttgtttatttatacccggtgaaatgatgatattggtctctacactacaactcagtgtaatctaatcgcagaagtggctatataatggagaagcttatcattgcttgccatgggtgtaaatggatggggcggggtggttgacgattggtgtgcttgtatgctcgcttcgagttataatgcttgctgtaagttaaggtgtggacggagttgctgttgccgtttgctcacatcgttaaattcgtgggcgtgacatgaagcaaggttatgtactacgtattggattaaccatctatttacataatgttaattattaaattacacgtgaacc

SEQ ID NO: 37090 - DNA, 2099 bp, Zea Mays
cacgaaaccccttgtgggacccacaaccgcaacacgagtcctcggctcctgacctccgggtctggcctccggcgtcacttgccctcccgtaccccgtgcggccgtgcctacttcggcaacccactatctcatgcgctcacatggagactcccgcacgaactggaatcatctccgcctcgccacctcttcatcttcttccccagtagccgccgccaccaccactgcagcagccaaaccacgtgacacctcccgcgccgctcaaccccacagcatccgttgccaccgccgctcacctccccggcgctcccggctacaaccactgcaagcatgaggcagccaaccagcgcgggcggcgacgctgggttcttgcgcgcggaccagatcgacctcaagagcctggacgagcagctcgagcgccacctcggacatcccgcggagcgggtagttggcccagtctctgggacagggagccgccgcggcgaaacggccaagctgggtccggaggagctgacgccactgcagcggtgccgtgaggactgggagatcgaccctaccaagctcatcatcaagggcgtcatcgcgcgcggcacctttggcaccgtccaccgcggcgtctacgacggccaggacgtcgctgtaaaattgcttgactggggcgaagatggccatagatcagaacaagaaattggtgcactaagagcagcgtttgcacaagaggtcgctgtctggcataagcttgagcatccaaacgttactaagtttattggggctataatgggcgcaagagatttaaatatacaaacggaacatggacagcttggcatgccaagcaatatttgctgtgttgttgttgagtaccttgctggaggtgcgctgaaaaattttctgataaagaacaggagaaggaaacttgcctttaaagttgtggtccaaatagctcttgaccttgccaggggattatgctacctccactcaaagaaaatagtgcaccgtgatgtcaagactgaaaacatgcttctggacaagacgagaacggtaaagatcgctgattttggtgttgctcgagtcgaggcttcaaatcctagcgatatgacgggagaaacagggacgcttggttacatggctcctgaggtatttgcacggaaactacttaagtataagctggaaacgtgccctgcatgtaatagctgaagtatcttaaagaccacacagttacgtggcctctaatatctccagtaaattggtcgaaactgttcccttcttgaagctgcactatccattgtctcacaccgatgcatcatctgcaaggcagcaggattttttcattgatctgaaattcgggatcctttctctgcacttgcacttttatttcctgtttcttgaaagagcatatctgggttacattggcatatgcatgcaggttctcaatggccatgcttacaacaggaagtgtgacgtgtacagctttgggatctgcctgtgggagatatactgctgtgacatgccgtaccctgatctcagtttttctgaggtcacctctgccgtcgttcgccagaatctgaggcctgagataccgcgctgctgcccgagctcgctagcgaatgtgatgaagcgatgctgggacgcgaacccggacaagcgtcccgagatggcggaggtggtgtccatgctggaggcgatcgacacgtccaagggtggcggcatgatccctaaggaccagacgcagggctgcctctcgtgcttccgccagtaccgaggtccctaacgcagggttgtttatttatacccggtgaaatgatgatattggtctctacactacaactcagtgtaatctaatcgcagaagtggctatataatggagaagcttatcattgcttgccatgggtgtaaatggatggggcggggtggttgacgattggtgtgcttgtatgctcgcttcgagttataatgcttgctgtaagttaaggtgtggacggagttgctgttgccgtttgctcacatcgttaaattcgtgggcgtgacatgaagcaaggttatgtactacgtattggattaaccatctatttacataatgttaattattaaattacacgtgaacc

SEQ ID NO: 37091 - DNA, 642 bp, Zea Mays
ggccgaacgaacgaacgattcagacactgacgacgacagcgctggcgtgttcaagctccacttcgtggaggaatgggtcagggtcggcgccccggcgaagtccaaggtgctggccgaccacgcctcggcgcctttcgaagaccaatgctccatcctggagaaggaggccgtcaacgtgtcccttgagaacctcaagtcctacccgttcgtcaaggaagggctggagaaagggaccctcaagctggtcggcggccattacgacttcgtcaatggaaagttcgagacatgggaaccctaagtggccatatacgtacaaatacgccccaccggacttattagctgcgtggagtgcttaattatttgccgctatatatacacatataccggaatttaccggtgagaactatactgttgtaataataatagcgggaaaaaatattctttgcatctgggatacaaacacacttttttacgaatagaagaaaaataaattagtaagggattaatttataaatttgatctgtttttgtgggtttgcctctaggtagtggatgtgagaggcttcaaaagagtgtttgtatcccgaatacaaagaattttttcaataaggaatacctgtgttatttgacttctaatgctgag

SEQ ID NO: 37092 - DNA, 1056 bp, Zea Mays
acagagcgaaacaatccgcagagactcggaagtcggaaagaatccctcctgttcttcgtcaaccctccagaacctgctctctcttcctctacgagactacgaccgtgacatggccgtcgagcgcttgaagaccgggttcgagcagttcaaggccgacgtctacgacaagaagccggagctgttcgagccactcaaggcgcaccagtcgcccaagtacatggtgttcgcctgctccgactcccgcgtgtgcccgtcggtgaccctgggcctgcaccccggcgaggcctttgccgtccgcaacatcgccagcatggtgccgccctacgacaagaccaagtacgccggcgtcggctccgccatcgagtacgccgtctgcgccctcaaggtggaggtcatcgtggtcataggccacagccgctgcggcgggatcaaggcgctcctctccctcgaggacggcgcgcccgacaagttccacttcgtggaggaatgggtcagggtcggcgccccggcgaagtccaaggtgctggccgaccacgcctcggcgcctttcgaagaccaatgctccatcctggagaaggaggccgtcaacgtgtcccttgagaacctcaagtcctacccgttcgtcaaggaagggctggagaaagggaccctcaagctggtcggcggccattacgacttcgtcaatggaaagttcgagacatgggaaccctaagtggccatatacgtacaaatacgccccaccggacttattagctgcgtggagtgcttaattatttgccgctatatatacacatataccggaatttaccggtgagaactatactgttgtaataataatagcgggaaaaaatattctttgcatctgggatacaaacacacttttttacgaatagaagaaaaataaattagtaagggattaatttataaatttgatctgtttttgtgggtttgcctctaggtagtggatgtgagaggcttcaaaagagtgtttgtatcccgaatacaaagaattttttcaataaggaatacctgtgttatttgacttctaatgctgag

SEQ ID NO: 37093 - DNA, 1699 bp, Zea Mays
accatcctgcacacactgcaatctccgtccatccctccgtttccttttttcctctgttgccatcagttcagtagtagcctgcagctctcccaccttctcgctgcgctgtactgtgctggcaggggaggggccatggacgaccccgtcgagcgcttgaaggacgggttccacaagttcaagaccgaggtctatgacaagaagccggagctgttcgagcctctcaaggccggccaggcccccaagtacgtggtgttcgcctgctccgactcccgcgtgtgcccgtcggtgaccctgggcctgcagcccggcgaggccttcaccgtccgcaacatcgccgccatggtcccagcctacgacaagaccaagtacaccggcatcgggtccgccatcgagtacgccgtgtgcgcgctcaaggtggaggtcctcgtggtcattggccacagctgctgcggtggcatcagggcgctcctctccctccaggacggcgcacctgacaacttccacttcgttgagaactgggttaagatcggcttccctgccaagattaaggtgaagaaagaccacgcatcggtgccgttcgatgaccagtgctctattctagagaaggaggccgtgaacctgtccctggagaacctcaagacctaccccttcgtcaaggaagggctggccaacgggacgctcaagctggtcggcggccactacaacttcgtgtcaggggagttcctcacatgggacaataagcagccatcgacatggccgtcgagcgcttgaagaccgggttcgagcagttcaaggccgacgtctacgacaagaagccggagctgttcgagccactcaaggcgcaccagtcgcccaagtacatggtgttcgcctgctccgactcccgcgtgtgcccgtcggtgaccctgggcctgcaccccggcgaggcctttgccgtccgcaacatcgccagcatggtgccgccctacgacaagaccaagtacgccggcgtcggctccgccatcgagtacgccgtctgcgccctcaaggtggaggtcatcgtggtcataggccacagccgctgcggcgggatcaaggcgctcctctccctcgaggacggcgcgcccgacaagttccacttcgtggaggaatgggtcagggtcggcgccccggcgaagtccaaggtgctggccgaccacgcctcggcgcctttcgaagaccaatgctccatcctggagaaggaggccgtcaacgtgtcccttgagaacctcaagtcctacccgttcgtcaaggaagggctggagaaagggaccctcaagctggtcggcggccattacgacttcgtcaatggaaagttcgagacatgggaaccctaagtggccatatacgtacaaatacgccccaccggacttattagctgcgtggagtgcttaattatttgccgctatatatacacatataccggaatttaccggtgagaactatactgttgtaataataatagcgggaaaaaatattctttgcatctgggatacaaacacacttttttacgaatagaagaaaaataaattagtaagggattaatttataaatttgatctgtttttgtgggtttgcctctaggtagtggatgtgagaggcttcaaaagagtgtttgtatcccgaatacaaagaattttttcaataaggaatacctgtgttatttgacttctaatgctgag

SEQ ID NO: 37094 - DNA, 1769 bp, Zea Mays
gcgagcgccatttgttggaaataccttgtccacaaaggccgctctcaggcgttactgacggtgtctctttctctcgctggcacgattacacgcgtcttgttgctagtaaactgtaccacgagagagagagagagagagagagagagagagagagtgagagggccgcatcgcatacatacatccgtccggagataagagaggagtggaagaaaagaggagaaggtgagcagctgcctttgcctcccgcgtgtcgttataaaaaggatcggagcgggggtcaccgaaggcgtccaattcatccaccttgtccgccacccaccttccaaggtccgtcccctcctccccccctccctcggcccctgtaccatcctgcacacactgcaatctccgtccatccctccgtttccttttttcctctgttgccatcagttcagtagtagcctgcagctctcccaccttctcgctgcgctgtactgtgctggtgcaaagaagatccctgttcccgcttttagatcacctttgtgcatgcttttccctgtggtccgtgggcgaggaggccaaaaactgcatcatgcccctcgccctctctctctctctatcatgctgcctgtatcgcaatcacgagcgagcaggttggtcgtctttctggagacggcgagctgaccggccgacggtgtctctgtggctgttgatgttgcaggcaggggaggggccatggacgaccccgtcgagcgcttgaaggacgggttccacaagttcaagaccgaggtctatgacaagaagccggagctgttcgagcctctcaaggccggccaggcccccaagtacgtggtgttcgcctgctccgactcccgcgtgtgcccgtcggtgaccctgggcctgcagcccggcgaggccttcaccgtccgcaacatcgccgccatggtcccagcctacgacaagaccaagtacaccggcatcgggtccgccatcgagtacgccgtgtgcgcgctcaaggtggaggtcctcgtggtcattggccacagctgctgcggtggcatcagggcgctcctctccctccaggacggcgcacctgacaacttccacttcgttgagaactgggttaagatcggcttccctgccaagattaaggtgaagaaagaccacgcatcggtgccgttcgatgaccagtgctctattctagagaaggaggccgtgaacctgtccctggagaacctcaagacctaccccttcgtcaaggaagggctggccaacgggacgctcaagctggtcggcggccactacaacttcgtgtcaggggagttcctcacatgggacaataagcagccatcgtgaatctatatatatacactacatgatgcatgttcgtattcagcatgcagctacatacatatatatataccggatcacccaatgcaatgtgtgaatgtgtattgtgtaataagcaataccatatattctaccattctaccgcttttttattttctaacgccgagcattcatgtactgtgtattttatgatgaccgccctgtgtgctcgtcaaaagacatctgctatatataatcatctttggcgagattaattattacgaagccaactagagatggtcaaacgggccgccccgacccgataaagcccggaccgttttgggtccgatccatcaggcacggttagaaaaccgagccgatccatctaaacctgcgggctcgttttcctgttcgagcccggcccgcggcagcctaaacccgtttagcacgggaaaagtggg

SEQ ID NO: 37095 - DNA, 866 bp, Zea Mays
taagagccatgggaaaccgatcgaacttggttttgctacatggtgttcgcttgctccgactcccgtgtgtgcccatcggtgaccctgggcctgcagcccggcgaggccttcaccgttcgcaacatagccgccatggtcccaggctacgacaagaccaagtacaccggcatcgggtccgccatcgagtacgctgtgtgcgctctcaaggtggaggtcctcgtggtcattggccatagctgctgcggtggcatcagggcgctcctctccctccaggacggcgcacctgacaccttccacttcgtcgaggactgggttaagatcggcttcattgccaagatgaaggtaaagaaagagcacgcctcggtgccgttcgatgaccagtgctccattctcgagaaggaggccgtgaacgtgtccctggagaacctcaagacctaccccttcgtcaaggaagggcttgcaaatgggaccctcaagctgatcggcgcccactacgactttgtctcaggagagttcctcacatggaaaaagtgaaaaactagggctacggcaattctaccggcccgccgactcctgcatcatcataaatatatatactatactatactactacgtacctaccgatatgcacccgagcaatgtgaatgcgtcgagtactatatatctgttttctgcatctacatatatataccggatcaatcgcccaatgtgaatgtaataagcaatatcattttctaccacttttcattcctaacgctgagctttttatgtactatatcttatatgatgaataataatatgaccgccttgtgatctaaagacatcagctatatttttttcacaatattattacgaagagcttctta

SEQ ID NO: 37096 - DNA, 1462 bp, Zea Mays
aaggggaaccatgcagataatactagtacatggtgttcgcctgctccgactcccgcgtgtgcccgtcggtgacactgggcctgcagcccggcgaggcattcaccgtccgcaacatcgcctccatggtcccaccctacgacaagatcaagtacgccggcaccgggtccgccatcgagtacgccgtgtgcgcgctcaaggtgcaggtcatcgtggtcattggccacagctgctgcggtggcatcagggcgctcctctccctcaaggacggcgcgcccgacaacttccacttcgtggaggactgggtcaggatcggcagccctgccaagaacaaggtgaagaaagagcacgcatcggtgccgttcgatgaccagtgctccatcctggagaaggaggccgtgaacgtgtcgctccagaacctcaagagctaccccttcgtcaaggaagggctggccggcgggacgctcaagctggttggcgcccactacgacttcgtcaaagggcagttcgtcacatgggagcctccccaggacgccatcgagcgcttgacgagcgggttccagcagttcaaggtcaatgtctatgacaagaagccggagcttttcgggcctctcaagtccggccaggcccccaagtacatggtgttcgcttgctccgactcccgtgtgtgcccatcggtgaccctgggcctgcagcccggcgaggccttcaccgttcgcaacatagccgccatggtcccaggctacgacaagaccaagtacaccggcatcgggtccgccatcgagtacgctgtgtgcgctctcaaggtggaggtcctcgtggtcattggccatagctgctgcggtggcatcagggcgctcctctccctccaggacggcgcacctgacaccttccacttcgtcgaggactgggttaagatcggcttcattgccaagatgaaggtaaagaaagagcacgcctcggtgccgttcgatgaccagtgctccattctcgagaaggaggccgtgaacgtgtccctggagaacctcaagacctaccccttcgtcaaggaagggcttgcaaatgggaccctcaagctgatcggcgcccactacgactttgtctcaggagagttcctcacatggaaaaagtgaaaaactagggctacggcaattctaccggcccgccgactcctgcatcatcataaatatatatactatactatactactacgtacctaccgatatgcacccgagcaatgtgaatgcgtcgagtactatatatctgttttctgcatctacatatatataccggatcaatcgcccaatgtgaatgtaataagcaatatcattttctaccacttttcattcctaacgctgagctttttatgtactatatcttatatgatgaataataatatgaccgccttgtgatctaaagacatcagctatatttttttcacaatattattacgaagagcttctta

SEQ ID NO: 37097 - DNA, 1572 bp, Zea Mays
ttgtgttgtggtccgtcggcaaggcatggaccccaccgtcgagcgcttgaagagcgggttccagaagttcaagaccgaggtctatgacaagaagccggagctgttcgagcctctcaagtccggccagagccccaggtacatggtgttcgcctgctccgactcccgcgtgtgcccgtcggtgacactgggcctgcagcccggcgaggcattcaccgtccgcaacatcgcctccatggtcccaccctacgacaagatcaagtacgccggcaccgggtccgccatcgagtacgccgtgtgcgcgctcaaggtgcaggtcatcgtggtcattggccacagctgctgcggtggcatcagggcgctcctctccctcaaggacggcgcgcccgacaacttccacttcgtggaggactgggtcaggatcggcagccctgccaagaacaaggtgaagaaagagcacgcatcggtgccgttcgatgaccagtgctccatcctggagaaggaggccgtgaacgtgtcgctccagaacctcaagagctaccccttcgtcaaggaagggctggccggcgggacgctcaagctggttggcgcccactacgacttcgtcaaagggcagttcgtcacatgggagcctccccaggacgccatcgagcgcttgacgagcgggttccagcagttcaaggtcaatgtctatgacaagaagccggagcttttcgggcctctcaagtccggccaggcccccaagtacatggtgttcgcttgctccgactcccgtgtgtgcccatcggtgaccctgggcctgcagcccggcgaggccttcaccgttcgcaacatagccgccatggtcccaggctacgacaagaccaagtacaccggcatcgggtccgccatcgagtacgctgtgtgcgctctcaaggtggaggtcctcgtggtcattggccatagctgctgcggtggcatcagggcgctcctctccctccaggacggcgcacctgacaccttccacttcgtcgaggactgggttaagatcggcttcattgccaagatgaaggtaaagaaagagcacgcctcggtgccgttcgatgaccagtgctccattctcgagaaggaggccgtgaacgtgtccctggagaacctcaagacctaccccttcgtcaaggaagggcttgcaaatgggaccctcaagctgatcggcgcccactacgactttgtctcaggagagttcctcacatggaaaaagtgaaaaactagggctacggcaattctaccggcccgccgactcctgcatcatcataaatatatatactatactatactactacgtacctaccgatatgcacccgagcaatgtgaatgcgtcgagtactatatatctgttttctgcatctacatatatataccggatcaatcgcccaatgtgaatgtaataagcaatatcattttctaccacttttcattcctaacgctgagctttttatgtactatatcttatatgatgaataataatatgaccgccttgtgatctaaagacatcagctatatttttttcacaatattattacgaagagcttctta

SEQ ID NO: 37098 - DNA, 1848 bp, Zea Mays
cgtactatcaaaaatatatttcatgtaaacgggacggcgggcagctgaggagtcaaacgagagagatcgagagaaagaaagggagggcatccaccagccgccggcgataagaggggaggagagagaggccagagaagaggaggagaagaagaagaaaatgagcagctgcctctgccttccgaaaaaaaaggaggggccagcgaaggagaagccgtccacagatacccccacctcgtcactccttcagaaccagaagccctcccaacctccacctcctccctccaaggcttcctccaagggcatggaccccaccgtcgagcgcttgaagagcgggttccagaagttcaagaccgaggtctatgacaagaagccggagctgttcgagcctctcaagtccggccagagccccaggtacatggtgttcgcctgctccgactcccgcgtgtgcccgtcggtgacactgggcctgcagcccggcgaggcattcaccgtccgcaacatcgcctccatggtcccaccctacgacaagatcaagtacgccggcaccgggtccgccatcgagtacgccgtgtgcgcgctcaaggtgcaggtcatcgtggtcattggccacagctgctgcggtggcatcagggcgctcctctccctcaaggacggcgcgcccgacaacttccacttcgtggaggactgggtcaggatcggcagccctgccaagaacaaggtgaagaaagagcacgcatcggtgccgttcgatgaccagtgctccatcctggagaaggaggccgtgaacgtgtcgctccagaacctcaagagctaccccttcgtcaaggaagggctggccggcgggacgctcaagctggttggcgcccactacgacttcgtcaaagggcagttcgtcacatgggagcctccccaggacgccatcgagcgcttgacgagcgggttccagcagttcaaggtcaatgtctatgacaagaagccggagcttttcgggcctctcaagtccggccaggcccccaagtacatggtgttcgcttgctccgactcccgtgtgtgcccatcggtgaccctgggcctgcagcccggcgaggccttcaccgttcgcaacatagccgccatggtcccaggctacgacaagaccaagtacaccggcatcgggtccgccatcgagtacgctgtgtgcgctctcaaggtggaggtcctcgtggtcattggccatagctgctgcggtggcatcagggcgctcctctccctccaggacggcgcacctgacaccttccacttcgtcgaggactgggttaagatcggcttcattgccaagatgaaggtaaagaaagagcacgcctcggtgccgttcgatgaccagtgctccattctcgagaaggaggccgtgaacgtgtccctggagaacctcaagacctaccccttcgtcaaggaagggcttgcaaatgggaccctcaagctgatcggcgcccactacgactttgtctcaggagagttcctcacatggaaaaagtgaaaaactagggctacggcaattctaccggcccgccgactcctgcatcatcataaatatatatactatactatactactacgtacctaccgatatgcacccgagcaatgtgaatgcgtcgagtactatatatctgttttctgcatctacatatatataccggatcaatcgcccaatgtgaatgtaataagcaatatcattttctaccacttttcattcctaacgctgagctttttatgtactatatcttatatgatgaataataatatgaccgccttgtgatctaaagacatcagctatatttttttcacaatattattacgaagagcttctta

SEQ ID NO: 37099 - DNA, 2102 bp, Zea Mays
gttccgtccaccgggcagcacaatgagcttcagctagcgctgggccgtgcaaaccctaaccgccgcccaccgccatggatcgggcggcatgcatagagttcgtggcgagcggcggagcgctagctagccacgcatgcatcagccaagcttggatggaatggagcagctgggacggttccagatgattaaatattatactccgtacaaattatacagcatcccaaatggattctttgtaaccgaacaagtcaggatgaatacggcgggcatcggagaaagtaaacgggacggcgggcagctgaggagtcaaacgagagagatcgagagaaagaaagggagggcatccaccagccgccggcgataagaggggaggagagagaggccagagaagaggaggagaagaagaagaaaatgagcagctgcctctgccttccgaaaaaaaaggaggggccagcgaaggagaagccgtccacagatacccccacctcgtcactccttcagaaccagaagccctcccaacctccacctcctccctccaaggcttcctccaagggcatggaccccaccgtcgagcgcttgaagagcgggttccagaagttcaagaccgaggtctatgacaagaagccggagctgttcgagcctctcaagtccggccagagccccaggtacatggtgttcgcctgctccgactcccgcgtgtgcccgtcggtgacactgggcctgcagcccggcgaggcattcaccgtccgcaacatcgcctccatggtcccaccctacgacaagatcaagtacgccggcaccgggtccgccatcgagtacgccgtgtgcgcgctcaaggtgcaggtcatcgtggtcattggccacagctgctgcggtggcatcagggcgctcctctccctcaaggacggcgcgcccgacaacttccacttcgtggaggactgggtcaggatcggcagccctgccaagaacaaggtgaagaaagagcacgcatcggtgccgttcgatgaccagtgctccatcctggagaaggaggccgtgaacgtgtcgctccagaacctcaagagctaccccttcgtcaaggaagggctggccggcgggacgctcaagctggttggcgcccactacgacttcgtcaaagggcagttcgtcacatgggagcctccccaggacgccatcgagcgcttgacgagcgggttccagcagttcaaggtcaatgtctatgacaagaagccggagcttttcgggcctctcaagtccggccaggcccccaagtacatggtgttcgcttgctccgactcccgtgtgtgcccatcggtgaccctgggcctgcagcccggcgaggccttcaccgttcgcaacatagccgccatggtcccaggctacgacaagaccaagtacaccggcatcgggtccgccatcgagtacgctgtgtgcgctctcaaggtggaggtcctcgtggtcattggccatagctgctgcggtggcatcagggcgctcctctccctccaggacggcgcacctgacaccttccacttcgtcgaggactgggttaagatcggcttcattgccaagatgaaggtaaagaaagagcacgcctcggtgccgttcgatgaccagtgctccattctcgagaaggaggccgtgaacgtgtccctggagaacctcaagacctaccccttcgtcaaggaagggcttgcaaatgggaccctcaagctgatcggcgcccactacgactttgtctcaggagagttcctcacatggaaaaagtgaaaaactagggctacggcaattctaccggcccgccgactcctgcatcatcataaatatatatactatactatactactacgtacctaccgatatgcacccgagcaatgtgaatgcgtcgagtactatatatctgttttctgcatctacatatatataccggatcaatcgcccaatgtgaatgtaataagcaatatcattttctaccacttttcattcctaacgctgagctttttatgtactatatcttatatgatgaataataatatgaccgccttgtgatctaaagacatcagctatatttttttcacaatattattacgaagagcttctta

SEQ ID NO: 37100 - DNA, 2305 bp, Zea Mays
gttccgtccaccgggcagcacaatgagcttcagctagcgctgggccgtgcaaaccctaaccgccgcccaccgccatggatcgggcggcatgcatagagttcgtggcgagcggcggagcgctaggtagagcttagacctcatcagatttgttctactctactgaatcctggttgcatctcatggatgcatgtttcttcttctgcttattattgtctgtgcttcaagctctgtcaatgctatatatatatatgctccgccactgctcgtcgctaattcgatcggcagcgcgggcatcggagcagctagccacgcatgcatcagccaagcttggatggaatggagcagctgggacggttccagatgattaaatattatactccgtacaaattatacagcatcccaaatggattctttgtaaccgaacaagtcaggatgaatacggcgggcatcggagaaagttgcgcgcgtcatcatgttgctagtaaacgggacggcgggcagctgaggagtcaaacgagagagatcgagagaaagaaagggagggcatccaccagccgccggcgataagaggggaggagagagaggccagagaagaggaggagaagaagaagaaaatgagcagctgcctctgccttccgaaaaaaaaggaggggccagcgaaggagaagccgtccacagatacccccacctcgtcactccttcagaaccagaagccctcccaacctccacctcctccctccaaggcttcctccaagggcatggaccccaccgtcgagcgcttgaagagcgggttccagaagttcaagaccgaggtctatgacaagaagccggagctgttcgagcctctcaagtccggccagagccccaggtacatggtgttcgcctgctccgactcccgcgtgtgcccgtcggtgacactgggcctgcagcccggcgaggcattcaccgtccgcaacatcgcctccatggtcccaccctacgacaagatcaagtacgccggcaccgggtccgccatcgagtacgccgtgtgcgcgctcaaggtgcaggtcatcgtggtcattggccacagctgctgcggtggcatcagggcgctcctctccctcaaggacggcgcgcccgacaacttccacttcgtggaggactgggtcaggatcggcagccctgccaagaacaaggtgaagaaagagcacgcatcggtgccgttcgatgaccagtgctccatcctggagaaggaggccgtgaacgtgtcgctccagaacctcaagagctaccccttcgtcaaggaagggctggccggcgggacgctcaagctggttggcgcccactacgacttcgtcaaagggcagttcgtcacatgggagcctccccaggacgccatcgagcgcttgacgagcgggttccagcagttcaaggtcaatgtctatgacaagaagccggagcttttcgggcctctcaagtccggccaggcccccaagtacatggtgttcgcttgctccgactcccgtgtgtgcccatcggtgaccctgggcctgcagcccggcgaggccttcaccgttcgcaacatagccgccatggtcccaggctacgacaagaccaagtacaccggcatcgggtccgccatcgagtacgctgtgtgcgctctcaaggtggaggtcctcgtggtcattggccatagctgctgcggtggcatcagggcgctcctctccctccaggacggcgcacctgacaccttccacttcgtcgaggactgggttaagatcggcttcattgccaagatgaaggtaaagaaagagcacgcctcggtgccgttcgatgaccagtgctccattctcgagaaggaggccgtgaacgtgtccctggagaacctcaagacctaccccttcgtcaaggaagggcttgcaaatgggaccctcaagctgatcggcgcccactacgactttgtctcaggagagttcctcacatggaaaaagtgaaaaactagggctacggcaattctaccggcccgccgactcctgcatcatcataaatatatatactatactatactactacgtacctaccgatatgcacccgagcaatgtgaatgcgtcgagtactatatatctgttttctgcatctacatatatataccggatcaatcgcccaatgtgaatgtaataagcaatatcattttctaccacttttcattcctaacgctgagctttttatgtactatatcttatatgatgaataataatatgaccgccttgtgatctaaagacatcagctatatttttttcacaatattattacgaagagcttctta

SEQ ID NO: 37101 - DNA, 2319 bp, Zea Mays
cctttgtgttgtcgccgtcacgtacgcgctgtctagctagcgatctcatgtgcttatgatgtcgccaaatgagcacatcctggcagcatgccaaggctcaagtgtgtcaaccttgcacgtacatgtacgtcgccggttccgttccgtccaccgggcagcacaatgagcttcagctagcgctgggccgtgcaaaccctaaccgccgcccaccgccatggatcgggcggcatgcatagagttcgtggcgagcggcggagcgctagctctgtcaatgctatatatatatatgctccgccactgctcgtcgctaattcgatcggcagcgcgggcatcggagcagctagccacgcatgcatcagccaagcttggatggaatggagcagctgggacggttccagatgattaaatattatactccgtacaaattatacagcatcccaaatggattctttgtaaccgaacaagtcaggatgaatacggcgggcatcggagaaagtaaacgggacggcgggcagctgaggagtcaaacgagagagatcgagagaaagaaagggagggcatccaccagccgccggcgataagaggggaggagagagaggccagagaagaggaggagaagaagaagaaaatgagcagctgcctctgccttccgaaaaaaaaggaggggccagcgaaggagaagccgtccacagatacccccacctcgtcactccttcagaaccagaagccctcccaacctccacctcctccctccaaggcttcctccaagggcatggaccccaccgtcgagcgcttgaagagcgggttccagaagttcaagaccgaggtctatgacaagaagccggagctgttcgagcctctcaagtccggccagagccccaggtacatggtgttcgcctgctccgactcccgcgtgtgcccgtcggtgacactgggcctgcagcccggcgaggcattcaccgtccgcaacatcgcctccatggtcccaccctacgacaagatcaagtacgccggcaccgggtccgccatcgagtacgccgtgtgcgcgctcaaggtgcaggtcatcgtggtcattggccacagctgctgcggtggcatcagggcgctcctctccctcaaggacggcgcgcccgacaacttccacttcgtggaggactgggtcaggatcggcagccctgccaagaacaaggtgaagaaagagcacgcatcggtgccgttcgatgaccagtgctccatcctggagaaggaggccgtgaacgtgtcgctccagaacctcaagagctaccccttcgtcaaggaagggctggccggcgggacgctcaagctggttggcgcccactacgacttcgtcaaagggcagttcgtcacatgggagcctccccaggacgccatcgagcgcttgacgagcgggttccagcagttcaaggtcaatgtctatgacaagaagccggagcttttcgggcctctcaagtccggccaggcccccaagtacatggtgttcgcttgctccgactcccgtgtgtgcccatcggtgaccctgggcctgcagcccggcgaggccttcaccgttcgcaacatagccgccatggtcccaggctacgacaagaccaagtacaccggcatcgggtccgccatcgagtacgctgtgtgcgctctcaaggtggaggtcctcgtggtcattggccatagctgctgcggtggcatcagggcgctcctctccctccaggacggcgcacctgacaccttccacttcgtcgaggactgggttaagatcggcttcattgccaagatgaaggtaaagaaagagcacgcctcggtgccgttcgatgaccagtgctccattctcgagaaggaggccgtgaacgtgtccctggagaacctcaagacctaccccttcgtcaaggaagggcttgcaaatgggaccctcaagctgatcggcgcccactacgactttgtctcaggagagttcctcacatggaaaaagtgaaaaactagggctacggcaattctaccggcccgccgactcctgcatcatcataaatatatatactatactatactactacgtacctaccgatatgcacccgagcaatgtgaatgcgtcgagtactatatatctgttttctgcatctacatatatataccggatcaatcgcccaatgtgaatgtaataagcaatatcattttctaccacttttcattcctaacgctgagctttttatgtactatatcttatatgatgaataataatatgaccgccttgtgatctaaagacatcagctatatttttttcacaatattattacgaagagcttctta

SEQ ID NO: 37102 - DNA, 2546 bp, Zea Mays
cgctcttcgccgtcagcccgtcactcctctcccccgtccggccgtcccaactcccaatcgtcgccgcgcttctccccgcacgattgccagaatctctaacgcccatggcccccgtctcccccgcggccgccgccgccgcggtctcggcctctcaccacggccgccacctcctcccgtcgtccccgcgccgcctccccaggccccgcccgcgctctcgtccgcaccttcgcctcgccgcctgccacgccgacaccctcctcccctcctcctcatcggaggcccgtgcggcgccaggccctgcggtggagccttcctccgaatctgccaccgactgcttcgtcgattggctgcgcgcgcgcggccttcccccgggcaaagtggacatccgggagcgcccggtgccctgcttgcgcgacggcaaggaccagccgctgcgctacgtctccgctgtcgtcgacctccaggcgggggatgtggcattcgaggtgtcaatgtccctcgtcgttacgcttgagcgggtgctcggggatgaatcaatcgctgagttgttaacaaataacaagttatctgagctggcatgcttggcattgtatctcatgtatgagaaaaaacaaggaaaggattcattttggtacccctacattaaggaacttgaccgacatcgaggaagggggcagctagctgttgaatcaccacttttatggactgaaagtgaactggattaccttactggaagccccttgaaggatgaagttgttgctagagatgaggcaataaggagagagtataatgagcttgacacattgtggtttatggcaggttcactatttcagcaatatccttttgacatacctactgaggcttttccgtttgaaatattcaagcaggcttttgttgcagtacagtcttgtgtggttcatttgcagaaagttagtctagctcgaaggttcgcgcttgttcccttgggaccgccactactgacttacaggagcaactgcaaagcgatgttgacagctgatggtgattctgttcgattggtggtggatcggccatataaagctggagagccaataatcatctggtgtgggccccaaacaaactccaggcttgttctgaattatggttttgttgatgaagataatccctttgatcgtgtagcaattgaggcatctttaaatacagaagatcctcaataccaagaaaagagaatggttgctcagaggaatggaaaacttgctatccaaaattttaatgtctatgtaggtaaagagaaacaaactgttgcagaaatgctgccttatttgagactaggttacatatcaaatcctgatgaaatgcagtctatactctcttctgaaggagatacatgtccagttagtccatgtacagagcgagctgtacttgatcaacttgttggttacctggaatctcgattggctggatatccaacaactttggatgaagatgaagctatgttggcagatggcaatttggaaccaaagaaggaagttgctactaggcttgtaaggttggagaagaagatgctccatgcctgtctgcaggccacaaatgagtttataaacgacttgccagaccacacagtgtcaccttgccctgctccatatgcccctgaattgaaatgaggaaatcgcatttcttgctgttcgttcaagttaataaggatatgattggtctccagcgggatatggctatggtctcgaaagggatgtggtcatgttgtagttagttgcgatgcacagaaggtatcacttttgttaatctagttggtgttgtattaacaacctccttttgctgataatcttgggcaggaatgccaatcaacaatcatgattcatgtacatgattgctgactgatcactttttttttcacgagatggtcagtagttattgttgtagttgtctttaggattacttacagaaaccgaatttgggcagaactggattcaatcggccatgctgctatgccagttttcattctagattgggcactactccttctgaggcattgtatggctacagctatttcgggttggaacttggaagcgaatacaaagtagcgtagagaagtttcttagcattgatttacccgatctgttagaggcttttgaggtgtctaaataggtatttgtaaaaaaattgtggagtcgtcttgtcgtaaagagacatctctagctcgtaactcaagtagtcaagtagtaacagatcacagatgtcttcacttctcttactaatacatcgtctgctatattgattcgatgctttatagacacatttacttctatatttattagtagactatatttatatacactattatataatagagtcctttggggctagtttgagaaccctatttttctaagggatttttatttttccaagggaaaataaactaattttcctcggaaaaaattagaatcctttagaaaaatggtgttcccaaactagactttagttgttttttatacttggagaactgttttagtatatctccattggacatgtccttgagagtgactccagcg

SEQ ID NO: 37103 - DNA, 2636 bp, Zea Mays
cgctcttcgccgtcagcccgtcactcctctcccccgtccggccgtcccaactcccaatcgtcgccgcgcttctccccgcacgattgccagaatctctaacgcccatggcccccgtctcccccgcggccgccgccgccgcggtctcggcctctcaccacggccgccacctcctcccgtcgtccccgcgccgcctccccaggccccgcccgcgctctcgtccgcaccttcgcctcgccgcctgccacgccgacaccctcctcccctcctcctcatcggaggcccgtgcggcgccaggccctgcggtggagccttcctccgaatctgccaccgactgcttcgtcgattggctgcgcgcgcgcggccttcccccgggcaaagtggacatccgggagcgcccggtgccctgcttgcgcgacggcaaggaccagccgctgcgctacgtctccgctgtcgtcgacctccaggcgggggatgtggcattcgaggtgtcaatgtccctcgtcgttacgcttgagcgggtgctcggggatgaatcaatcgctgagttgttaacaaataacaagttatctgagctggcatgcttggcattgtatctcatgtatgagaaaaaacaaggaaaggattcattttggtacccctacattaaggaacttgaccgacatcgaggaagggggcagctagctgttgaatcaccacttttatggactgaaagtgaactggattaccttactggaagccccttgaaggatgaagttgttgctagagatgaggcaataaggagagagtataatgagcttgacacattgtggtttatggcaggttcactatttcagcaatatccttttgacatacctactgaggcttttccgtttgaaatattcaagcaggcttttgttgcagtacagtcttgtgtggttcatttgcagaaagttagtctagctcgaaggttcgcgcttgttcccttgggaccgccactactgacttacaggagcaactgcaaagcgatgttgacagctgatggtgattctgttcgattggtggtggatcggccatataaagctggagagccaataatcatctggtgtgggccccaaacaaactccaggcttgttctgaattatggttttgttgatgaagataatccctttgatcgtgtagcaattgaggcatctttaaatacagaagatcctcaataccaagaaaagagaatggttgctcagaggaatggaaaacttgctatccaaaattttaatgtctatgtaggtaaagagaaacaaactgttgcagaaatgctgccttatttgagactaggttacatatcaaatcctgatgaaatgcagtctatactctcttctgaaggagatacatgtccagttagtccatgtacagagcgagctgtacttgatcaacttgttggttacctggaatctcgattggctggatatccaacaactttggatgaagatgaagctatgttggcagatggcaatttggaaccaaagaaggaagttgctactaggcttgtaaggttggagaagaagatgctccatgcctgtctgcaggccacaaatgagtttataaacgacttgccagaccacacagtgtcaccttgccctgctccatatgcccctgaattgaaatgagaccatatatgctgcaaggtggatatactatttgaaagaatctgctgcttgtttcctttagagattacagatcttaattgcatgctagaaggaaatcgcatttcttgctgttcgttcaagttaataaggatatgattggtctccagcgggatatggctatggtctcgaaagggatgtggtcatgttgtagttagttgcgatgcacagaaggtatcacttttgttaatctagttggtgttgtattaacaacctccttttgctgataatcttgggcaggaatgccaatcaacaatcatgattcatgtacatgattgctgactgatcactttttttttcacgagatggtcagtagttattgttgtagttgtctttaggattacttacagaaaccgaatttgggcagaactggattcaatcggccatgctgctatgccagttttcattctagattgggcactactccttctgaggcattgtatggctacagctatttcgggttggaacttggaagcgaatacaaagtagcgtagagaagtttcttagcattgatttacccgatctgttagaggcttttgaggtgtctaaataggtatttgtaaaaaaattgtggagtcgtcttgtcgtaaagagacatctctagctcgtaactcaagtagtcaagtagtaacagatcacagatgtcttcacttctcttactaatacatcgtctgctatattgattcgatgctttatagacacatttacttctatatttattagtagactatatttatatacactattatataatagagtcctttggggctagtttgagaaccctatttttctaagggatttttatttttccaagggaaaataaactaattttcctcggaaaaaattagaatcctttagaaaaatggtgttcccaaactagactttagttgttttttatacttggagaactgttttagtatatctccattggacatgtccttgagagtgactccagcg

SEQ ID NO: 37104 - DNA, 2648 bp, Zea Mays
caaacctctgccgctcttcgccgtcagcccgtcactcctctcccccgtccggccgtcccaactcccaatcgtcgccgcgcttctccccgcacgattgccagaatctctaacgcccatggcccccgtctcccccgcggccgccgccgccgcggtctcggcctctcaccacggccgccacctcctcccgtcgtccccgcgccgcctccccaggccccgcccgcgctctcgtccgcaccttcgcctcgccgcctgccacgccgacaccctcctcccctcctcctcatcggaggcccgtgcggcgccaggccctgcggtggagccttcctccgaatctgccaccgactgcttcgtcgattggctgcgcgcgcgcggccttcccccgggcaaagtggacatccgggagcgcccggtgccctgcttgcgcgacggcaaggaccagccgctgcgctacgtctccgctgtcgtcgacctccagctgagttgttaacaaataacaagttatctgagctggcatgcttggcattgtatctcatgtatgagaaaaaacaaggaaaggattcattttggtacccctacattaaggaacttgaccgacatcgaggaagggggcagctagctgttgaatcaccacttttatggactgaaagtgaactggattaccttactggaagccccttgaaggatgaagttgttgctagagatgaggcaataaggagagagtataatgagcttgacacattgtggtttatggcaggttcactatttcagcaatatccttttgacatacctactgaggcttttccgtttgaaatattcaagcaggcttttgttgcagtacagtcttgtgtggttcatttgcagaaagttagtctagctcgaaggttcgcgcttgttcccttgggaccgccactactgacttacaggagcaactgcaaagcgatgttgacagctgatggtgattctgttcgattggtggtggatcggccatataaagctggagagccaataatcatctggtgtgggccccaaacaaactccaggcttgttctgaattatggttttgttgatgaagataatccctttgatcgtgtagcaattgaggcatctttaaatacagaagatcctcaataccaagaaaagagaatggttgctcagaggaatggaaaacttgctatccaaaattttaatgtctatgtaggtaaagagaaacaaactgttgcagaaatgctgccttatttgagactaggttacatatcaaatcctgatgaaatgcagtctatactctcttctgaaggagatacatgtccagttagtccatgtacagagcgagctgtacttgatcaacttgttggttacctggaatctcgattggctggatatccaacaactttggatgaagatgaagctatgttggcagatggcaatttggaaccaaagaaggaagttgctactaggcttgtaaggttggagaagaagatgctccatgcctgtctgcaggccacaaatgagtttataaacgacttgccagaccacacagtgtcaccttgccctgctccatatgcccctgaattgaaatgagattgcatgttttcttttcccagatggtcataccattaagaatgtcaaaatttgatcaatttgcatatctatatgaagaccatatatgctgcaaggtggatatactatttgaaagaatctgctgcttgtttcctttagagattacagatcttaattgcatgctagaaggaaatcgcatttcttgctgttcgttcaagttaataaggatatgattggtctccagcgggatatggctatggtctcgaaagggatgtggtcatgttgtagttagttgcgatgcacagaaggtatcacttttgttaatctagttggtgttgtattaacaacctccttttgctgataatcttgggcaggaatgccaatcaacaatcatgattcatgtacatgattgctgactgatcactttttttttcacgagatggtcagtagttattgttgtagttgtctttaggattacttacagaaaccgaatttgggcagaactggattcaatcggccatgctgctatgccagttttcattctagattgggcactactccttctgaggcattgtatggctacagctatttcgggttggaacttggaagcgaatacaaagtagcgtagagaagtttcttagcattgatttacccgatctgttagaggcttttgaggtgtctaaataggtatttgtaaaaaaattgtggagtcgtcttgtcgtaaagagacatctctagctcgtaactcaagtagtcaagtagtaacagatcacagatgtcttcacttctcttactaatacatcgtctgctatattgattcgatgctttatagacacatttacttctatatttattagtagactatatttatatacactattatataatagagtcctttggggctagtttgagaaccctatttttctaagggatttttatttttccaagggaaaataaactaattttcctcggaaaaaattagaatcctttagaaaaatggtgttcccaaactagactttagttgttttttatacttggagaactgttttagtatatctccattggacatgtccttgagagtgactccagcg

SEQ ID NO: 37105 - DNA, 2670 bp, Zea Mays
caaacctctgccgctcttcgccgtcagcccgtcactcctctcccccgtccggccgtcccaactcccaatcgtcgccgcgcttctccccgcacgattgccagaatctctaacgcccatggcccccgtctcccccgcggccgccgccgccgcggtctcggcctctcaccacggccgccacctcctcccgtcgtccccgcgccgcctccccaggccccgcccgcgctctcgtccgcaccttcgcctcgccgcctgccacgccgacaccctcctcccctcctcctcatcggaggcccgtgcggcgccaggccctgcggtggagccttcctccgaatctgccaccgactgcttcgtcgattggctgcgcgcgcgcggccttcccccgggcaaagtggacatccgggagcgcccggtgccctgcttgcgcgacggcaaggaccagccgctgcgctacgtctccgctgtcgtcgacctccaggcgggggatgtggcattcgaggtgtcaatgtccctcgtcgttacgcttgagcgggtgctcggggatgaatcaatcgctgagttgttaacaaataacaagttatctgagctggcatgcttggcattgtatctcatgtatgagaaaaaacaaggaaaggattcattttggtacccctacattaaggaacttgaccgacatcgaggaagggggcagctagctgttgaatcaccacttttatggactgaaagtgaactggattaccttactggaagccccttgaaggatgaagttgttgctagagatgaggcaataaggagagagtataatgagcttgacacattgtggtttatggcaggttcactatttcaggcttttgttgcagtacagtcttgtgtggttcatttgcagaaagttagtctagctcgaaggttcgcgcttgttcccttgggaccgccactactgacttacaggagcaactgcaaagcgatgttgacagctgatggtgattctgttcgattggtggtggatcggccatataaagctggagagccaataatcatctggtgtgggccccaaacaaactccaggcttgttctgaattatggttttgttgatgaagataatccctttgatcgtgtagcaattgaggcatctttaaatacagaagatcctcaataccaagaaaagagaatggttgctcagaggaatggaaaacttgctatccaaaattttaatgtctatgtaggtaaagagaaacaaactgttgcagaaatgctgccttatttgagactaggttacatatcaaatcctgatgaaatgcagtctatactctcttctgaaggagatacatgtccagttagtccatgtacagagcgagctgtacttgatcaacttgttggttacctggaatctcgattggctggatatccaacaactttggatgaagatgaagctatgttggcagatggcaatttggaaccaaagaaggaagttgctactaggcttgtaaggttggagaagaagatgctccatgcctgtctgcaggccacaaatgagtttataaacgacttgccagaccacacagtgtcaccttgccctgctccatatgcccctgaattgaaatgagattgcatgttttcttttcccagatggtcataccattaagaatgtcaaaatttgatcaatttgcatatctatatgaagaccatatatgctgcaaggtggatatactatttgaaagaatctgctgcttgtttcctttagagattacagatcttaattgcatgctagaaggaaatcgcatttcttgctgttcgttcaagttaataaggatatgattggtctccagcgggatatggctatggtctcgaaagggatgtggtcatgttgtagttagttgcgatgcacagaaggtatcacttttgttaatctagttggtgttgtattaacaacctccttttgctgataatcttgggcaggaatgccaatcaacaatcatgattcatgtacatgattgctgactgatcactttttttttcacgagatggtcagtagttattgttgtagttgtctttaggattacttacagaaaccgaatttgggcagaactggattcaatcggccatgctgctatgccagttttcattctagattgggcactactccttctgaggcattgtatggctacagctatttcgggttggaacttggaagcgaatacaaagtagcgtagagaagtttcttagcattgatttacccgatctgttagaggcttttgaggtgtctaaataggtatttgtaaaaaaattgtggagtcgtcttgtcgtaaagagacatctctagctcgtaactcaagtagtcaagtagtaacagatcacagatgtcttcacttctcttactaatacatcgtctgctatattgattcgatgctttatagacacatttacttctatatttattagtagactatatttatatacactattatataatagagtcctttggggctagtttgagaaccctatttttctaagggatttttatttttccaagggaaaataaactaattttcctcggaaaaaattagaatcctttagaaaaatggtgttcccaaactagactttagttgttttttatacttggagaactgttttagtatatctccattggacatgtccttgagagtgactccagcg

SEQ ID NO: 37106 - DNA, 2812 bp, Zea Mays
aaactattttgagacgaaaatgatgtgaaacctacggcataaatatccgtccacctggcccaatccgcactctgctcatctacaccaccaaacctctgccgctcttcgccgtcagcccgtcactcctctcccccgtccggccgtcccaactcccaatcgtcgccgcgcttctccccgcacgattgccagaatctctaacgcccatggcccccgtctcccccgcggccgccgccgccgcggtctcggcctctcaccacggccgccacctcctcccgtcgtccccgcgccgcctccccaggccccgcccgcgctctcgtccgcaccttcgcctcgccgcctgccacgccgacaccctcctcccctcctcctcatcggaggcccgtgcggcgccaggccctgcggtggagccttcctccgaatctgccaccgactgcttcgtcgattggctgcgcgcgcgcggccttcccccgggcaaagtggacatccgggagcgcccggtgccctgcttgcgcgacggcaaggaccagccgctgcgctacgtctccgctgtcgtcgacctccaggcgggggatgtggcattcgaggtgtcaatgtccctcgtcgttacgcttgagcgggtgctcggggatgaatcaatcgctgagttgttaacaaataacaagttatctgagctggcatgcttggcattgtatctcatgtatgagaaaaaacaaggaaaggattcattttggtacccctacattaaggaacttgaccgacatcgaggaagggggcagctagctgttgaatcaccacttttatggactgaaagtgaactggattaccttactggaagccccttgaaggatgaagttgttgctagagatgaggcaataaggagagagtataatgagcttgacacattgtggtttatggcaggttcactatttcagcaatatccttttgacatacctactgaggcttttccgtttgaaatattcaagcaggcttttgttgcagtacagtcttgtgtggttcatttgcagaaagttagtctagctcgaaggttcgcgcttgttcccttgggaccgccactactgacttacaggagcaactgcaaagcgatgttgacagctgatggtgattctgttcgattggtggtggatcggccatataaagctggagagccaataatcatctggtgtgggccccaaacaaactccaggcttgttctgaattatggttttgttgatgaagataatccctttgatcgtgtagcaattgaggcatctttaaatacagaagatcctcaataccaagaaaagagaatggttgctcagaggaatggaaaacttgctatccaaaattttaatgtctatgtaggtaaagagaaacaaactgttgcagaaatgctgccttatttgagactaggttacatatcaaatcctgatgaaatgcagtctatactctcttctgaaggagatacatgtccagttagtccatgtacagagcgagctgtacttgatcaacttgttggttacctggaatctcgattggctggatatccaacaactttggatgaagatgaagctatgttggcagatggcaatttggaaccaaagaaggaagttgctactaggcttgtaaggttggagaagaagatgctccatgcctgtctgcaggccacaaatgagtttataaacgacttgccagaccacacagtgtcaccttgccctgctccatatgcccctgaattgaaatgagattgcatgttttcttttcccagatggtcataccattaagaatgtcaaaatttgatcaatttgcatatctatatgaagaccatatatgctgcaaggtggatatactatttgaaagaatctgctgcttgtttcctttagagattacagatcttaattgcatgctagaaggaaatcgcatttcttgctgttcgttcaagttaataaggatatgattggtctccagcgggatatggctatggtctcgaaagggatgtggtcatgttgtagttagttgcgatgcacagaaggtatcacttttgttaatctagttggtgttgtattaacaacctccttttgctgataatcttgggcaggaatgccaatcaacaatcatgattcatgtacatgattgctgactgatcactttttttttcacgagatggtcagtagttattgttgtagttgtctttaggattacttacagaaaccgaatttgggcagaactggattcaatcggccatgctgctatgccagttttcattctagattgggcactactccttctgaggcattgtatggctacagctatttcgggttggaacttggaagcgaatacaaagtagcgtagagaagtttcttagcattgatttacccgatctgttagaggcttttgaggtgtctaaataggtatttgtaaaaaaattgtggagtcgtcttgtcgtaaagagacatctctagctcgtaactcaagtagtcaagtagtaacagatcacagatgtcttcacttctcttactaatacatcgtctgctatattgattcgatgctttatagacacatttacttctatatttattagtagactatatttatatacactattatataatagagtcctttggggctagtttgagaaccctatttttctaagggatttttatttttccaagggaaaataaactaattttcctcggaaaaaattagaatcctttagaaaaatggtgttcccaaactagactttagttgttttttatacttggagaactgttttagtatatctccattggacatgtccttgagagtgactccagcg

SEQ ID NO: 37107 - DNA, 2203 bp, Zea Mays
cgctcttcgccgtcagcccgtcactcctctcccccgtccggccgtcccaactcccaatcgtcgccgcgcttctccccgcacgattgccagaatctctaacgcccatggcccccgtctcccccgcggccgccgccgccgcggtctcggcctctcaccacggccgccacctcctcccgtcgtccccgcgccgcctccccaggccccgcccgcgctctcgtccgcaccttcgcctcgccgcctgccacgccgacaccctcctcccctcctcctcatcggaggcccgtgcggcgccaggccctgcggtggagccttcctccgaatctgccaccgactgcttcgtcgattggctgcgcgcgcgcggccttcccccgggcaaagtggacatccgggagcgcccggtgccctgcttgcgcgacggcaaggaccagccgctgcgctacgtctccgctgtcgtcgacctccaggcgggggatgtggcattcgaggtgtcaatgtccctcgtcgttacgcttgagcgggtgctcggggatgaatcaatcgctgagttgttaacaaataacaagttatctgagctggcatgcttggcattgtatctcatgtatgagaaaaaacaaggaaaggattcattttggtacccctacattaaggaacttgaccgacatcgaggaagggggcagctagctgttgaatcaccacttttatggactgaaagtgaactggattaccttactggaagccccttgaaggatgaagttgttgctagagatgaggcaataaggagagagtataatgagcttgacacattgtggtttatggcaggttcactatttcagcaatatccttttgacatacctactgaggcttttccgtttgaaatattcaagcaggcttttgttgcagtacagtcttgtgtggttcatttgcaggagatttgtgcatccttaggctatctccagcagatctcctatcagtctatcacatcccctatcttatcctctatttcaaacttctttctgtaaacagtatcaaatagtgacatctacagttccgcgtcccctattttacacactctactggaaacaatcttatattaagaaaatgggtgtaagaacccaacaacacttacaccacacacacacatcacaacacaacgctacagcagacttaaacacagccgcgcctttgggctgaaggtctacccacagactcaaaaactattatctgggagggggtggacaagactacaagagggatagtcctcgagcccttgtcatggccgccatccggcattcctcagccaagactaaagccccagccacacttgcgatggttccaaagaatccaaaccaagccccaagaatgattagggaattaacacctcgcctcaccaactcagaagtagcattactagctctctctcaccaaaattccctagcatccacccaaggaaggagttttcagttggttgtggggataaggcctgaagtccgacctgtcttagcaaaatttctgtagcaccgagagccggaggctcccgcttgagtggggcatgaggaagggataaaaaaggcaagctttccccctcaaatgcagagaggctgcatcaaacccgcgacctagtgattcagtgagtcagctctcatcactgaaccaggcccactcttcaaccaactaagattgctaattcaggcaaaattttggcaaacttatactaggataaaatcagaaataacgagagaaatgtgaagttaaggtttttttcctcaaacatgcaagagaactacacatctttattaaagataaaaggagggggaaagaaatcctgtacatttgcctccacgaacttcaaagatagtagccaccacaaagaaggctttcacctggtcaggaacaagaactgggagatgagccaaggacggtttggctctttttttgcagccatatccatcttattcctgtgtgaaattcgattcttagaatttgttctgcagttagcatgaagtgttgaaaaatttagtgctgaagtgttcaacattgccatactcaccgcttgcaaaaacctgacaatgttttcttgccaccaaacgtggttcctctggattttgtagtttttgttcttttgcgcatattctgtttagactttcagattctatagaatgcaaatatagatcatttagtcttgcccccaggaattatggtccag

SEQ ID NO: 37108 - DNA, 768 bp, Zea Mays
gctgcgccatcacaaagaggcacggctccacactgccaagatcctcagcccccttcccctgctcccccgcaaatgatgtcgtgccgtcaggatatattcacagagttggtcgtaccgcacatgttgaggaaggtgaccaatgttactctaacagaatacgagtttaatcagaagaatgtgccacatttgtaattgaaaacattgttggtgattacttcccgccgaagaagcctacagattctacgttttggcatacaactttcacgctaagaaagacatcttttatatccatcaacttcaacttgatctacagactatttgtgttgtaatcaaatgacatcttcggaaccttggcgacgcttcgaagaatcactggcctatacaaaaacgaggtgaacttggttcgttcaatgaaaaggatccactggaaatgaatgggaagactggggtagcatcttcattagccgaaaggaattagtatccactagcataattcgaagaacgaacaaaaaaaggtgtcactgcttaggtaggaggatggatggatgtggtccaatctatgtgtgatatcttgcatgcaaatatatcacagcataaagggagcttgaactgcatagtgatgtgaagttcctctgcattccttaggtgtgattgttcgtaactatctataatcatttactacacttcacatcttgtgccataatttttgccaagagaataacaattgtacttggttgctgtgcgagttttcaaaaaattcagattttt

SEQ ID NO: 37109 - DNA, 781 bp, Zea Mays
gggagctgcgccatcacaaagaggcacggctccacactgccaagatcctcagcccccttcccctgctcccccgcaaatgatgtcgtgccgtcaggatatattcacagagttggtcgtaccgcacatgttgaggaaggcaaatgaagtgaccaatgttactctaacagaatacgagtttaatcagaagaatgtgccacatttgtaattgaaaacattgttggtgattacttcccgccgaagaagcctacagattctacgttttggcatacaactttcacgctaagaaagacatcttttatatccatcaacttcaacttgatctacagactatttgtgttgtaatcaaatgacatcttcggaaccttggcgacgcttcgaagaatcactggcctatacaaaaacgaggtgaacttggttcgttcaatgaaaaggatccactggaaatgaatgggaagactggggtagcatcttcattagccgaaaggaattagtatccactagcataattcgaagaacgaacaaaaaaaggtgtcactgcttaggtaggaggatggatggatgtggtccaatctatgtgtgatatcttgcatgcaaatatatcacagcataaagggagcttgaactgcatagtgatgtgaagttcctctgcattccttaggtgtgattgttcgtaactatctataatcatttactacacttcacatcttgtgccataatttttgccaagagaataacaattgtacttggttgctgtgcgagttttcaaaaaattcagattttt

SEQ ID NO: 37110 - DNA, 1201 bp, Zea Mays
gtctgtaatttcttaacataccgaaaaatgcacaattgttcatccgcttgtagattagtcttggacattcaggcccacctggctctggaaagggtactcagtctccccttattaaggatgaatattgcctgtgccatttagccactggtgatatgttgagggctgctgtggcagccaagacaactctaggtatcaaagctaaagaagctatggataagggagagcttgtttcagataacttggttgtggggattattgatgaagctatgaagaaaccgtcatgccagaaaggtttcattcttgatggcttccctagaactgtcactcaagcacagaagcttgatgagatgttggcaaagcaaggtgctaatgttgacaaggtcctaaactttgcaattgatgatgctatattggaagaacggattactggccgttggatccacccacccagtggtaggacttaccatacaaaatttgcacctccaaagtctccaggagttgatgatgtaactggagagccattgattcaaaggagggatgacactgccgaggttttgaagtcaaggcttgaagccttccacaaacaaactgagcctgtgattgattattactctaagaagggcttggtggtaaatctgcctgcggagaaaccaccaaaggaagtgactgctgaggtgctgaaagccctctcatgatgaaatgcccctttttctgagtttattcaggttaagcatgatatgtaccgaaatccctttgtctgggtttcttcacaccagcatcatgcagtttcctttttgtgcgattacaccattttatcatagctttgacaagctcggtaactgtctgaataatctgttttgaatgagagaagttgtttttcagtaccaatactgagatgattacatcaattcacgtttgggaaattttccttactaaacttgttccagttcttacatcaatgctatgttactggctatggtaataatcaattaatcagcaaaaaccctgatattctgatcgcccagcaccttcgtctgttgagtggtattgatatgccacgaggtaaaaaaagaacgcttttcatgggctgggcttggacggacggaccaatgcacgacccatgtgaaaaataattaataaaatatttaatcaattagatgtgctgctttaagatccgtgcactttttttttaaaaaaaaga

SEQ ID NO: 37111 - DNA, 1499 bp, Zea Mays
aacgtttggctcaccaagagaaaacgacacgggtgacgcgcctctcagctaacttgacatgaatcacacctaaaccattttgtcgtcgtcgttccagctgcagtccagagttggaacccaagcgcacgcagcaccgtcgtcgaactcttcccttttcggcggcattggagatggcggcgaatctagaggacgtgccgtctctggatctgatgcacgaactgctccgtcggatgaagtgcagctccaagcccgacaagcacctcatcctcatcggtacgggaggccctctccttcttcctgctcctcgccgccggcggcggctccgcgctttcctggagccgccgggagggaaaggctgcgtcttgccgcggcccacctggctctggaaagggtactcagtctccccttattaaggatgaatattgcctgtgccatttagccactggtgatatgttgagggctgctgtggcagccaagacaactctaggtatcaaagctaaagaagctatggataagggagagcttgtttcagataacttggttgtggggattattgatgaagctatgaagaaaccgtcatgccagaaaggtttcattcttgatggcttccctagaactgtcactcaagcacagaagcttgatgagatgttggcaaagcaaggtgctaatgttgacaaggtcctaaactttgcaattgatgatgctatattggaagaacggattactggccgttggatccacccacccagtggtaggacttaccatacaaaatttgcacctccaaagtctccaggagttgatgatgtaactggagagccattgattcaaaggagggatgacactgccgaggttttgaagtcaaggcttgaagccttccacaaacaaactgagcctgtgattgattattactctaagaagggcttggtggtaaatctgcctgcggagaaaccaccaaaggaagtgactgctgaggtgctgaaagccctctcatgatgaaatgcccctttttctgagtttattcaggttaagcatgatatgtaccgaaatccctttgtctgggtttcttcacaccagcatcatgcagtttcctttttgtgcgattacaccattttatcatagctttgacaagctcggtaactgtctgaataatctgttttgaatgagagaagttgtttttcagtaccaatactgagatgattacatcaattcacgtttgggaaattttccttactaaacttgttccagttcttacatcaatgctatgttactggctatggtaataatcaattaatcagcaaaaaccctgatattctgatcgcccagcaccttcgtctgttgagtggtattgatatgccacgaggtaaaaaaagaacgcttttcatgggctgggcttggacggacggaccaatgcacgacccatgtgaaaaataattaataaaatatttaatcaattagatgtgctgctttaagatccgtgcactttttttttaaaaaaaaga

SEQ ID NO: 37112 - DNA, 1349 bp, Zea Mays
aacgtttggctcaccaagagaaaacgacacgggtgacgcgcctctcagctaacttgacatgaatcacacctaaaccattttgtcgtcgtcgttccagctgcagtccagagttggaacccaagcgcacgcagcaccgtcgtcgaactcttcccttttcggcggcattggagatggcggcgaatctagaggacgtgccgtctctggatctgatgcacgaactgctccgtcggatgaagtgcagctccaagcccgacaagcacctcatcctcatcggcccacctggctctggaaagggtactcagtctccccttattaaggatgaatattgcctgtgccatttagccactggtgatatgttgagggctgctgtggcagccaagacaactctaggtatcaaagctaaagaagctatggataagggagagcttgtttcagataacttggttgtggggattattgatgaagctatgaagaaaccgtcatgccagaaaggtttcattcttgatggcttccctagaactgtcactcaagcacagaagcttgatgagatgttggcaaagcaaggtgctaatgttgacaaggtcctaaactttgcaattgatgatgctatattggaagaacggattactggccgttggatccacccacccagtggtaactggagagccattgattcaaaggagggatgacactgccgaggttttgaagtcaaggcttgaagccttccacaaacaaactgagcctgtgattgattattactctaagaagggcttggtggtaaatctgcctgcggagaaaccaccaaaggaagtgactgctgaggtgctgaaagccctctcatgatgaaatgcccctttttctgagtttattcaggttaagcatgatatgtaccgaaatccctttgtctgggtttcttcacaccagcatcatgcagtttcctttttgtgcgattacaccattttatcatagctttgacaagctcggtaactgtctgaataatctgttttgaatgagagaagttgtttttcagtaccaatactgagatgattacatcaattcacgtttgggaaattttccttactaaacttgttccagttcttacatcaatgctatgttactggctatggtaataatcaattaatcagcaaaaaccctgatattctgatcgcccagcaccttcgtctgttgagtggtattgatatgccacgaggtaaaaaaagaacgcttttcatgggctgggcttggacggacggaccaatgcacgacccatgtgaaaaataattaataaaatatttaatcaattagatgtgctgctttaagatccgtgcactttttttttaaaaaaaaga

SEQ ID NO: 37113 - DNA, 1494 bp, Zea Mays
caacgtttggctcaccaagagaaaacgacacgggtgacgcgcctctcagctaacttgacatgaatcacacctaaaccattttgtcgtcgtcgttccagctgcagtccagagttggaacccaagcgcacgcagcaccgtcgtcgaactcttcccttttcggcggcattggagatggcggcgaatctagaggacgtgccgtctctggatctgatgcacgaactgctccgtcggatgaagtgcagctccaagcccgacaagcacctcatcctcatcggcccacctggctctggaaagggtactcagtctccccttattaaggatgaatattgcctgtgccatttagccactggtgatatgttgagggctgctgtggcagccaagacaactctaggtatcaaagctaaagaagctatggataagggagagcttgtttcagataacttggttgtggggattattgatgaagctatgaagaaaccgtcatgccagaaaggtttcattcttgatggcttccctagaactgtcactcaagcacagaagcttgatgagatgttggcaaagcaaggtgctaatgttgacaaggtcctaaactttgcaattgatgatgctatattggaagaacggattactggccgttggatccacccacccagtggtaggacttaccatacaaaatttgcacctccaaagtctccaggagttgatgatgttgtattggtgggaaattgggggtcggggcgtggtggttcgtcgcctggaagatggtccaggcgccgtggctacccgagaggagaggcaggtaactggagagccattgattcaaaggagggatgacactgccgaggttttgaagtcaaggcttgaagccttccacaaacaaactgagcctgtgattgattattactctaagaagggcttggtggtaaatctgcctgcggagaaaccaccaaaggaagtgactgctgaggtgctgaaagccctctcatgatgaaatgcccctttttctgagtttattcaggttaagcatgatatgtaccgaaatccctttgtctgggtttcttcacaccagcatcatgcagtttcctttttgtgcgattacaccattttatcatagctttgacaagctcggtaactgtctgaataatctgttttgaatgagagaagttgtttttcagtaccaatactgagatgattacatcaattcacgtttgggaaattttccttactaaacttgttccagttcttacatcaatgctatgttactggctatggtaataatcaattaatcagcaaaaaccctgatattctgatcgcccagcaccttcgtctgttgagtggtattgatatgccacgaggtaaaaaaagaacgcttttcatgggctgggcttggacggacggaccaatgcacgacccatgtgaaaaataattaataaaatatttaatcaattagatgtgctgctttaagatccgtgcactttttttttaaaaaaaaga

SEQ ID NO: 37114 - DNA, 1360 bp, Zea Mays
attaggacaacgtttggctcaccaagagaaaacgacacgggtgacgcgcctctcagctaacttgacatgaatcacacctaaaccattttgtcgtcgtcgttccagctgcagtccagagttggaacccaagcgcacgcagcaccgtcgtcgaactcttcccttttcggcggcattggagatggcggcgaatctagaggacgtgccgtctctggatctgatgcacgaactgctccgtcggatgaagtgcagctccaagcccgacaagcacctcatcctcatcggcccacctggctctggaaagggtactcagtctccccttattaaggatgaatattgcctgtgccatttagccactggtgatatgttgagggctgctgggagagcttgtttcagataacttggttgtggggattattgatgaagctatgaagaaaccgtcatgccagaaaggtttcattcttgatggcttccctagaactgtcactcaagcacagaagcttgatgagatgttggcaaagcaaggtgctaatgttgacaaggtcctaaactttgcaattgatgatgctatattggaagaacggattactggccgttggatccacccacccagtggtaggacttaccatacaaaatttgcacctccaaagtctccaggagttgatgatgtaactggagagccattgattcaaaggagggatgacactgccgaggttttgaagtcaaggcttgaagccttccacaaacaaactgagcctgtgattgattattactctaagaagggcttggtggtaaatctgcctgcggagaaaccaccaaaggaagtgactgctgaggtgctgaaagccctctcatgatgaaatgcccctttttctgagtttattcaggttaagcatgatatgtaccgaaatccctttgtctgggtttcttcacaccagcatcatgcagtttcctttttgtgcgattacaccattttatcatagctttgacaagctcggtaactgtctgaataatctgttttgaatgagagaagttgtttttcagtaccaatactgagatgattacatcaattcacgtttgggaaattttccttactaaacttgttccagttcttacatcaatgctatgttactggctatggtaataatcaattaatcagcaaaaaccctgatattctgatcgcccagcaccttcgtctgttgagtggtattgatatgccacgaggtaaaaaaagaacgcttttcatgggctgggcttggacggacggaccaatgcacgacccatgtgaaaaataattaataaaatatttaatcaattagatgtgctgctttaagatccgtgcactttttttttaaaaaaaaga

SEQ ID NO: 37115 - DNA, 485 bp, Zea Mays
caccgatcggagagagagcggaagaccgagcagagaacagaagtgcgccatcgccatcattctccacgtatgtcaccggcgggtgctcggtgatcaattgggctatttcgtcggaacacaacgagctcgtccgtgacagttggagaagcgtggaacctctgtgaccgcgtaggacttcacgcagtggagtcgtcaccgccgtggccttgtggacagccatcccagacgcttcaattgtgaagagcaagtactgctggagaaggactactacgatgaattcgatgaaatccaggggtcgtctcccagtcaactattggcaccgaggagatatttatcttagttcgatttattaattatcaactattttgtaagacattttcgttatgtaataaagattatgacgttggtctctatacactgagtcattgtatgtgtgaatctttatttggcgcaatatgaagtgacagaagtggtatcagagtaat

SEQ ID NO: 37116 - DNA, 489 bp, Zea Mays
caccgatcggagagagagcggaagaccgagcagagaacagaagtgcgccatcgccatcattctccacgtatgtcaccggcgggtgctcggtgatcaattgggctatttcgtcggaacacaacgagctcgtccgtgacagttggagaagcgtggaacctctgtgaccgcgtaggacttcacgcagtggagtcgtcaccgccgtggccttgtggacagccatcccagacgcttcaattgtccgtgaagagcaagtactgctggagaaggactactacgatgaattcgatgaaatccaggggtcgtctcccagtcaactattggcaccgaggagatatttatcttagttcgatttattaattatcaactattttgtaagacattttcgttatgtaataaagattatgacgttggtctctatacactgagtcattgtatgtgtgaatctttatttggcgcaatatgaagtgacagaagtggtatcagagtaat

SEQ ID NO: 37117 - DNA, 616 bp, Zea Mays
caaagttttagctccgttttcagtggttctcgaacctacggtttcgtctcgacctgtagagtagtattatgccattattttataacttggtgtgattttgatttttgttcgcgtattggttgtttgtattgctacgagtagatgagccgtaagcgaggagcctagagtacatcaggttgagaattctgagcaggatctcgtagaaggcaaattgtgtcattgatcacttttatttacctaataatgttctctataatcaccgtggcatgctcaggttaatttgatggaacctaataggttacctagtttggtctcctctgtaccttgcctaccacacttgctaagcgagagcctactcttgctataaacccttccaggtgaagagcaagtactgctggagaaggactactacgatgaattcgatgaaatccaggggtcgtctcccagtcaactattggcaccgaggagatatttatcttagttcgatttattaattatcaactattttgtaagacattttcgttatgtaataaagattatgacgttggtctctatacactgagtcattgtatgtgtgaatctttatttggcgcaatatgaagtgacagaagtggta

SEQ ID NO: 37118 - DNA, 2013 bp, Zea Mays
ccgcaaccacaggcctcccgcgctctattctctctatctaccactactactacccagcagcagcaggccagcacacaatacacacactctaatctctccacacagccaacacagatacggacaggacaggaggatgaagctgggagcaaaaggcctcggcctcctgctcctccttgtcctgcttgcgctttgctccaccattgaagtcggcgaggcaagaagagaccggcattggaggtcgtcgaggacctcctcctctcagctgctgaagaaaggcaaaggaaagaagaccagctcccgccgccaatacggcagcaaccggccaagtccgaagccaccggccagctcgacaccgagctctggtgccggcggcaaaggaaaccagactccgtaccaaccaagcccgaatgcccctcacatcccgaggccaagcccccctgccaatggcagcgcccattccactcccaagccgccgactcctccaagctgcgggaaggctcatcagcagccatcacagtcacagccgccaccaccagcaacctcctcgcagcatggtgcagtattcaatgtggttgattttggagccaagggtgacggagttacagacgatactaaggcttttcaaggagcgtgggctgctgcctgcacccagggggcatctacacttctcgtaccaccagaactagagttccttgttgggccaatctcgttctctgggccttactgcaaaccgaatattgtctttcagttggaaggaacaatcctagctccaatcagtgctaaatcctggggttctggcttgctccagtggctcgagttcaccaaactaaatgggatagttattcaagggaacggcattataaatggcagagggcaacaatggtggacctactcagacccagaggatgaggatgatgatgacacgagtttcaaagaatgccacagattaaacctacagcgttgaggttttatggtagtttcaacgttgtagtgtctggtatcactattgtcaacagctcacagtgccatcttaagttcgacaactgtcaaggagtgatggtccatgatgtgaccatatcctcccctgagaacagtctcaacactgacggaatacacctgcagaactccaaagatgtcagcattcatcatacaaccctggcttgtggtgatgattgcatctccatccagacaggatgcagcaacataaatatacacaacgtgaattgtggaccaggccatggaatcagcataggtggactaggccgagacaacacaaaagcatgtgtatcaaatgttacagtaagagatgtcaacatgttcagaaccatgaatggtgtcagaatcaagacctggcagggtggcgtaggattggttcaagacataaggttctcaaatatacaagtctcagaggttcaaacacccattatcatagatcagttttattgtgacagaagcacttgcaggaatcaaacatcagcagtggcagtatcaggggttcaatacgagaatatcagaggaacatttacaatcaagcctgtccattttgcatgcagtgacagcttaccttgttcaggaatctctcttactggtgtgcaactcaggccagtgcaagtaccccactaccacctgaataacccattctgctggcaagcttttggggagctctacactccaaccgtccctcccatagcttgcttgcagattggaaaacctgctggcaataacttacagtcatatgacgacatatgttgagaaactgaaagtgcctttgtctgttcattggtgcttatccatgagtggtcgttgtgatacatgcgaccccatttgcaccattgcttgttgatgtgcacatatacagttattttgaggtcatcatatcacaacattttaatcttttcatcaaagtaaacataaatatattcatatgaaatggtcatacagcaagagtatatgtacttgagttctccgaaaatgagtaaacataatgacgaaggttatttgcttaaataagtg

SEQ ID NO: 37119 - DNA, 1110 bp, Zea Mays
ctacaccccatgatgagtttgatgatgacctttgagattgagccattgaggctgaattcaagaggattacgtcacctttgaagctccagacaaggtgtcttgctgcatttcctgatcaacaaggttttttgattgggtctatagaaggacgagttggtgttcatcatgtggaagagtctcagcaaggaaaaaactttacattcaagtgtcaccgcgatggcaatgatatatacgctattagctcgttgaactttcatcctgtgcatggtacattcgctactacaggctctgatggaagtttcaacttttgggataaggacagtaagcaaaggctgaaggcttataataggtgtccatcccccatcacatgcagcgcattcaatcatgatggctctatatttgcttacgcggtatgttatgattggagcaaaggtgctgagaagcataatccttctactgcaaagacaaatatatttctacatagtgcacaggattctgacgtgaaaggaaaaccccgcgctggaaagaagtaggcgtagcaatgataagtcagtgactggtgatcgtaggacagcaaatcagctctcttctcctgatagttagggtatttcttgacagtacactagactaaaagcatgtccttttatcacaaccattgcatttgcctcttttggctaagtaatttcggtggcagtgcacttacggcgggttatttctaaaatggaccatctgctgggcgggggcattgttgttctttggacgtctggttgttggtctactggtcgcttttgaagcttggttagtcaatttctcttcgtgctctctagttgcttgactacccgttgcatctttgattgtggtggaaggtcatctctactcatataaaacaccatgttctacggttagttatgtgagttgttaccttctagatgagctatgagaaaacacttaagcctaacatgaaacaaagtggcacacaacatagcattttcggatagttgaaagaagacgagtgaccgagcgagctaaaaaaagatatttttagatagtgtcacatcactcgttgaaagaagacagtcgccgagcaagctaaaaaaaagtatctcaact

SEQ ID NO: 37120 - DNA, 1233 bp, Zea Mays
ccttaacattatggcttatcactagttgtaggtactgggacattaggcaaccccaaccagtgcatgttcagcaacttcctgagcgttgctatgctctatcgctttgttatcctctcatggtggttggcactgctgatcgcaacgtaatagtcttcaatctgcagaatccacaggctgaattcaagaggattacgtcacctttgaagctccagacaaggtgtcttgctgcatttcctgatcaacaaggttttttgattgggtctatagaaggacgagttggtgttcatcatgtggaagagtctcagcaaggaaaaaactttacattcaagtgtcaccgcgatggcaatgatatatacgctattagctcgttgaactttcatcctgtgcatggtacattcgctactacaggctctgatggaagtttcaacttttgggataaggacagtaagcaaaggctgaaggcttataataggtgtccatcccccatcacatgcagcgcattcaatcatgatggctctatatttgcttacgcggtatgttatgattggagcaaaggtgctgagaagcataatccttctactgcaaagacaaatatatttctacatagtgcacaggattctgacgtgaaaggaaaaccccgcgctggaaagaagtaggcgtagcaatgataagtcagtgactggtgatcgtaggacagcaaatcagctctcttctcctgatagttagggtatttcttgacagtacactagactaaaagcatgtccttttatcacaaccattgcatttgcctcttttggctaagtaatttcggtggcagtgcacttacggcgggttatttctaaaatggaccatctgctgggcgggggcattgttgttctttggacgtctggttgttggtctactggtcgcttttgaagcttggttagtcaatttctcttcgtgctctctagttgcttgactacccgttgcatctttgattgtggtggaaggtcatctctactcatataaaacaccatgttctacggttagttatgtgagttgttaccttctagatgagctatgagaaaacacttaagcctaacatgaaacaaagtggcacacaacatagcattttcggatagttgaaagaagacgagtgaccgagcgagctaaaaaaagatatttttagatagtgtcacatcactcgttgaaagaagacagtcgccgagcaagctaaaaaaaagtatctcaact

SEQ ID NO: 37121 - DNA, 1206 bp, Zea Mays
cgcgggctgacgcagccgcgcgggacgtcaatctcacgcgactccgctgctggccgctgtttaaaaaccaaaaaccctcccccaaaacctccgaaatccccgcgacctcccctccccgtctcccctctccgctcccaaattcgtcgaacgccaccccacccgcccactgcaatggcgagcttcaatcccgccggcgccagcgccgccaaccataatcccaacaaatccttcgaggtgactccggcgcctggggactcggtgtccagcctcagcttcagccccaaggcgaaccacctcgttgccacctcatgggacaaccaggttcggtgctgggaggtcatggctggtggggcctgccaagcgaaggcctccatttcgcacgatcaaccggtgctgtgctcggcttggaaggatgatgggttgactgttttctcaggaggctgtgataagcaggttaaaatgtggcccctgctctcaggtgcccagcccacggttttctcaggccatgaggcacctattaaagaactcgcttgggtgccacagatgaatcttcttgtcagtgggagctgggacaagactttgaggtactgggacattaggcaaccccaaccagtgcatgttcagcaacttcctgagcgttgctatgctctatcgctttgttatcctctcatggtggttggcactgctgatcgcaacgtaatagtcttcaatctgcagaatccacaggtcagtgatggagagcgcaggctctgctccggactctgactctatggcagatccaaattgcagagcaaagtctaatgatcctggatggaactatggatattggacacagattgggaatcgagataaggtcacatgcaacctttgcaagactgtgacaatgggaggaatcaagagtttaaaagaacatcttgccggtggttatgcggacacattaatgtgttctaagactacaactgagattagaaaagaaatgaaggcatatttggataagaacaagaggtctaggcctattttccttgatgatgatgatcatgatggtcaggggcagcaaggcgaagaggattccaccagggacagctgcgaaaaggaagagaactgcatttcagtttagaacagctgcacaaccacatacatcaaacaaggaaaaagaaaaagggaaatttgcaaccatgcttcgaagaactcctgaacaagttgtgg

SEQ ID NO: 37122 - DNA, 1191 bp, Zea Mays
aaaaaactggacgagaaaacacaaagctgacgaaatggagtcggctgtgaaggaaaccttggtgccatttgttttccgtttgaggtacgagatcttgctagcttcttcctctccgtgtgcacggaacggaagtgagcagaggaagcaacctctgcaacggaggaaaccacattcgagcagccacctgaacctggctgtaatctatcacccgagattcctttcttccctcgaaatggcaacggcaggaaccgatccttgcccgccgtctaggagagaaaaactcgcatcataagaggcggatccccccatcgcaagcttcagcggcggatcggagaactcaatcgagctaggatcgcagcagcaccgaagcatttgccgatcatcagttcttccatccagtgcagaccaaccaaattaaacacagcatgcaagggatcacgaaggcgctgcggctccacgggaggcagctgaggcacgcggtcctgcagcacatgaacatgaacaaggggatcttctcctgggccaccctgatctcgcgcatacagagcgagtcgccagccgtgatcataccgcacatggggctcgagaacatcaccgtcaacgagattctcagggccaagggggaggccgaggccggagcggtctactggtgcagcaccgcccatctggtgcacgaagcggtgcagcacatggcggcacacaacgttggagctctcgtggttctcaagtcgggggacatgaaccagctcgcaggaattgtgaccgagagagattttgccagaaagatcctcttgccagggcgaccttcacagcaaacaagggtagaggatatcatgacagaagaggacaaggtgatcacggtgtccggtcgtaccaatattctgcgtgcaatggaggttatgacagacaagcgtatcaggcatgttcctgttttcgacgacaaggtagttggaatgatatccatcggtgatgttgttagaacaatcgtggaccagcagcaccaagaagtaaaacagctcaagaagtatatcagaggagactattattagaacactttttaattattattttttacattcggtgtataaacgtaatttggatgtaatcgtttatagatatttaactacaatgtatatttttctctgcgaaaacatggttgatatgtgcccttctgtgtcaagttatgacgag

SEQ ID NO: 37123 - DNA, 3212 bp, Zea Mays
gttcctggatgtcatcgacactgattcctctttgttttgttggagcagcagtacgtacgcgcagcgcaggcccagctgattgcgccatggaagatcatcatcatcatacagcaacgattgcgcacacgtggttggcggcgatggcgatcgccgtgctccctatcctctccgtcctgattctggctgccaccaagcagatgggaagaaccgtcttcgcccctcccaagcgccgagagccgccggtggcggagggcgctcctctcctcggcgtcctgcctgccatcctcaccaggagcttgcaaggcgtgatctgcgaccagtacttgaagctcggcagcgtgttcacgctgagctccttgggagtgaaggtgacgttcctggtgggccccgaggtgtccgcccacttcttccatgccgccgagtcggagatcagcatcggcgacgtctacaaggtcaccgtccccatctttggcaaaggggtcggctatgacgtcgacaacgacacgcgcaacgagcagcacaggttcttcgccgacactttgaggccggccaagctcaggagccatgcccgtctcatggtccgcgaggtggaggagtacttcgccaggtgggggcagtccggcacggtcgatctgaagcaacaggttgaggacgttctcttgctgattgcgagccggtgcctgctggggaaggaggttcgggatcacatgcacgacgaggtgtcctcgctcctccgcgagcttatcggcggcctgcacctagtgagccttttcttcccgtacctgccgaccccggctcaccgccgccgcgaccgagcgcgcgccaggctcgaggagatattctccgggatcgccaggctgcgcaagagctcatgctcatccggccgcggcgccggggacgacggcgaccgcgaccacgacatgctgcagggcctgctagactccaggtacagagacgggcgcggcacgaccgaggcggaggtcaccggcctgctcgtggcgctgctcttcgccggccatcacaccagcgcaacggtcacgacctggaccgcggcgcgcctgctccgccacacagagtggctgcacgcagccactgaggagcagaggctgctgcagaggaacgatcagaacgacgctgcagccatcgactacgacgtcctgctccggatggacgtcctccaccgcagcgtcaaggaggcgctgcggctgcacccggtgaccccaatgatcctccgccgcgcgcgcaggccgttcaccgtgcgcactcaggacggctccgagtacgaggtccccgaggggcgcatgctggcgagcccgctggtggtgaataatctgctccagggcatctacagggaccctgatgtgttcgacccggatcgcttcgccgcctggagggaggaggacagggtcggcggcgacctcgcctacacctccttcggcgccgggaagcatgcctgcatgggcgagggctacgcctacctgcagatcaaagtgatactgagccatctcctcaggaacttcgagctccggctgctttctcccttcccggagacggagaacatgatctccatgaggcccaaaggtgaagtcatggtgagctacaggagacgctctctgctgcagtagtgcacttgcttgacaagtcaataataagcgatgcagtgaacggacttttatttgttgagccgcaaattagtcagggaattgcatggtttgcaaaaataacactactatatcctaaaagtcacgagttggaaaatataaaagagagtcttcaatagtttggttaagcaactcttctcgatttttttagcgcggcttaagaaaaatgccctagccggttaggccttatttagaagcaagataccggaggggattttaggataatctatctgagatcgtggccaccttcgaagggtgtaaggagagggaattagaaaaacgattttgacgactgtcattcatataacgaagaattcagcacacagacaacgaacttgcagtagataatgaacccaaaaaaaaaaaaaaaactggacgagaaaacacaaagctgacgaaatggagtcggctgtgaaggaaaccttggtgccatttgttttccgtttgaggtacgagatcttgctagcttcttcctctccgtgtgcacggaacggaagtgagcagaggaagcaacctctgcaacggaggaaaccacattcgagcagccacctgaacctggctgtaatctatcacccgagattcctttcttccctcgaaatggcaacggcaggaaccgatccttgcccgccgtctaggagagaaaaactcgcatcataagaggcggatccccccatcgcaagcttcagcggcggatcggagaactcaatcgagctaggatcgcagcagcaccgaagcatttgccgatcatcagttcttccatccagaccaaccaaattaaacacagcatgcaagggatcacgaaggcgctgcggctccacgggaggcagctgaggcacgcggtcctgcagcacatgaacatgaacaaggggatcttctcctgggccaccctgatctcgcgcatacagagcgagtcgccagccgtgatcataccgcacatggggctcgagaacatcaccgtcaacgagattctcagggccaagggggaggccgaggccggagcggtctactggtgcagcaccgcccatctggtgcacgaagcggtgcagcacatggcggcacacaacgttggagctctcgtggttctcaagtcgggggacatgaaccagctcgcaggaattgtgaccgagagagattttgccagaaagatcctcttgccagggcgaccttcacagcaaacaagggtagaggatatcatgacagaagaggacaaggtgatcacggtgtccggtcgtaccaatattctgcgtgcaatggaggttatgacagacaagcgtatcaggcatgttcctgttttcgacgacaaggtagttggaatgatatccatcggtgatgttgttagaacaatcgtggaccagcagcaccaagaagtaaaacagctcaagaagtatatcagaggagactattattagaacactttttaattattattttttacattcggtgtataaacgtaatttggatgtaatcgtttatagatatttaactacaatgtatatttttctctgcgaaaacatggttgatatgtgcccttctgtgtcaagttatgacgag

SEQ ID NO: 37124 - DNA, 3228 bp, Zea Mays
gttcctggatgtcatcgacactgattcctctttgttttgttggagcagcagtacgtacgcgcagcgcaggcccagctgattgcgccatggaagatcatcatcatcatacagcaacgattgcgcacacgtggttggcggcgatggcgatcgccgtgctccctatcctctccgtcctgattctggctgccaccaagcagatgggaagaaccgtcttcgcccctcccaagcgccgagagccgccggtggcggagggcgctcctctcctcggcgtcctgcctgccatcctcaccaggagcttgcaaggcgtgatctgcgaccagtacttgaagctcggcagcgtgttcacgctgagctccttgggagtgaaggtgacgttcctggtgggccccgaggtgtccgcccacttcttccatgccgccgagtcggagatcagcatcggcgacgtctacaaggtcaccgtccccatctttggcaaaggggtcggctatgacgtcgacaacgacacgcgcaacgagcagcacaggttcttcgccgacactttgaggccggccaagctcaggagccatgcccgtctcatggtccgcgaggtggaggagtacttcgccaggtgggggcagtccggcacggtcgatctgaagcaacaggttgaggacgttctcttgctgattgcgagccggtgcctgctggggaaggaggttcgggatcacatgcacgacgaggtgtcctcgctcctccgcgagcttatcggcggcctgcacctagtgagccttttcttcccgtacctgccgaccccggctcaccgccgccgcgaccgagcgcgcgccaggctcgaggagatattctccgggatcgccaggctgcgcaagagctcatgctcatccggccgcggcgccggggacgacggcgaccgcgaccacgacatgctgcagggcctgctagactccaggtacagagacgggcgcggcacgaccgaggcggaggtcaccggcctgctcgtggcgctgctcttcgccggccatcacaccagcgcaacggtcacgacctggaccgcggcgcgcctgctccgccacacagagtggctgcacgcagccactgaggagcagaggctgctgcagaggaacgatcagaacgacgctgcagccatcgactacgacgtcctgctccggatggacgtcctccaccgcagcgtcaaggaggcgctgcggctgcacccggtgaccccaatgatcctccgccgcgcgcgcaggccgttcaccgtgcgcactcaggacggctccgagtacgaggtccccgaggggcgcatgctggcgagcccgctggtggtgaataatctgctccagggcatctacagggaccctgatgtgttcgacccggatcgcttcgccgcctggagggaggaggacagggtcggcggcgacctcgcctacacctccttcggcgccgggaagcatgcctgcatgggcgagggctacgcctacctgcagatcaaagtgatactgagccatctcctcaggaacttcgagctccggctgctttctcccttcccggagacggagaacatgatctccatgaggcccaaaggtgaagtcatggtgagctacaggagacgctctctgctgcagtagtgcacttgcttgacaagtcaataataagcgatgcagtgaacggacttttatttgttgagccgcaaattagtcagggaattgcatggtttgcaaaaataacactactatatcctaaaagtcacgagttggaaaatataaaagagagtcttcaatagtttggttaagcaactcttctcgatttttttagcgcggcttaagaaaaatgccctagccggttaggccttatttagaagcaagataccggaggggattttaggataatctatctgagatcgtggccaccttcgaagggtgtaaggagagggaattagaaaaacgattttgacgactgtcattcatataacgaagaattcagcacacagacaacgaacttgcagtagataatgaacccaaaaaaaaaaaaaaaactggacgagaaaacacaaagctgacgaaatggagtcggctgtgaaggaaaccttggtgccatttgttttccgtttgaggtacgagatcttgctagcttcttcctctccgtgtgcacggaacggaagtgagcagaggaagcaacctctgcaacggaggaaaccacattcgagcagccacctgaacctggctgtaatctatcacccgagattcctttcttccctcgaaatggcaacggcaggaaccgatccttgcccgccgtctaggagagaaaaactcgcatcataagaggcggatccccccatcgcaagcttcagcggcggatcggagaactcaatcgagctaggatcgcagcagcaccgaagcatttgccgatcatcagttcttccatccagcgaaactccagtgcagaccaaccaaattaaacacagcatgcaagggatcacgaaggcgctgcggctccacgggaggcagctgaggcacgcggtcctgcagcacatgaacatgaacaaggggatcttctcctgggccaccctgatctcgcgcatacagagcgagtcgccagccgtgatcataccgcacatggggctcgagaacatcaccgtcaacgagattctcagggccaagggggaggccgaggccggagcggtctactggtgcagcaccgcccatctggtgcacgaagcggtgcagcacatggcggcacacaacgttggagctctcgtggttctcaagtcgggggacatgaaccagctcgcaggaattgtgaccgagagagattttgccagaaagatcctcttgccagggcgaccttcacagcaaacaagggtagaggatatcatgacagaagaggacaaggtgatcacggtgtccggtcgtaccaatattctgcgtgcaatggaggttatgacagacaagcgtatcaggcatgttcctgttttcgacgacaaggtagttggaatgatatccatcggtgatgttgttagaacaatcgtggaccagcagcaccaagaagtaaaacagctcaagaagtatatcagaggagactattattagaacactttttaattattattttttacattcggtgtataaacgtaatttggatgtaatcgtttatagatatttaactacaatgtatatttttctctgcgaaaacatggttgatatgtgcccttctgtgtcaagttatgacgag

SEQ ID NO: 37125 - DNA, 1739 bp, Zea Mays
cacagagttgcttcttctcgcttcctgtatgtgtcgcggtggaggtcaagctccacggctccgtcctgggcgccctcgacgccatgtacagcagcaacgccgcgggcgcggtgatcatcgacgtggtgcacagcagtctaggcaagtacgtcgatcgcgatattggcttcgtcgagttctcgagcctagtcctgtgggcacttgaggaacttggcaaagtggaaagtgaaccaacagacagtacttctgatttcctctctactctgaaacagcatcatcagattgcagaaacgaagatcgcctggttagcgaagttgttcctgtgggagccattcttccctgttcggacccatgacacgctgttccacgcaatgcttctcttttcgaaacaccacaggctcaacgtggcaccggttgttgagtcaatgaactcgagtgttattggatttgtcacacaggatgcagtgatggagctgcttctccagtcaagtggccttgagtggcttgataaaattgcagacaagcagctttcggaatttaggtttgcaaatgtgaggaagcctgttttggtgtactcagatcaaactctagctgatgggctgcatattctctcaaaggaaaaaacgggggttgcagtcattgacaggaaaaccagccgtctaattggatcattacagtgcagtgatctctacctgtttctagatgacagcacccttttcagcaagcgaacgacaactactctggaagaattaatcagcctgaataacaagaccgacaggaaatgcagcaccgctgaaaattcatgtgcgcctggccgaaacatcctcgcgctcaggagcaggcagtcaggcatggtgggcctaccagccaccaacctggaatccgacaccctaaagcaagcgatggagaagctgacaactttaaggagcagctgcagcttcatcgtcgacgagcacgggcgcgtccaaggagtggtgaccacaagggacatcatctccgtgttctccccgctgtgcatggactcgaggattgacggggccacgttcttctcggctgcgctcgagcaggctggctgccgcgttgagaacgggcagatgtttcagaattagtttcagacaaaactggaatgcagggaggctttagtttgttgcagtgaggaagatgtacatggcacttaccggctatgttgccctgatacgagggatatggatacgggatacgtcgatactctgatacgctatttatcaaaaaatactctgatacgctatttctcagaaaatactgatacggtgatataaaatatatattataaataaaattaaatactgaaatgtctgagatagaccattgccgatcagttcaatttaagggtattagaagttaatgttcaataattttgactaaagtaaatatctacttcctctttcaaaatttatctggactcaaatcaatgaaatcagcatgccaaaacacgtgtaatccatctcgagtaatttgtatcaatacctattcagtagatccttttttctgtgccaggaaccagatttgaacgggtgacacgaggatttttagtcctctgctctatcaactaagctattctgaccatttcttgtgcatcatcctagtagagtacggacttgtgtctatgtgggactaaaaaagacaaaagtattctaaaattggacttagtaaatgtcaggataatgataatgacttacttaataatagggatacactgc

SEQ ID NO: 37126 - DNA, 1734 bp, Zea Mays
ggcacagagttgcttcttctcgcttcctgtatgtgtcgcggtggaggtcaagctccacggctccgtcctgggcgccctcgacgccatgtacagcagcaacgccgcgggcgcggtgatcatcgacgtggtgcacagcagtctaggcaagtacgtcgatcgcgatattggcttcgtcgagttctcgagcctagtcctgtgggcacttgaggaacttggcaaagtggaaagtgaaccaacagacagtacttctgatttcctctctactctgaaacagcatcatcagattgcagaaacgaagatcgcctggttagcgaagttgttcctgtgggagccattcttccctgttcggacccatgacacgctgttccacgcaatgcttctcttttcgaaacaccacaggctcaacgtggcaccggttgttgagtcaatgaactcgagtgttattggatttgtcacacagtgatggagctgcttctccagtcaagtggccttgagtggcttgataaaattgcagacaagcagctttcggaatttaggtttgcaaatgtgaggaagcctgttttggtgtactcagatcaaactctagctgatgggctgcatattctctcaaaggaaaaaacgggggttgcagtcattgacaggaaaaccagccgtctaattggatcattacagtgcagtgatctctacctgtttctagatgacagcacccttttcagcaagcgaacgacaactactctggaagaattaatcagcctgaataacaagaccgacaggaaatgcagcaccgctgaaaattcatgtgcgcctggccgaaacatcctcgcgctcaggagcaggcagtcaggcatggtgggcctaccagccaccaacctggaatccgacaccctaaagcaagcgatggagaagctgacaactttaaggagcagctgcagcttcatcgtcgacgagcacgggcgcgtccaaggagtggtgaccacaagggacatcatctccgtgttctccccgctgtgcatggactcgaggattgacggggccacgttcttctcggctgcgctcgagcaggctggctgccgcgttgagaacgggcagatgtttcagaattagtttcagacaaaactggaatgcagggaggctttagtttgttgcagtgaggaagatgtacatggcacttaccggctatgttgccctgatacgagggatatggatacgggatacgtcgatactctgatacgctatttatcaaaaaatactctgatacgctatttctcagaaaatactgatacggtgatataaaatatatattataaataaaattaaatactgaaatgtctgagatagaccattgccgatcagttcaatttaagggtattagaagttaatgttcaataattttgactaaagtaaatatctacttcctctttcaaaatttatctggactcaaatcaatgaaatcagcatgccaaaacacgtgtaatccatctcgagtaatttgtatcaatacctattcagtagatccttttttctgtgccaggaaccagatttgaacgggtgacacgaggatttttagtcctctgctctatcaactaagctattctgaccatttcttgtgcatcatcctagtagagtacggacttgtgtctatgtgggactaaaaaagacaaaagtattctaaaattggacttagtaaatgtcaggataatgataatgacttacttaataatagggatacactgc

SEQ ID NO: 37127 - DNA, 1911 bp, Zea Mays
cagagacctgtccgttacacttgcaccgcagccagagtccgggagcgcagagatcgctggggagatggcgagagaagcagcgagcgaagccaccgcaagccgcgaaagcggggcggaggcggcaggggagtgctggagcgaagcgctcaagtcgttcctggaccacatccccgtctcctccgtcccgggcgcgctccaacccactgcctccccagcggtggaggtcaagctccacggctccgtcctgggcgccctcgacgccatgtacagcagcaacgccgcgggcgcggtgatcatcgacgtggtgcacagcagtctaggcaagtacgtcgatcgcgatattggcttcgtcgagttctcgagcctagtcctgtgggcacttgaggaacttggcaaagtggaaagtgaaccaacagacagtacttctgatttcctctctactctgaaacagcatcatcagattgcagaaacgaagatcgcctggttagcgaagttgttcctgtgggagccattcttccctgttcggacccatgacacgctgttccacgcaatgcttctcttttcgaaacaccacaggctcaacgtggcaccggttgttgagtcaatgaactcgagtgttattggatttgtcacacagtgatggagctgcttctccagtcaagtggccttgagtggcttgataaaattgcagacaagcagctttcggaatttaggtttgcaaatgtgaggaagcctgttttggtgtactcagatcaaactctagctgatgggctgcatattctctcaaaggaaaaaacgggggttgcagtcattgacaggaaaaccagccgtctaattggatcattacagtgcagtgatctctacctgtttctagatgacagcacccttttcagcaagcgaacgacaactactctggaagaattaatcagcctgaataacaagaccgacaggaaatgcagcaccgctgaaaattcatgtgcgcctggccgaaacatcctcgcgctcaggagcaggcagtcaggcatggtgggcctaccagccaccaacctggaatccgacaccctaaagcaagcgatggagaagctgacaactttaaggagcagctgcagcttcatcgtcgacgagcacgggcgcgtccaaggagtggtgaccacaagggacatcatctccgtgttctccccgctgtgcatggactcgaggattgacggggccacgttcttctcggctgcgctcgagcaggctggctgccgcgttgagaacgggcagatgtttcagaattagtttcagacaaaactggaatgcagggaggctttagtttgttgcagtgaggaagatgtacatggcacttaccggctatgttgccctgatacgagggatatggatacgggatacgtcgatactctgatacgctatttatcaaaaaatactctgatacgctatttctcagaaaatactgatacggtgatataaaatatatattataaataaaattaaatactgaaatgtctgagatagaccattgccgatcagttcaatttaagggtattagaagttaatgttcaataattttgactaaagtaaatatctacttcctctttcaaaatttatctggactcaaatcaatgaaatcagcatgccaaaacacgtgtaatccatctcgagtaatttgtatcaatacctattcagtagatccttttttctgtgccaggaaccagatttgaacgggtgacacgaggatttttagtcctctgctctatcaactaagctattctgaccatttcttgtgcatcatcctagtagagtacggacttgtgtctatgtgggactaaaaaagacaaaagtattctaaaattggacttagtaaatgtcaggataatgataatgacttacttaataatagggatacactgc

SEQ ID NO: 37128 - DNA, 1968 bp, Zea Mays
aaaagctcagagacctgtccgttacacttgcaccgcagccagagtccgggagcgcagagatcgctggggagatggcgagagaagcagcgagcgaagccaccgcaagccgcgaaagcggggcggaggcggcaggggagtgctggagcgaagcgctcaagtcgttcctggaccacatccccgtctcctccgtcccgggcgcgctccaacccactgcctccccagcggtggaggtcaagctccacggctccgtcctgggcgccctcgacgccatgtacagcagcaacgccgcgggcgcggtgatcatcgacgtggtgcacagcagtctaggcaagtacgtcgatcgcgatattggcttcgtcgagttctcgagcctagtcctgtgggcacttgaggaacttggcaaagtggaaagtgaaccaacagacagtacttctgatttcctctctactctgaaacagcatcatcagattgcagaaacgaagatcgcctggttagcgaagttgttcctgtgggagccattcttccctgttcggacccatgacacgctgttccacgcaatgcttctcttttcgaaacaccacaggctcaacgtggcaccggttgttgagtcaatgaactcgagtgttattggatttgtcacacagaactcaatcgtgatgctgacggccggccgatgtattgcactaggatgcagtgatggagctgcttctccagtcaagtggccttgagtggcttgataaaattgcagacaagcagctttcggaatttaggtttgcaaatgtgaggaagcctgttttggtgtactcagatcaaactctagctgatgggctgcatattctctcaaaggaaaaaacgggggttgcagtcattgacaggaaaaccagccgtctaattggatcattacagtgcagtgatctctacctgtttctagatgacagcacccttttcagcaagcgaacgacaactactctggaagaattaatcagcctgaataacaagaccgacaggaaatgcagcaccgctgaaaattcatgtgcgcctggccgaaacatcctcgcgctcaggagcaggcagtcaggcatggtgggcctaccagccaccaacctggaatccgacaccctaaagcaagcgatggagaagctgacaactttaaggagcagctgcagcttcatcgtcgacgagcacgggcgcgtccaaggagtggtgaccacaagggacatcatctccgtgttctccccgctgtgcatggactcgaggattgacggggccacgttcttctcggctgcgctcgagcaggctggctgccgcgttgagaacgggcagatgtttcagaattagtttcagacaaaactggaatgcagggaggctttagtttgttgcagtgaggaagatgtacatggcacttaccggctatgttgccctgatacgagggatatggatacgggatacgtcgatactctgatacgctatttatcaaaaaatactctgatacgctatttctcagaaaatactgatacggtgatataaaatatatattataaataaaattaaatactgaaatgtctgagatagaccattgccgatcagttcaatttaagggtattagaagttaatgttcaataattttgactaaagtaaatatctacttcctctttcaaaatttatctggactcaaatcaatgaaatcagcatgccaaaacacgtgtaatccatctcgagtaatttgtatcaatacctattcagtagatccttttttctgtgccaggaaccagatttgaacgggtgacacgaggatttttagtcctctgctctatcaactaagctattctgaccatttcttgtgcatcatcctagtagagtacggacttgtgtctatgtgggactaaaaaagacaaaagtattctaaaattggacttagtaaatgtcaggataatgataatgacttacttaataatagggatacactgc

SEQ ID NO: 37129 - DNA, 2240 bp, Zea Mays
ctccattcttgccgacaatatattgcaaggtgtatctagtagttggaggagatatgcagtttgcacttgcattggacacgaactcaggtcctcaccagataagatcttgtgagggtgatgggattgacaggttggaaaaattaagtattgggggcagaaagcaggagaaagctttgagaaataggtgctttggtggtagagttgctgcaactacacaatgtattcttacctcagatgcttgtcctgaaactcttcattctcaaacacagtcctctaggaaaaattatgctgatgcaaaccgtgtatctgctatcattttgggcggaggcactggatctcagctctttcctctgacaagcacaagagctacgcctgctgtaagggataacactgaacatccaacgttgattactctattatagtattatacagactgtacttttcgaatttatcttagttttctacaatatttagtggattcttctcattttcaagatacacaattgatccataatcgaagtggtatgtaagacagtgagttaaaagattatattttttgggagacttccagtcaaattttcttagaagtttttttggtccagatgttcataaagtcgccgctttcatactttttttaattttttaattggtgcactattaggtacctgttggaggatgttacaggcttattgatatccctatgagtaactgcttcaacagtggtataaataagatatttgtgatgagtcagttcaattctacttcgcttaaccgccatattcatcgtacataccttgaaggcgggatcaactttgctgatggatctgtacaggtattagcggctacacaaatgcctgaagagccagctggatggttccagggtacagcagactctatcagaaaatttatctgggtactcgaggattattacagtcacaaatccattgacaacattgtaatcttgagtggcgatcagctttatcggatgaattacatggaacttgtgcagaaacatgtcgaggacgatgctgatatcactatatcatgtgctcctgttgatgagagccgagcttctaaaaatgggctagtgaagattgatcatactggacgtgtacttcaattctttgaaaaaccaaagggtgctgatttgaattctatgctactgatgttgcagagagttgagaccaacttcctgagctatgctatagatgatgcacagaaatatccataccttgcatcaatgggcatttatgtcttcaagaaagatgcacttttagaccttctcaagtcaaaatatattcaattacatgactttggatctgaaatcctcccaagagctgtactagatcatagtgtgcaggcatgcatttttacgggctattgggaggatgttggaacaatcaaatcattctttgatgcaaacttggccctcactgagcagccttccaagtttgatttttatgatccaaaaacacctttcttcactgcaccccgatgcttgcctccgacgcaattggacaagtgcaagatgaaagatgcatttatctcagatggttgcttactgagagaatgcaacatcgagcattctgtgattggagtctgctcacgtgtcagctctggatgtgaactcaaggactccgtgatgatgggagcggacacctatgaaactgaagaagaagcttcaaagctactgttagctgggaaggtcccagttggaataggaaggaacacaaagataaggaactgtatcattgacatgaatgctaggattgggaagaacgtggtgatcacaaacagtaagggcatccaagaggctgatcacccggaagaagggtactacataaggtctggaatcgtggtgatcttgaagaatgcaaccatcaacgatgggtctgtcatatagatcggctgcgtttgcgtctacaaaacaagaacctacaatggtattgcatcgatggatcgtgtaaccttggtatggtaagagccgcttgacaggaagtcgagcgttcgggcgcaagatgcgttgtctggcatgctgttccttgaccatttgtgctgctagtatgtactgttataagctgccctagaagttgcagcaaacctttttatgaacctttgtatttccattacctgctttggatcaactatatctgtcatcctatatattactaaatttttacgtgtttttctaattcggtgctgcttttgggatctggcttcgatgaccgctcgacccttgg

SEQ ID NO: 37130 - DNA, 2232 bp, Zea Mays
tgaattgctccattcttgccgacaatatattgcaaggtgtatctagtagttggaggagatatgcagtttgcacttgcattggacacgaactcaggtcctcaccagataagatcttgtgagggtgatgggattgacaggttggaaaaattaagtattgggggcagaaagcaggagaaagctttgagaaataggtgctttggtggtagagttgctgcaactacacaatgtattcttacctcagatgcttgtcctgaaactcttcattctcaaacacagtcctctaggaaaaattatgctgatgcaaaccgtgtatctgctatcattttgggcggaggcactggatctcagctctttcctctgacaagcacaagagctacgcctgctgtaagggataacactgaacatccaacgttgattactctattatagtattatacagactgtacttttcgaatttatcttagttttctacaatatttagtggattcttctcattttcaagatacacaattgatccataatcgaagtggtatgtaagacagtgagttaaaagattatattttttgggagacttccagtcaaattttcttagaagtttttttggtccagatgttcataaagtcgccgctttcatactttttttaattttttaattggtgcactattaggtacctgttggaggatgttacaggcttattgatatccctatgagtaactgcttcaacagtggtataaataagatatttgtgatgagtcagttcaattctacttcgcttaaccgccatattcatcgtacataccttgaaggcgggatcaactttgctgatggatctgtacaggtattagcggctacacaaatgcctgaagagccagctggatggttccagggtacagcagactctatcagaaaatttatctgggtactcgaggattattacagtcacaaatccattgacaacattgtaatcttgagtggcgatcagctttatcggatgaattacatggaacttgtgcagaaacatgtcgaggacgatgctgatatcactatatcatgtgctcctgttgatgagagccgagcttctaaaaatgggctagtgaagattgatcatactggacgtgtacttcaattctttgaaaaaccaaagggtgctgatttgaattctatgagagttgagaccaacttcctgagctatgctatagatgatgcacagaaatatccataccttgcatcaatgggcatttatgtcttcaagaaagatgcacttttagaccttctcaagtcaaaatatattcaattacatgactttggatctgaaatcctcccaagagctgtactagatcatagtgtgcaggcatgcatttttacgggctattgggaggatgttggaacaatcaaatcattctttgatgcaaacttggccctcactgagcagccttccaagtttgatttttatgatccaaaaacacctttcttcactgcaccccgatgcttgcctccgacgcaattggacaagtgcaagatgaaagatgcatttatctcagatggttgcttactgagagaatgcaacatcgagcattctgtgattggagtctgctcacgtgtcagctctggatgtgaactcaaggactccgtgatgatgggagcggacacctatgaaactgaagaagaagcttcaaagctactgttagctgggaaggtcccagttggaataggaaggaacacaaagataaggaactgtatcattgacatgaatgctaggattgggaagaacgtggtgatcacaaacagtaagggcatccaagaggctgatcacccggaagaagggtactacataaggtctggaatcgtggtgatcttgaagaatgcaaccatcaacgatgggtctgtcatatagatcggctgcgtttgcgtctacaaaacaagaacctacaatggtattgcatcgatggatcgtgtaaccttggtatggtaagagccgcttgacaggaagtcgagcgttcgggcgcaagatgcgttgtctggcatgctgttccttgaccatttgtgctgctagtatgtactgttataagctgccctagaagttgcagcaaacctttttatgaacctttgtatttccattacctgctttggatcaactatatctgtcatcctatatattactaaatttttacgtgtttttctaattcggtgctgcttttgggatctggcttcgatgaccgctcgacccttgg

SEQ ID NO: 37131 - DNA, 1891 bp, Zea Mays
atgagatgctatcatctatgtactctgcaaatgcatctgacgttatatgggctgcttcatataatttgaattgctccattcttgccgacaatatattgcaaggtgtatctagtagttggaggagatatgcagtttgcacttgcattggacacgaactcaggtcctcaccagataagatcttgtgagggtgatgggattgacaggttggaaaaattaagtattgggggcagaaagcaggagaaagctttgagaaataggtgctttggtggtagagttgctgcaactacacaatgtattcttacctcagatgcttgtcctgaaactcttgtacctgttggaggatgttacaggcttattgatatccctatgagtaactgcttcaacagtggtataaataagatatttgtgatgagtcagttcaattctacttcgcttaaccgccatattcatcgtacataccttgaaggcgggatcaactttgctgatggatctgtacaggtattagcggctacacaaatgcctgaagagccagctggatggttccagggtacagcagactctatcagaaaatttatctgggtactcgaggattattacagtcacaaatccattgacaacattgtaatcttgagtggcgatcagctttatcggatgaattacatggaacttgtgcagaaacatgtcgaggacgatgctgatatcactatatcatgtgctcctgttgatgagagccgagcttctaaaaatgggctagtgaagattgatcatactggacgtgtacttcaattctttgaaaaaccaaagggtgctgatttgaattctatgagagttgagaccaacttcctgagctatgctatagatgatgcacagaaatatccataccttgcatcaatgggcatttatgtcttcaagaaagatgcacttttagaccttctcaagtcaaaatatattcaattacatgactttggatctgaaatcctcccaagagctgtactagatcatagtgtgcaggcatgcatttttacgggctattgggaggatgttggaacaatcaaatcattctttgatgcaaacttggccctcactgagcagccttccaagtttgatttttatgatccaaaaacacctttcttcactgcaccccgatgcttgcctccgacgcaattggacaagtgcaagatgaaagatgcatttatctcagatggttgcttactgagagaatgcaacatcgagcattctgtgattggagtctgctcacgtgtcagctctggatgtgaactcaaggactccgtgatgatgggagcggacacctatgaaactgaagaagaagcttcaaagctactgttagctgggaaggtcccagttggaataggaaggaacacaaagataaggaactgtatcattgacatgaatgctaggattgggaagaacgtggtgatcacaaacagtaagggcatccaagaggctgatcacccggaagaagggtactacataaggtctggaatcgtggtgatcttgaagaatgcaaccatcaacgatgggtctgtcatatagatcggctgcgtttgcgtctacaaaacaagaacctacaatggtattgcatcgatggatcgtgtaaccttggtatggtaagagccgcttgacaggaagtcgagcgttcgggcgcaagatgcgttgtctggcatgctgttccttgaccatttgtgctgctagtatgtactgttataagctgccctagaagttgcagcaaacctttttatgaacctttgtatttccattacctgctttggatcaactatatctgtcatcctatatattactaaatttttacgtgtttttctaattcggtgctgcttttgggatctggcttcgatgaccgctcgacccttgg

SEQ ID NO: 37132 - DNA, 2071 bp, Zea Mays
cttaccatctttatctgttagtttaatttgtaattgggaagtattagtggaaagaggatgagatgctatcatctatgtactctgcaaatgcatctgacgttatatgggctgcttcatataatttgaattgctccattcttgccgacaatatattgcaaggtgtatctagtagttggaggagatatgcagtttgcacttgcattggacacgaactcaggtcctcaccagataagatcttgtgagggtgatgggattgacaggttggaaaaattaagtattgggggcagaaagcaggagaaagctttgagaaataggtgctttggtggtagagttgctgcaactacacaatgtattcttacctcagatgcttgtcctgaaactcttcattctcaaacacagtcctctaggaaaaattatgctgatgcaaaccgtgtatctgctatcattttgggcggaggcactggatctcagctctttcctctgacaagcacaagagctacgcctgctgtacctgttggaggatgttacaggcttattgatatccctatgagtaactgcttcaacagtggtataaataagatatttgtgatgagtcagttcaattctacttcgcttaaccgccatattcatcgtacataccttgaaggcgggatcaactttgctgatggatctgtacaggtattagcggctacacaaatgcctgaagagccagctggatggttccagggtacagcagactctatcagaaaatttatctgggtactcgaggattattacagtcacaaatccattgacaacattgtaatcttgagtggcgatcagctttatcggatgaattacatggaacttgtgcagaaacatgtcgaggacgatgctgatatcactatatcatgtgctcctgttgatgagagccgagcttctaaaaatgggctagtgaagattgatcatactggacgtgtacttcaattctttgaaaaaccaaagggtgctgatttgaattctatgagagttgagaccaacttcctgagctatgctatagatgatgcacagaaatatccataccttgcatcaatgggcatttatgtcttcaagaaagatgcacttttagaccttctcaagtcaaaatatattcaattacatgactttggatctgaaatcctcccaagagctgtactagatcatagtgtgcaggcatgcatttttacgggctattgggaggatgttggaacaatcaaatcattctttgatgcaaacttggccctcactgagcagccttccaagtttgatttttatgatccaaaaacacctttcttcactgcaccccgatgcttgcctccgacgcaattggacaagtgcaagatgaaagatgcatttatctcagatggttgcttactgagagaatgcaacatcgagcattctgtgattggagtctgctcacgtgtcagctctggatgtgaactcaaggactccgtgatgatgggagcggacacctatgaaactgaagaagaagcttcaaagctactgttagctgggaaggtcccagttggaataggaaggaacacaaagataaggaactgtatcattgacatgaatgctaggattgggaagaacgtggtgatcacaaacagtaagggcatccaagaggctgatcacccggaagaagggtactacataaggtctggaatcgtggtgatcttgaagaatgcaaccatcaacgatgggtctgtcatatagatcggctgcgtttgcgtctacaaaacaagaacctacaatggtattgcatcgatggatcgtgtaaccttggtatggtaagagccgcttgacaggaagtcgagcgttcgggcgcaagatgcgttgtctggcatgctgttccttgaccatttgtgctgctagtatgtactgttataagctgccctagaagttgcagcaaacctttttatgaacctttgtatttccattacctgctttggatcaactatatctgtcatcctatatattactaaatttttacgtgtttttctaattcggtgctgcttttgggatctggcttcgatgaccgctcgacccttgg

SEQ ID NO: 37133 - DNA, 2132 bp, Zea Mays
atgggcgggcagtgctgtgagttagagcagtgtggcaatgttggtggtagtggtgacacccttcgggagcggaaggaggctggaacttcaggcaaactcttctggaagaaaggtgtctaaaactatgaacgggttacagaaagcatcgcaattagccacaagatcacttcgggaggcaagtgcgatttcgatctcgcagccaccttttttttgttctgttgtgtatctagtagttggaggagatatgcagtttgcacttgcattggacacgaactcaggtcctcaccagataagatcttgtgagggtgatgggattgacaggttggaaaaattaagtattgggggcagaaagcaggagaaagctttgagaaataggtgctttggtggtagagttgctgcaactacacaatgtattcttacctcagatgcttgtcctgaaactcttcattctcaaacacagtcctctaggaaaaattatgctgatgcaaaccgtgtatctgctatcattttgggcggaggcactggatctcagctctttcctctgacaagcacaagagctacgcctgctgtacctgttggaggatgttacaggcttattgatatccctatgagtaactgcttcaacagtggtataaataagatatttgtgatgagtcagttcaattctacttcgcttaaccgccatattcatcgtacataccttgaaggcgggatcaactttgctgatggatctgtacaggtattagcggctacacaaatgcctgaagagccagctggatggttccagggtacagcagactctatcagaaaatttatctgggtactcgaggattattacagtcacaaatccattgacaacattgtaatcttgagtggcgatcagctttatcggatgaattacatggaacttgtgcagaaacatgtcgaggacgatgctgatatcactatatcatgtgctcctgttgatgagagccgagcttctaaaaatgggctagtgaagattgatcatactggacgtgtacttcaattctttgaaaaaccaaagggtgctgatttgaattctatgagagttgagaccaacttcctgagctatgctatagatgatgcacagaaatatccataccttgcatcaatgggcatttatgtcttcaagaaagatgcacttttagaccttctcaagtcaaaatatattcaattacatgactttggatctgaaatcctcccaagagctgtactagatcatagtgtgcaggcatgcatttttacgggctattgggaggatgttggaacaatcaaatcattctttgatgcaaacttggccctcactgagcagccttccaagtttgatttttatgatccaaaaacacctttcttcactgcaccccgatgcttgcctccgacgcaattggacaagtgcaagatgaaagatgcatttatctcagatggttgcttactgagagaatgcaacatcgagcattctgtgattggagtctgctcacgtgtcagctctggatgtgaactcaaggactccgtgatgatgggagcggacacctatgaaactgaagaagaagcttcaaagctactgttagctgggaaggtcccagttggaataggaaggaacacaaagataaggaactgtatcattgacatgaatgctaggattgggaagaacgtggtgatcacaaacagtaagggcatccaagaggctgatcacccggaagaagggtactacataaggtctggaatcgtggtgatcttgaagaatgcaaccatcaacgatgggtctgtcatatagatcggctgcgtttgcgtctacaaaacaagaacctacaatggtattgcatcgatggatcgtgtaaccttggtatggtaagagccgcttgacaggaagtcgagcgttcgggcgcaagatgcgttgtctggcatgctgttccttgaccatttgtgctgctagtatgtactgttataagctgccctagaagttgcagcaaacctttttatgaacctttgtatttccattacctgctttggatcaactatatctgtcatcctatatattactaaatttttacgtgtttttctaattcggtgctgcttttgggatctggcttcgatgaccgctcgacccttgg

SEQ ID NO: 37134 - DNA, 2222 bp, Zea Mays
atgggcgggcagtgctgtgagttagagcagtgtggcaatgttggtggtagtggtgacacccttcgggagcggaaggaggctggaacttcaggcaaactcttctggaagaaaggtgtctaaaactatgaacgggttacagaaagcaaaggccaagggcaaaattggaacactaatgatggttggttgcatgagtctgtcgattacttgcaagaaatgtgaacctttgtttctttcatctccaccagtatgccctctcatactctatataaacacatcaacagcatcgcaattagccacaagatcacttcgggaggcaagtgcgatttcgatctcgcagccaccttttttttgttctgttgtgtatctagtagttggaggagatatgcagtttgcacttgcattggacacgaactcaggtcctcaccagataagatcttgtgagggtgatgggattgacaggttggaaaaattaagtattgggggcagaaagcaggagaaagctttgagaaataggtgctttggtggtagagttgctgcaactacacaatgtattcttacctcagatgcttgtcctgaaactcttcattctcaaacacagtcctctaggaaaaattatgctgatgcaaaccgtgtatctgctatcattttgggcggaggcactggatctcagctctttcctctgacaagcacaagagctacgcctgctgtacctgttggaggatgttacaggcttattgatatccctatgagtaactgcttcaacagtggtataaataagatatttgtgatgagtcagttcaattctacttcgcttaaccgccatattcatcgtacataccttgaaggcgggatcaactttgctgatggatctgtacaggtattagcggctacacaaatgcctgaagagccagctggatggttccagggtacagcagactctatcagaaaatttatctgggtactcgaggattattacagtcacaaatccattgacaacattgtaatcttgagtggcgatcagctttatcggatgaattacatggaacttgtgcagaaacatgtcgaggacgatgctgatatcactatatcatgtgctcctgttgatgagagccgagcttctaaaaatgggctagtgaagattgatcatactggacgtgtacttcaattctttgaaaaaccaaagggtgctgatttgaattctatgagagttgagaccaacttcctgagctatgctatagatgatgcacagaaatatccataccttgcatcaatgggcatttatgtcttcaagaaagatgcacttttagaccttctcaaagctgtactagatcatagtgtgcaggcatgcatttttacgggctattgggaggatgttggaacaatcaaatcattctttgatgcaaacttggccctcactgagcagccttccaagtttgatttttatgatccaaaaacacctttcttcactgcaccccgatgcttgcctccgacgcaattggacaagtgcaagatgaaagatgcatttatctcagatggttgcttactgagagaatgcaacatcgagcattctgtgattggagtctgctcacgtgtcagctctggatgtgaactcaaggactccgtgatgatgggagcggacacctatgaaactgaagaagaagcttcaaagctactgttagctgggaaggtcccagttggaataggaaggaacacaaagataaggaactgtatcattgacatgaatgctaggattgggaagaacgtggtgatcacaaacagtaagggcatccaagaggctgatcacccggaagaagggtactacataaggtctggaatcgtggtgatcttgaagaatgcaaccatcaacgatgggtctgtcatatagatcggctgcgtttgcgtctacaaaacaagaacctacaatggtattgcatcgatggatcgtgtaaccttggtatggtaagagccgcttgacaggaagtcgagcgttcgggcgcaagatgcgttgtctggcatgctgttccttgaccatttgtgctgctagtatgtactgttataagctgccctagaagttgcagcaaacctttttatgaacctttgtatttccattacctgctttggatcaactatatctgtcatcctatatattactaaatttttacgtgtttttctaattcggtgctgcttttgggatctggcttcgatgaccgctcgacccttgg

SEQ ID NO: 37135 - DNA, 2403 bp, Zea Mays
atgggcgggcagtgctgtgagttagagcagtgtggcaatgttggtggtagtggtgacacccttcgggagcggaaggaggctggaacttcagattatttggcattctgtaaaagacccaacacccaaatgcttgaaaaaatatatcatgttgtaaaaattcgatctgcatttccttctgcaaactcttctggaagaaaggtgtctaaaactatgaacgggttacagaaaggtataaaccacggctgtgcattttggaagtatcatctatagatgtctgttgaggggaaagccgtacgccaacgttatttactcagaaacagcttcaacacacagttgtctgctttatgatggcatctccacccagttcatctccaccagtatgccctctcatactctatataaacacatcaacagcatcgcaattagccacaagatcacttcgggaggcaagtgcgatttcgatctcgcagccaccttttttttgttctgttgtgtatctagtagttggaggagatatgcagtttgcacttgcattggacacgaactcaggtcctcaccagataagatcttgtgagggtgatgggattgacaggttggaaaaattaagtattgggggcagaaagcaggagaaagctttgagaaataggtgctttggtggtagagttgctgcaactacacaatgtattcttacctcagatgcttgtcctgaaactcttcattctcaaacacagtcctctaggaaaaattatgctgatgcaaaccgtgtatctgctatcattttgggcggaggcactggatctcagctctttcctctgacaagcacaagagctacgcctgctgtacctgttggaggatgttacaggcttattgatatccctatgagtaactgcttcaacagtggtataaataagatatttgtgatgagtcagttcaattctacttcgcttaaccgccatattcatcgtacataccttgaaggcgggatcaactttgctgatggatctgtacaggtattagcggctacacaaatgcctgaagagccagctggatggttccagggtacagcagactctatcagaaaatttatctgggtactcgaggattattacagtcacaaatccattgacaacattgtaatcttgagtggcgatcagctttatcggatgaattacatggaacttgtgcagaaacatgtcgaggacgatgctgatatcactatatcatgtgctcctgttgatgagagccgagcttctaaaaatgggctagtgaagattgatcatactggacgtgtacttcaattctttgaaaaaccaaagggtgctgatttgaattctatgagagttgagaccaacttcctgagctatgctatagatgatgcacagaaatatccataccttgcatcaatgggcatttatgtcttcaagaaagatgcacttttagaccttctcaagtcaaaatatattcaattacatgactttggatctgaaatcctcccaagagctgtactagatcatagtgtgcaggcatgcatttttacgggctattgggaggatgttggaacaatcaaatcattctttgatgcaaacttggccctcactgagcagccttccaagtttgatttttatgatccaaaaacacctttcttcactgcaccccgatgcttgcctccgacgcaattggacaagtgcaagatgaaagatgcatttatctcagatggttgcttactgagagaatgcaacatcgagcattctgtgattggagtctgctcacgtgtcagctctggatgtgaactcaaggactccgtgatgatgggagcggacacctatgaaactgaagaagaagcttcaaagctactgttagctgggaaggtcccagttggaataggaaggaacacaaagataaggaactgtatcattgacatgaatgctaggattgggaagaacgtggtgatcacaaacagtaagggcatccaagaggctgatcacccggaagaagggtactacataaggtctggaatcgtggtgatcttgaagaatgcaaccatcaacgatgggtctgtcatatagatcggctgcgtttgcgtctacaaaacaagaacctacaatggtattgcatcgatggatcgtgtaaccttggtatggtaagagccgcttgacaggaagtcgagcgttcgggcgcaagatgcgttgtctggcatgctgttccttgaccatttgtgctgctagtatgtactgttataagctgccctagaagttgcagcaaacctttttatgaacctttgtatttccattacctgctttggatcaactatatctgtcatcctatatattactaaatttttacgtgtttttctaattcggtgctgcttttgggatctggcttcgatgaccgctcgacccttgg

SEQ ID NO: 37136 - DNA, 2268 bp, Zea Mays
atgggcgggcagtgctgtgagttagagcagtgtggcaatgttggtggtagtggtgacacccttcgggagcggaaggaggctggaacttcagattatttggcattctgtaaaagacccaacacccaaatgcttgaaaaaatatatcatgttgtaaaaattcgatctgcatttccttctgcaaactcttctggaagaaaggtgtctaaaactatgaacgggttacagaaagttcatctccaccagtatgccctctcatactctatataaacacatcaacagcatcgcaattagccacaagatcacttcgggaggcaagtgcgatttcgatctcgcagccaccttttttttgttctgttgtgtatctagtagttggaggagatatgcagtttgcacttgcattggacacgaactcaggtcctcaccagataagatcttgtgagggtgatgggattgacaggttggaaaaattaagtattgggggcagaaagcaggagaaagctttgagaaataggtgctttggtggtagagttgctgcaactacacaatgtattcttacctcagatgcttgtcctgaaactcttcattctcaaacacagtcctctaggaaaaattatgctgatgcaaaccgtgtatctgctatcattttgggcggaggcactggatctcagctctttcctctgacaagcacaagagctacgcctgctgtacctgttggaggatgttacaggcttattgatatccctatgagtaactgcttcaacagtggtataaataagatatttgtgatgagtcagttcaattctacttcgcttaaccgccatattcatcgtacataccttgaaggcgggatcaactttgctgatggatctgtacaggtattagcggctacacaaatgcctgaagagccagctggatggttccagggtacagcagactctatcagaaaatttatctgggtactcgaggattattacagtcacaaatccattgacaacattgtaatcttgagtggcgatcagctttatcggatgaattacatggaacttgtgcagaaacatgtcgaggacgatgctgatatcactatatcatgtgctcctgttgatgagagccgagcttctaaaaatgggctagtgaagattgatcatactggacgtgtacttcaattctttgaaaaaccaaagggtgctgatttgaattctatgagagttgagaccaacttcctgagctatgctatagatgatgcacagaaatatccataccttgcatcaatgggcatttatgtcttcaagaaagatgcacttttagaccttctcaagtcaaaatatattcaattacatgactttggatctgaaatcctcccaagagctgtactagatcatagtgtgcaggcatgcatttttacgggctattgggaggatgttggaacaatcaaatcattctttgatgcaaacttggccctcactgagcagccttccaagtttgatttttatgatccaaaaacacctttcttcactgcaccccgatgcttgcctccgacgcaattggacaagtgcaagatgaaagatgcatttatctcagatggttgcttactgagagaatgcaacatcgagcattctgtgattggagtctgctcacgtgtcagctctggatgtgaactcaaggactccgtgatgatgggagcggacacctatgaaactgaagaagaagcttcaaagctactgttagctgggaaggtcccagttggaataggaaggaacacaaagataaggaactgtatcattgacatgaatgctaggattgggaagaacgtggtgatcacaaacagtaagggcatccaagaggctgatcacccggaagaagggtactacataaggtctggaatcgtggtgatcttgaagaatgcaaccatcaacgatgggtctgtcatatagatcggctgcgtttgcgtctacaaaacaagaacctacaatggtattgcatcgatggatcgtgtaaccttggtatggtaagagccgcttgacaggaagtcgagcgttcgggcgcaagatgcgttgtctggcatgctgttccttgaccatttgtgctgctagtatgtactgttataagctgccctagaagttgcagcaaacctttttatgaacctttgtatttccattacctgctttggatcaactatatctgtcatcctatatattactaaatttttacgtgtttttctaattcggtgctgcttttgggatctggcttcgatgaccgctcgacccttgg

SEQ ID NO: 37137 - DNA, 2466 bp, Zea Mays
atgggcgggcagtgctgtgagttagagcagtgtggcaatgttggtggtagtggtgacacccttcgggagcggaaggaggctggaacttcaggcaaactcttctggaagaaaggtgtctaaaactatgaacgggttacagaaagttcatctccaccagtatgccctctcatactctatataaacacatcaacagcatcgcaattagccacaagatcacttcgggaggcaagtgcgatttcgatctcgcagccaccttttttttgttctgttgtgtatctagtagttggaggagatatgcagtttgcacttgcattggacacgaactcaggtcctcaccagataagatcttgtgagggtgatgggattgacaggttggaaaaattaagtattgggggcagaaagcaggagaaagctttgagaaataggtgctttggtggtagagttgctgcaactacacaatgtattcttacctcagatgcttgtcctgaaactcttcattctcaaacacagtcctctaggaaaaattatgctgatgcaaaccgtgtatctgctatcattttgggcggaggcactggatctcagctctttcctctgacaagcacaagagctacgcctgctgtaagggataacactgaacatccaacgttgattactctattatagtattatacagactgtacttttcgaatttatcttagttttctacaatatttagtggattcttctcattttcaagatacacaattgatccataatcgaagtggtatgtaagacagtgagttaaaagattatattttttgggagacttccagtcaaattttcttagaagtttttttggtccagatgttcataaagtcgccgctttcatactttttttaattttttaattggtgcactattaggtacctgttggaggatgttacaggcttattgatatccctatgagtaactgcttcaacagtggtataaataagatatttgtgatgagtcagttcaattctacttcgcttaaccgccatattcatcgtacataccttgaaggcgggatcaactttgctgatggatctgtacaggtattagcggctacacaaatgcctgaagagccagctggatggttccagggtacagcagactctatcagaaaatttatctgggtactcgaggattattacagtcacaaatccattgacaacattgtaatcttgagtggcgatcagctttatcggatgaattacatggaacttgtgcagaaacatgtcgaggacgatgctgatatcactatatcatgtgctcctgttgatgagagccgagcttctaaaaatgggctagtgaagattgatcatactggacgtgtacttcaattctttgaaaaaccaaagggtgctgatttgaattctatgagagttgagaccaacttcctgagctatgctatagatgatgcacagaaatatccataccttgcatcaatgggcatttatgtcttcaagaaagatgcacttttagaccttctcaagtcaaaatatattcaattacatgactttggatctgaaatcctcccaagagctgtactagatcatagtgtgcaggcatgcatttttacgggctattgggaggatgttggaacaatcaaatcattctttgatgcaaacttggccctcactgagcagccttccaagtttgatttttatgatccaaaaacacctttcttcactgcaccccgatgcttgcctccgacgcaattggacaagtgcaagatgaaagatgcatttatctcagatggttgcttactgagagaatgcaacatcgagcattctgtgattggagtctgctcacgtgtcagctctggatgtgaactcaaggactccgtgatgatgggagcggacacctatgaaactgaagaagaagcttcaaagctactgttagctgggaaggtcccagttggaataggaaggaacacaaagataaggaactgtatcattgacatgaatgctaggattgggaagaacgtggtgatcacaaacagtaagggcatccaagaggctgatcacccggaagaagggtactacataaggtctggaatcgtggtgatcttgaagaatgcaaccatcaacgatgggtctgtcatatagatcggctgcgtttgcgtctacaaaacaagaacctacaatggtattgcatcgatggatcgtgtaaccttggtatggtaagagccgcttgacaggaagtcgagcgttcgggcgcaagatgcgttgtctggcatgctgttccttgaccatttgtgctgctagtatgtactgttataagctgccctagaagttgcagcaaacctttttatgaacctttgtatttccattacctgctttggatcaactatatctgtcatcctatatattactaaatttttacgtgtttttctaattcggtgctgcttttgggatctggcttcgatgaccgctcgacccttgg

SEQ ID NO: 37138 - DNA, 2254 bp, Zea Mays
atgggcgggcagtgctgtgagttagagcagtgtggcaatgttggtggtagtggtgacacccttcgggagcggaaggaggctggaacttcagattatttggcattctgtaaaagacccaacacccaaatgcttgaaaaaatatatcatgttgtaaaaattcgatctgcatttccttctgcaaactcttctggaagaaaggtgtctaaaactatgaacgggttacagaaagtatgccctctcatactctatataaacacatcaacagcatcgcaattagccacaagatcacttcgggaggcaagtgcgatttcgatctcgcagccaccttttttttgttctgttgtgtatctagtagttggaggagatatgcagtttgcacttgcattggacacgaactcaggtcctcaccagataagatcttgtgagggtgatgggattgacaggttggaaaaattaagtattgggggcagaaagcaggagaaagctttgagaaataggtgctttggtggtagagttgctgcaactacacaatgtattcttacctcagatgcttgtcctgaaactcttcattctcaaacacagtcctctaggaaaaattatgctgatgcaaaccgtgtatctgctatcattttgggcggaggcactggatctcagctctttcctctgacaagcacaagagctacgcctgctgtacctgttggaggatgttacaggcttattgatatccctatgagtaactgcttcaacagtggtataaataagatatttgtgatgagtcagttcaattctacttcgcttaaccgccatattcatcgtacataccttgaaggcgggatcaactttgctgatggatctgtacaggtattagcggctacacaaatgcctgaagagccagctggatggttccagggtacagcagactctatcagaaaatttatctgggtactcgaggattattacagtcacaaatccattgacaacattgtaatcttgagtggcgatcagctttatcggatgaattacatggaacttgtgcagaaacatgtcgaggacgatgctgatatcactatatcatgtgctcctgttgatgagagccgagcttctaaaaatgggctagtgaagattgatcatactggacgtgtacttcaattctttgaaaaaccaaagggtgctgatttgaattctatgagagttgagaccaacttcctgagctatgctatagatgatgcacagaaatatccataccttgcatcaatgggcatttatgtcttcaagaaagatgcacttttagaccttctcaagtcaaaatatattcaattacatgactttggatctgaaatcctcccaagagctgtactagatcatagtgtgcaggcatgcatttttacgggctattgggaggatgttggaacaatcaaatcattctttgatgcaaacttggccctcactgagcagccttccaagtttgatttttatgatccaaaaacacctttcttcactgcaccccgatgcttgcctccgacgcaattggacaagtgcaagatgaaagatgcatttatctcagatggttgcttactgagagaatgcaacatcgagcattctgtgattggagtctgctcacgtgtcagctctggatgtgaactcaaggactccgtgatgatgggagcggacacctatgaaactgaagaagaagcttcaaagctactgttagctgggaaggtcccagttggaataggaaggaacacaaagataaggaactgtatcattgacatgaatgctaggattgggaagaacgtggtgatcacaaacagtaagggcatccaagaggctgatcacccggaagaagggtactacataaggtctggaatcgtggtgatcttgaagaatgcaaccatcaacgatgggtctgtcatatagatcggctgcgtttgcgtctacaaaacaagaacctacaatggtattgcatcgatggatcgtgtaaccttggtatggtaagagccgcttgacaggaagtcgagcgttcgggcgcaagatgcgttgtctggcatgctgttccttgaccatttgtgctgctagtatgtactgttataagctgccctagaagttgcagcaaacctttttatgaacctttgtatttccattacctgctttggatcaactatatctgtcatcctatatattactaaatttttacgtgtttttctaattcggtgctgcttttgggatctggcttcgatgaccgctcgacccttgg

SEQ ID NO: 37139 - DNA, 2213 bp, Zea Mays
atgggcgggcagtgctgtgagttagagcagtgtggcaatgttggtggtagtggtgacacccttcgggagcggaaggaggctggaacttcagattatttggcattctgtaaaagacccaacacccaaatgcttgaaaaaatatatcatgttgtaaaaattcgatctgcatttccttctgcaaactcttctggaagaaaggtgtctaaaactatgaacgggttacagaaagcaaaggccaagggcaaaattggaacactaatgatggttggttgcatgagtctgtcgattacttgcaagaaatgtgaacctttgtttctttcatctccaccagtatgccctctcatactctatataaacacatcaacagcatcgcaattagccacaagatcacttcgggaggcaagtgcgatttcgatctcgcagccaccttttttttgttctgttgtgtatctagtagttggaggagatatgcagtttgcacttgcattggacacgaactcaggtcctcaccagataagatcttgtgagggtgatgggattgacaggttggaaaaattaagtattgggggcagaaagcaggagaaagctttgagaaataggtgctttggtggtagagttgctgcaactacacaatgtattcttacctcagatgcttgtcctgaaactcttgtacctgttggaggatgttacaggcttattgatatccctatgagtaactgcttcaacagtggtataaataagatatttgtgatgagtcagttcaattctacttcgcttaaccgccatattcatcgtacataccttgaaggcgggatcaactttgctgatggatctgtacaggtattagcggctacacaaatgcctgaagagccagctggatggttccagggtacagcagactctatcagaaaatttatctgggtactcgaggattattacagtcacaaatccattgacaacattgtaatcttgagtggcgatcagctttatcggatgaattacatggaacttgtgcagaaacatgtcgaggacgatgctgatatcactatatcatgtgctcctgttgatgagagccgagcttctaaaaatgggctagtgaagattgatcatactggacgtgtacttcaattctttgaaaaaccaaaggagagttgagaccaacttcctgagctatgctatagatgatgcacagaaatatccataccttgcatcaatgggcatttatgtcttcaagaaagatgcacttttagaccttctcaagtcaaaatatattcaattacatgactttggatctgaaatcctcccaagagctgtactagatcatagtgtgcaggcatgcatttttacgggctattgggaggatgttggaacaatcaaatcattctttgatgcaaacttggccctcactgagcagccttccaagtttgatttttatgatccaaaaacacctttcttcactgcaccccgatgcttgcctccgacgcaattggacaagtgcaagatgaaagatgcatttatctcagatggttgcttactgagagaatgcaacatcgagcattctgtgattggagtctgctcacgtgtcagctctggatgtgaactcaaggactccgtgatgatgggagcggacacctatgaaactgaagaagaagcttcaaagctactgttagctgggaaggtcccagttggaataggaaggaacacaaagataaggaactgtatcattgacatgaatgctaggattgggaagaacgtggtgatcacaaacagtaagggcatccaagaggctgatcacccggaagaagggtactacataaggtctggaatcgtggtgatcttgaagaatgcaaccatcaacgatgggtctgtcatatagatcggctgcgtttgcgtctacaaaacaagaacctacaatggtattgcatcgatggatcgtgtaaccttggtatggtaagagccgcttgacaggaagtcgagcgttcgggcgcaagatgcgttgtctggcatgctgttccttgaccatttgtgctgctagtatgtactgttataagctgccctagaagttgcagcaaacctttttatgaacctttgtatttccattacctgctttggatcaactatatctgtcatcctatatattactaaatttttacgtgtttttctaattcggtgctgcttttgggatctggcttcgatgaccgctcgacccttgg

SEQ ID NO: 37140 - DNA, 2336 bp, Zea Mays
atgggcgggcagtgctgtgagttagagcagtgtggcaatgttggtggtagtggtgacacccttcgggagcggaaggaggctggaacttcagattatttggcattctgtaaaagacccaacacccaaatgcttgaaaaaatatatcatgttgtaaaaattcgatctgcatttccttctgcaaactcttctggaagaaaggtgtctaaaactatgaacgggttacagaaagcaaaggccaagggcaaaattggaacactaatgatggttggttgcatgagtctgtcgattacttgcaagaaatgtgaacctttgtttctttcatctccaccagtatgccctctcatactctatataaacacatcaacagcatcgcaattagccacaagatcacttcgggaggcaagtgcgatttcgatctcgcagccaccttttttttgttctgttgtgtatctagtagttggaggagatatgcagtttgcacttgcattggacacgaactcaggtcctcaccagataagatcttgtgagggtgatgggattgacaggttggaaaaattaagtattgggggcagaaagcaggagaaagctttgagaaataggtgctttggtggtagagttgctgcaactacacaatgtattcttacctcagatgcttgtcctgaaactcttcattctcaaacacagtcctctaggaaaaattatgctgatgcaaaccgtgtatctgctatcattttgggcggaggcactggatctcagctctttcctctgacaagcacaagagctacgcctgctgtacctgttggaggatgttacaggcttattgatatccctatgagtaactgcttcaacagtggtataaataagatatttgtgatgagtcagttcaattctacttcgcttaaccgccatattcatcgtacataccttgaaggcgggatcaactttgctgatggatctgtacaggtattagcggctacacaaatgcctgaagagccagctggatggttccagggtacagcagactctatcagaaaatttatctgggtactcgaggattattacagtcacaaatccattgacaacattgtaatcttgagtggcgatcagctttatcggatgaattacatggaacttgtgcagaaacatgtcgaggacgatgctgatatcactatatcatgtgctcctgttgatgagagccgagcttctaaaaatgggctagtgaagattgatcatactggacgtgtacttcaattctttgaaaaaccaaaggagagttgagaccaacttcctgagctatgctatagatgatgcacagaaatatccataccttgcatcaatgggcatttatgtcttcaagaaagatgcacttttagaccttctcaagtcaaaatatattcaattacatgactttggatctgaaatcctcccaagagctgtactagatcatagtgtgcaggcatgcatttttacgggctattgggaggatgttggaacaatcaaatcattctttgatgcaaacttggccctcactgagcagccttccaagtttgatttttatgatccaaaaacacctttcttcactgcaccccgatgcttgcctccgacgcaattggacaagtgcaagatgaaagatgcatttatctcagatggttgcttactgagagaatgcaacatcgagcattctgtgattggagtctgctcacgtgtcagctctggatgtgaactcaaggactccgtgatgatgggagcggacacctatgaaactgaagaagaagcttcaaagctactgttagctgggaaggtcccagttggaataggaaggaacacaaagataaggaactgtatcattgacatgaatgctaggattgggaagaacgtggtgatcacaaacagtaagggcatccaagaggctgatcacccggaagaagggtactacataaggtctggaatcgtggtgatcttgaagaatgcaaccatcaacgatgggtctgtcatatagatcggctgcgtttgcgtctacaaaacaagaacctacaatggtattgcatcgatggatcgtgtaaccttggtatggtaagagccgcttgacaggaagtcgagcgttcgggcgcaagatgcgttgtctggcatgctgttccttgaccatttgtgctgctagtatgtactgttataagctgccctagaagttgcagcaaacctttttatgaacctttgtatttccattacctgctttggatcaactatatctgtcatcctatatattactaaatttttacgtgtttttctaattcggtgctgcttttgggatctggcttcgatgaccgctcgacccttgg

SEQ ID NO: 37141 - DNA, 2576 bp, Zea Mays
atgggcgggcagtgctgtgagttagagcagtgtggcaatgttggtggtagtggtgacacccttcgggagcggaaggaggctggaacttcaggcaaactcttctggaagaaaggtgtctaaaactatgaacgggttacagaaaggtataaaccacggctgtgcattttggaagtatcatctatagatgtctgttgaggggaaagccgtacgccaacgttatttactcagaaacagcttcaacacacagttgtctgctttatgatggcatctccacccaggcacccaccatcacctatctctcgtgcctgtttattttcttgccctttctgatcataaaaaatcattaagagtttgcaaacatgcataggcatatcaatatgctcatttattaatttgctagcagatcatcttcctactctttactttatttattgtttgaaaaatatgtcctgcacctagggagctcgtatacagtaccaatgcatcttcattaaatgtgaatttcagaaaggaagtaggaacctatgagagtatttttcaaaattaattagcggcttctattatgtttatagcaaaggccaagggcaaaattggaacactaatgatggttggttgcatgagtctgtcgattacttgcaagaaatgtgaacctttgtttctttcatctccaccagtatgccctctcatactctatataaacacatcaacagcatcgcaattagccacaagatcacttcgggaggcaagtgcgatttcgatctcgcagccaccttttttttgttctgttgtgtatctagtagttggaggagatatgcagtttgcacttgcattggacacgaactcaggtcctcaccagataagatcttgtgagggtgatgggattgacaggttggaaaaattaagtattgggggcagaaagcaggagaaagctttgagaaataggtgctttggtggtagagttgctgcaactacacaatgtattcttacctcagatgcttgtcctgaaactcttgtacctgttggaggatgttacaggcttattgatatccctatgagtaactgcttcaacagtggtataaataagatatttgtgatgagtcagttcaattctacttcgcttaaccgccatattcatcgtacataccttgaaggcgggatcaactttgctgatggatctgtacaggtattagcggctacacaaatgcctgaagagccagctggatggttccagggtacagcagactctatcagaaaatttatctgggtactcgaggattattacagtcacaaatccattgacaacattgtaatcttgagtggcgatcagctttatcggatgaattacatggaacttgtgcagaaacatgtcgaggacgatgctgatatcactatatcatgtgctcctgttgatgagagccgagcttctaaaaatgggctagtgaagattgatcatactggacgtgtacttcaattctttgaaaaaccaaagggtgctgatttgaattctatgagagttgagaccaacttcctgagctatgctatagatgatgcacagaaatatccataccttgcatcaatgggcatttatgtcttcaagaaagatgcacttttagaccttctcaagtcaaaatatattcaattacatgactttggatctgaaatcctcccaagagctgtactagatcatagtgtgcaggcatgcatttttacgggctattgggaggatgttggaacaatcaaatcattctttgatgcaaacttggccctcactgagcagccttccaagtttgatttttatgatccaaaaacacctttcttcactgcaccccgatgcttgcctccgacgcaattggacaagtgcaagatgaaagatgcatttatctcagatggttgcttactgagagaatgcaacatcgagcattctgtgattggagtctgctcacgtgtcagctctggatgtgaactcaaggactccgtgatgatgggagcggacacctatgaaactgaagaagaagcttcaaagctactgttagctgggaaggtcccagttggaataggaaggaacacaaagataaggaactgtatcattgacatgaatgctaggattgggaagaacgtggtgatcacaaacagtaagggcatccaagaggctgatcacccggaagaagggtactacataaggtctggaatcgtggtgatcttgaagaatgcaaccatcaacgatgggtctgtcatatagatcggctgcgtttgcgtctacaaaacaagaacctacaatggtattgcatcgatggatcgtgtaaccttggtatggtaagagccgcttgacaggaagtcgagcgttcgggcgcaagatgcgttgtctggcatgctgttccttgaccatttgtgctgctagtatgtactgttataagctgccctagaagttgcagcaaacctttttatgaacctttgtatttccattacctgctttggatcaactatatctgtcatcctatatattactaaatttttacgtgtttttctaattcggtgctgcttttgggatctggcttcgatgaccgctcgacccttgg

SEQ ID NO: 37142 - DNA, 3086 bp, Zea Mays
ggggcagaccggcaggcgaggcctatgggcgggcagtgctgtgagttagagcagtgtggcaatgttggtggtagtggtgacacccttcgggagcggaaggaggctggaacttcagattatttggcattctgtaaaagacccaacacccaaatgcttgaaaaaatatatcatgttgtaaaaattcgatctgcatttccttctgcaaactcttctggaagaaaggtgtctaaaactatgaacgggttacagaaaggtataaaccacggctgtgcattttggaagtatcatctatagatgtctgttgaggggaaagccgtacgccaacgttatttactcagaaacagcttcaacacacagttgtctgctttatgatggcatctccacccaggcacccaccatcacctatctctcgtgcctgtttattttcttgccctttctgatcataaaaaatcattaagagtttgcaaacatgcataggcatatcaatatgctcatttattaatttgctagcagatcatcttcctactctttactttatttattgtttgaaaaatatgtcctgcacctagggagctcgtatacagtaccaatgcatcttcattaaatgtgaatttcagaaaggaagtaggaacctatgagagtatttttcaaaattaattagcggcttctattatgtttatagcaaaggccaagggcaaaattggaacactaatgatggttggttgcatgagtctgtcgattacttgcaagaaatgtgaacctttgtttctgtgcgtgggcataaaacaaacagcttctagcctcttttacgttcatctccaccagtatgccctctcatactctatataaacacatcaacagcatcgcaattagccacaagatcacttcgggaggcaagtgcgatttcgatctcgcagccaccttttttttgttctgttgtgtatctagtagttggaggagatatgcagtttgcacttgcattggacacgaactcaggtcctcaccagataagatcttgtgagggtgatgggattgacaggttggaaaaattaagtattgggggcagaaagcaggagaaagctttgagaaataggtgctttggtggtagagttgctgcaactacacaatgtattcttacctcagatgcttgtcctgaaactcttcattctcaaacacagtcctctaggaaaaattatgctgatgcaaaccgtgtatctgctatcattttgggcggaggcactggatctcagctctttcctctgacaagcacaagagctacgcctgctgtaagggataacactgaacatccaacgttgattactctattatagtattatacagactgtacttttcgaatttatcttagttttctacaatatttagtggattcttctcattttcaagatacacaattgatccataatcgaagtggtatgtaagacagtgagttaaaagattatattttttgggagacttccagtcaaattttcttagaagtttttttggtccagatgttcataaagtcgccgctttcatactttttttaattttttaattggtgcactattaggtacctgttggaggatgttacaggcttattgatatccctatgagtaactgcttcaacagtggtataaataagatatttgtgatgagtcagttcaattctacttcgcttaaccgccatattcatcgtacataccttgaaggcgggatcaactttgctgatggatctgtacaggtattagcggctacacaaatgcctgaagagccagctggatggttccagggtacagcagactctatcagaaaatttatctgggtactcgaggattattacagtcacaaatccattgacaacattgtaatcttgagtggcgatcagctttatcggatgaattacatggaacttgtgcagaaacatgtcgaggacgatgctgatatcactatatcatgtgctcctgttgatgagagccgagcttctaaaaatgggctagtgaagattgatcatactggacgtgtacttcaattctttgaaaaaccaaagggtgctgatttgaattctatgagagttgagaccaacttcctgagctatgctatagatgatgcacagaaatatccataccttgcatcaatgggcatttatgtcttcaagaaagatgcacttttagaccttctcaaagctgtactagatcatagtgtgcaggcatgcatttttacgggctattgggaggatgttggaacaatcaaatcattctttgatgcaaacttggccctcactgagcagccttccaagtttgatttttatgatccaaaaacacctttcttcactgcaccccgatgcttgcctccgacgcaattggacaagtgcaagatgaaagatgcatttatctcagatggttgcttactgagagaatgcaacatcgagcattctgtgattggagtctgctcacgtgtcagctctggatgtgaactcaaggactccgtgatgatgggagcggacacctatgaaactgaagaagaagcttcaaagctactgttagctgggaaggtcccagttggaataggaaggaacacaaagataaggaactgtatcattgacatgaatgctaggattgggaagaacgtggtgatcacaaacagtaagggcatccaagaggctgatcacccggaagaagggtactacataaggtctggaatcgtggtgatcttgaagaatgcaaccatcaacgatgggtctgtcatatagatcggctgcgtttgcgtctacaaaacaagaacctacaatggtattgcatcgatggatcgtgtaaccttggtatggtaagagccgcttgacaggaagtcgagcgttcgggcgcaagatgcgttgtctggcatgctgttccttgaccatttgtgctgctagtatgtactgttataagctgccctagaagttgcagcaaacctttttatgaacctttgtatttccattacctgctttggatcaactatatctgtcatcctatatattactaaatttttacgtgtttttctaattcggtgctgcttttgggatctggcttcgatgaccgctcgacccttgg

SEQ ID NO: 37143 - DNA, 2812 bp, Zea Mays
cgtacatccgcacgtcgatgctgaggccagccagcagcggcatgacagattgcggcgtcaggagattgtgccagtaggtggcggggctgggggcagaccggcaggcgaggcctatgggcgggcagtgctgtgagttagagcagtgtggcaatgttggtggtagtggtgacacccttcgggagcggaaggaggctggaacttcaggcaaactcttctggaagaaaggtgtctaaaactatgaacgggttacagaaaggtataaaccacggctgtgcattttggaagtatcatctatagatgtctgttgaggggaaagccgtacgccaacgttatttactcagaaacagcttcaacacacagttgtctgctttatgatggcatctccacccaggcacccaccatcacctatctctcgtgcctgtttattttcttgccctttctgatcataaaaaatcattaagagtttgcaaacatgcataggcatatcaatatgctcatttattaatttgctagcagatcatcttcctactctttactttatttattgtttgaaaaatatgtcctgcacctagggagctcgtatacagtaccaatgcatcttcattaaatgtgaatttcagaaaggaagtaggaacctatgagagtatttttcaaaattaattagcggcttctattatgtttatagcaaaggccaagggcaaaattggaacactaatgatggttggttgcatgagtctgtcgattacttgcaagaaatgtgaacctttgtttctttcatctccaccagtatgccctctcatactctatataaacacatcaacagcatcgcaattagccacaagatcacttcgggaggcaagtgcgatttcgatctcgcagccaccttttttttgttctgttgtgtatctagtagttggaggagatatgcagtttgcacttgcattggacacgaactcaggtcctcaccagataagatcttgtgagggtgatgggattgacaggttggaaaaattaagtattgggggcagaaagcaggagaaagctttgagaaataggtgctttggtggtagagttgctgcaactacacaatgtattcttacctcagatgcttgtcctgaaactcttcattctcaaacacagtcctctaggaaaaattatgctgatgcaaaccgtgtatctgctatcattttgggcggaggcactggatctcagctctttcctctgacaagcacaagagctacgcctgctgtacctgttggaggatgttacaggcttattgatatccctatgagtaactgcttcaacagtggtataaataagatatttgtgatgagtcagttcaattctacttcgcttaaccgccatattcatcgtacataccttgaaggcgggatcaactttgctgatggatctgtacaggtattagcggctacacaaatgcctgaagagccagctggatggttccagggtacagcagactctatcagaaaatttatctgggtactcgaggattattacagtcacaaatccattgacaacattgtaatcttgagtggcgatcagctttatcggatgaattacatggaacttgtgcagaaacatgtcgaggacgatgctgatatcactatatcatgtgctcctgttgatgagagccgagcttctaaaaatgggctagtgaagattgatcatactggacgtgtacttcaattctttgaaaaaccaaagggtgctgatttgaattctatgagagttgagaccaacttcctgagctatgctatagatgatgcacagaaatatccataccttgcatcaatgggcatttatgtcttcaagaaagatgcacttttagaccttctcaagtcaaaatatattcaattacatgactttggatctgaaatcctcccaagagctgtactagatcatagtgtgcaggcatgcatttttacgggctattgggaggatgttggaacaatcaaatcattctttgatgcaaacttggccctcactgagcagccttccaagtttgatttttatgatccaaaaacacctttcttcactgcaccccgatgcttgcctccgacgcaattggacaagtgcaagatgaaagatgcatttatctcagatggttgcttactgagagaatgcaacatcgagcattctgtgattggagtctgctcacgtgtcagctctggatgtgaactcaaggactccgtgatgatgggagcggacacctatgaaactgaagaagaagcttcaaagctactgttagctgggaaggtcccagttggaataggaaggaacacaaagataaggaactgtatcattgacatgaatgctaggattgggaagaacgtggtgatcacaaacagtaagggcatccaagaggctgatcacccggaagaagggtactacataaggtctggaatcgtggtgatcttgaagaatgcaaccatcaacgatgggtctgtcatatagatcggctgcgtttgcgtctacaaaacaagaacctacaatggtattgcatcgatggatcgtgtaaccttggtatggtaagagccgcttgacaggaagtcgagcgttcgggcgcaagatgcgttgtctggcatgctgttccttgaccatttgtgctgctagtatgtactgttataagctgccctagaagttgcagcaaacctttttatgaacctttgtatttccattacctgctttggatcaactatatctgtcatcctatatattactaaatttttacgtgtttttctaattcggtgctgcttttgggatctggcttcgatgaccgctcgacccttgg

SEQ ID NO: 37144 - DNA, 3322 bp, Zea Mays
cgctgccccccctgtccgcctgtccctagacctgttttgcgtcggcggggaagacagttgacaggaaggacacgatcttcgtgtccgatgccgatcttcatgcgagcagcgagccactacgttgcgctgccagtgtcggctatggtatccaggcattcgttgtgcacgttgacgatgagctcgaagccggtccgggtgaacgcgagcagcacggtgaggtcaacgtcgtacatccgcacgtcgatgctgaggccagccagcagcggcatgacagattgcggcgtcaggagattgtgccagtaggtggcggggctgggggcagaccggcaggcgaggcctatgggcgggcagtgctgtgagttagagcagtgtggcaatgttggtggtagtggtgacacccttcgggagcggaaggaggctggaacttcaggcaaactcttctggaagaaaggtgtctaaaactatgaacgggttacagaaaggtataaaccacggctgtgcattttggaagtatcatctatagatgtctgttgaggggaaagccgtacgccaacgttatttactcagaaacagcttcaacacacagttgtctgctttatgatggcatctccacccaggcacccaccatcacctatctctcgtgcctgtttattttcttgccctttctgatcataaaaaatcattaagagtttgcaaacatgcataggcatatcaatatgctcatttattaatttgctagcagatcatcttcctactctttactttatttattgtttgaaaaatatgtcctgcacctagggagctcgtatacagtaccaatgcatcttcattaaatgtgaatttcagaaaggaagtaggaacctatgagagtatttttcaaaattaattagcggcttctattatgtttatagcaaaggccaagggcaaaattggaacactaatgatggttggttgcatgagtctgtcgattacttgcaagaaatgtgaacctttgtttctttcatctccaccagtatgccctctcatactctatataaacacatcaacagcatcgcaattagccacaagatcacttcgggaggcaagtgcgatttcgatctcgcagccaccttttttttgttctgttgtgtatctagtagttggaggagatatgcagtttgcacttgcattggacacgaactcaggtcctcaccagataagatcttgtgagggtgatgggattgacaggttggaaaaattaagtattgggggcagaaagcaggagaaagctttgagaaataggtgctttggtggtagagttgctgcaactacacaatgtattcttacctcagatgcttgtcctgaaactcttcattctcaaacacagtcctctaggaaaaattatgctgatgcaaaccgtgtatctgctatcattttgggcggaggcactggatctcagctctttcctctgacaagcacaagagctacgcctgctgtaagggataacactgaacatccaacgttgattactctattatagtattatacagactgtacttttcgaatttatcttagttttctacaatatttagtggattcttctcattttcaagatacacaattgatccataatcgaagtggtatgtaagacagtgagttaaaagattatattttttgggagacttccagtcaaattttcttagaagtttttttggtccagatgttcataaagtcgccgctttcatactttttttaattttttaattggtgcactattaggtacctgttggaggatgttacaggcttattgatatccctatgagtaactgcttcaacagtggtataaataagatatttgtgatgagtcagttcaattctacttcgcttaaccgccatattcatcgtacataccttgaaggcgggatcaactttgctgatggatctgtacaggtattagcggctacacaaatgcctgaagagccagctggatggttccagggtacagcagactctatcagaaaatttatctgggtactcgaggattattacagtcacaaatccattgacaacattgtaatcttgagtggcgatcagctttatcggatgaattacatggaacttgtgcagaaacatgtcgaggacgatgctgatatcactatatcatgtgctcctgttgatgagagccgagcttctaaaaatgggctagtgaagattgatcatactggacgtgtacttcaattctttgaaaaaccaaagggtgctgatttgaattctatgagagttgagaccaacttcctgagctatgctatagatgatgcacagaaatatccataccttgcatcaatgggcatttatgtcttcaagaaagatgcacttttagaccttctcaagtcaaaatatattcaattacatgactttggatctgaaatcctcccaagagctgtactagatcatagtgtgcaggcatgcatttttacgggctattgggaggatgttggaacaatcaaatcattctttgatgcaaacttggccctcactgagcagccttccaagtttgatttttatgatccaaaaacacctttcttcactgcaccccgatgcttgcctccgacgcaattggacaagtgcaagatgaaagatgcatttatctcagatggttgcttactgagagaatgcaacatcgagcattctgtgattggagtctgctcacgtgtcagctctggatgtgaactcaaggactccgtgatgatgggagcggacacctatgaaactgaagaagaagcttcaaagctactgttagctgggaaggtcccagttggaataggaaggaacacaaagataaggaactgtatcattgacatgaatgctaggattgggaagaacgtggtgatcacaaacagtaagggcatccaagaggctgatcacccggaagaagggtactacataaggtctggaatcgtggtgatcttgaagaatgcaaccatcaacgatgggtctgtcatatagatcggctgcgtttgcgtctacaaaacaagaacctacaatggtattgcatcgatggatcgtgtaaccttggtatggtaagagccgcttgacaggaagtcgagcgttcgggcgcaagatgcgttgtctggcatgctgttccttgaccatttgtgctgctagtatgtactgttataagctgccctagaagttgcagcaaacctttttatgaacctttgtatttccattacctgctttggatcaactatatctgtcatcctatatattactaaatttttacgtgtttttctaattcggtgctgcttttgggatctggcttcgatgaccgctcgacccttgg

SEQ ID NO: 37145 - DNA, 2561 bp, Zea Mays
ctcaagctataagttagtgttagtatggatccggtaaaaattatcctggcttcgcccctcgatctggaggctggtggccgctggcgcagcgtacgcaaggcagcatccgacggcgagctcgtcgcgaggttctacttcacctacggcgggcgcagcgtggtgatcgggccaccgcgtgcgtgctgtgtgcgccggagtttctggacatggcggcggcggcacaccatcgtggacgccgtgaagtgcaagcgcctgcttccgctcgcgggctccaccgacgaggtcgacagctggggcatcgccgtcgaggacagcgcgagcgtggagtcgttgagcacgaggtggacggggcatgccgagctgctccgcggcaccgtgcgctccaatagccgaccacgctttcgagctcttcaaggattgatcatccgcaacctgcctcagcaatcggagtgttgaggtgctcgcgaccgccgcgcgcgtgcatgccatccacgaggcgtagtagcccctgacgctgcaggcaaactcttctggaagaaaggtgtctaaaactatgaacgggttacagaaagcatcgcaattagccacaagatcacttcgggaggcaagtgcgatttcgatctcgcagccaccttttttttgttctgttgtgtatctagtagttggaggagatatgcagtttgcacttgcattggacacgaactcaggtcctcaccagataagatcttgtgagggtgatgggattgacaggttggaaaaattaagtattgggggcagaaagcaggagaaagctttgagaaataggtgctttggtggtagagttgctgcaactacacaatgtattcttacctcagatgcttgtcctgaaactcttcattctcaaacacagtcctctaggaaaaattatgctgatgcaaaccgtgtatctgctatcattttgggcggaggcactggatctcagctctttcctctgacaagcacaagagctacgcctgctgtacctgttggaggatgttacaggcttattgatatccctatgagtaactgcttcaacagtggtataaataagatatttgtgatgagtcagttcaattctacttcgcttaaccgccatattcatcgtacataccttgaaggcgggatcaactttgctgatggatctgtacaggtattagcggctacacaaatgcctgaagagccagctggatggttccagggtacagcagactctatcagaaaatttatctgggtactcgaggattattacagtcacaaatccattgacaacattgtaatcttgagtggcgatcagctttatcggatgaattacatggaacttgtgcagaaacatgtcgaggacgatgctgatatcactatatcatgtgctcctgttgatgagagccgagcttctaaaaatgggctagtgaagattgatcatactggacgtgtacttcaattctttgaaaaaccaaagggtgctgatttgaattctatgagagttgagaccaacttcctgagctatgctatagatgatgcacagaaatatccataccttgcatcaatgggcatttatgtcttcaagaaagatgcacttttagaccttctcaagtcaaaatatattcaattacatgactttggatctgaaatcctcccaagagctgtactagatcatagtgtgcaggcatgcatttttacgggctattgggaggatgttggaacaatcaaatcattctttgatgcaaacttggccctcactgagcagccttccaagtttgatttttatgatccaaaaacacctttcttcactgcaccccgatgcttgcctccgacgcaattggacaagtgcaagatgaaagatgcatttatctcagatggttgcttactgagagaatgcaacatcgagcattctgtgattggagtctgctcacgtgtcagctctggatgtgaactcaaggactccgtgatgatgggagcggacacctatgaaactgaagaagaagcttcaaagctactgttagctgggaaggtcccagttggaataggaaggaacacaaagataaggaactgtatcattgacatgaatgctaggattgggaagaacgtggtgatcacaaacagtaagggcatccaagaggctgatcacccggaagaagggtactacataaggtctggaatcgtggtgatcttgaagaatgcaaccatcaacgatgggtctgtcatatagatcggctgcgtttgcgtctacaaaacaagaacctacaatggtattgcatcgatggatcgtgtaaccttggtatggtaagagccgcttgacaggaagtcgagcgttcgggcgcaagatgcgttgtctggcatgctgttccttgaccatttgtgctgctagtatgtactgttataagctgccctagaagttgcagcaaacctttttatgaacctttgtatttccattacctgctttggatcaactatatctgtcatcctatatattactaaatttttacgtgtttttctaattcggtgctgcttttgggatctggcttcgatgaccgctcgacccttgg

SEQ ID NO: 37146 - DNA, 3128 bp, Zea Mays
ctcaagctataagttagtgttagtatggatccggtaaaaattatcctggcttcgcccctcgatctggaggctggtggccgctggcgcagcgtacgcaaggcagcatccgacggcgagctcgtcgcgaggttctacttcacctacggcgggcgcagcgtggtgatcgggccaccgcgtgcgtgctgtgtgcgccggagtttctggacatggcggcggcggcacaccatcgtggacgccgtgaagtgcaagcgcctgcttccgctcgcgggctccaccgacgaggtcgacagctggggcatcgccgtcgaggacagcgcgagcgtggagtcgttgagcacgaggtggacggggcatgccgagctgctccgcggcaccgtgcgctccaatagccgaccacgctttcgagctcttcaaggattgatcatccgcaacctgcctcagcaatcggagtgttgaggtgctcgcgaccgccgcgcgcgtgcatgccatccacgaggcgtagtagcccctgacgctgcaggcaaactcttctggaagaaaggtgtctaaaactatgaacgggttacagaaaggtataaaccacggctgtgcattttggaagtatcatctatagatgtctgttgaggggaaagccgtacgccaacgttatttactcagaaacagcttcaacacacagttgtctgctttatgatggcatctccacccaggcacccaccatcacctatctctcgtgcctgtttattttcttgccctttctgatcataaaaaatcattaagagtttgcaaacatgcataggcatatcaatatgctcatttattaatttgctagcagatcatcttcctactctttactttatttattgtttgaaaaatatgtcctgcacctagggagctcgtatacagtaccaatgcatcttcattaaatgtgaatttcagaaaggaagtaggaacctatgagagtatttttcaaaattaattagcggcttctattatgtttatagcaaaggccaagggcaaaattggaacactaatgatggttggttgcatgagtctgtcgattacttgcaagaaatgtgaacctttgtttctttcatctccaccagtatgccctctcatactctatataaacacatcaacagcatcgcaattagccacaagatcacttcgggaggcaagtgcgatttcgatctcgcagccaccttttttttgttctgttgtgtatctagtagttggaggagatatgcagtttgcacttgcattggacacgaactcaggtcctcaccagataagatcttgtgagggtgatgggattgacaggttggaaaaattaagtattgggggcagaaagcaggagaaagctttgagaaataggtgctttggtggtagagttgctgcaactacacaatgtattcttacctcagatgcttgtcctgaaactcttcattctcaaacacagtcctctaggaaaaattatgctgatgcaaaccgtgtatctgctatcattttgggcggaggcactggatctcagctctttcctctgacaagcacaagagctacgcctgctgtacctgttggaggatgttacaggcttattgatatccctatgagtaactgcttcaacagtggtataaataagatatttgtgatgagtcagttcaattctacttcgcttaaccgccatattcatcgtacataccttgaaggcgggatcaactttgctgatggatctgtacaggtattagcggctacacaaatgcctgaagagccagctggatggttccagggtacagcagactctatcagaaaatttatctgggtactcgaggattattacagtcacaaatccattgacaacattgtaatcttgagtggcgatcagctttatcggatgaattacatggaacttgtgcagaaacatgtcgaggacgatgctgatatcactatatcatgtgctcctgttgatgagagccgagcttctaaaaatgggctagtgaagattgatcatactggacgtgtacttcaattctttgaaaaaccaaagggtgctgatttgaattctatgagagttgagaccaacttcctgagctatgctatagatgatgcacagaaatatccataccttgcatcaatgggcatttatgtcttcaagaaagatgcacttttagaccttctcaagtcaaaatatattcaattacatgactttggatctgaaatcctcccaagagctgtactagatcatagtgtgcaggcatgcatttttacgggctattgggaggatgttggaacaatcaaatcattctttgatgcaaacttggccctcactgagcagccttccaagtttgatttttatgatccaaaaacacctttcttcactgcaccccgatgcttgcctccgacgcaattggacaagtgcaagatgaaagatgcatttatctcagatggttgcttactgagagaatgcaacatcgagcattctgtgattggagtctgctcacgtgtcagctctggatgtgaactcaaggactccgtgatgatgggagcggacacctatgaaactgaagaagaagcttcaaagctactgttagctgggaaggtcccagttggaataggaaggaacacaaagataaggaactgtatcattgacatgaatgctaggattgggaagaacgtggtgatcacaaacagtaagggcatccaagaggctgatcacccggaagaagggtactacataaggtctggaatcgtggtgatcttgaagaatgcaaccatcaacgatgggtctgtcatatagatcggctgcgtttgcgtctacaaaacaagaacctacaatggtattgcatcgatggatcgtgtaaccttggtatggtaagagccgcttgacaggaagtcgagcgttcgggcgcaagatgcgttgtctggcatgctgttccttgaccatttgtgctgctagtatgtactgttataagctgccctagaagttgcagcaaacctttttatgaacctttgtatttccattacctgctttggatcaactatatctgtcatcctatatattactaaatttttacgtgtttttctaattcggtgctgcttttgggatctggcttcgatgaccgctcgacccttgg

SEQ ID NO: 37147 - DNA, 1321 bp, Zea Mays
atcacaagtaacttaccagtgcagctgtcgttaaatacaatcttgctttcatgattatggtaccaatagctcttttttttttcctaacaaatacttgtgctcagtagctattctgacgaaacaatctcttattcatcaagcaaaggctccatcatgaagttatcatacacagtacaatatggtgaaccaaaacctagtggcgcagcctgttttctccttctggttaaaccggaacccattcgacggggaagggggcgaaattgtgtttggaggttctgacgaacagcattacaaaggaagccatacgtacaccagggtcactcggaaaggctactggcagtttgaaatgggtgactttctcattggcggaaggagcactggaatctgtgtggatggttgtgcggccattgcagactctgggacttcgctgattgctggtcctctagttgccattgcccagatcaatgaacagattggagcggccggggtggtcaaccaagagtgcaaacaggtcgttgctggttacgggctacaaattgcagggctgctggaagctcagcagacaccaccatcagaagtgtgctcgaaggtcgggctctgcacgttcgatgggacacgcggagtaagtgctgctggcatcgagagtgtaccgggatccgtagacggcatggcggaagctctatgcaacgcgtgcgagatagtagtgttctggacgcaaagcgagctgagcccgaacaggagcaacgagggcacgctggagtacgtggacaggctctgcgaaagcatgcccgatccggtggggtcgcgcgtggactgcggacgcgtgggttccctgcagaccgttgcgttcagcatcggtggaagggcgttcgagctccggcctgaccagtacgtcctcaaggtcggcgaggggttcgccgcgcactgcatcagcgggttcacggctctggacgtgccccctccggtaggccctctgtggatactgggtgacgtcttcatgggagcctaccataccatctttgactacggcaagatgaggatcgggttcgcagattccgcgtgagacacgggcgttcttccactaatgaccgcgaccactatagctgcagtatgttcctcagagaagccctgcgtggtgtagtgctggattttcactactacgccctgcagagcttttctcgagcttctgtagagcacatacactacgcgcaggacaaatgtgtatcgctgcatcgagaaagaaataaaggaaacaatgcaaaaaaaagaaagatcatgtattagttttctttatctttaatttatgcacccagaatcccag

SEQ ID NO: 37148 - DNA, 3992 bp, Zea Mays
gcgtccgccccttgccccctccctctccgtctccgattctggatctgcccatgccgtaacccgcaggctcccggcatctcgttctcgcctccaaaattcaccttcgccgattgccgccgtgggccgccgcgacggcgttgcggacgcctcgtaccacctccgtcgcattctccgctgactcccccctcggtggcgtcccactgcgctcctcaacagcctgctccattcccacgccacctcctctcgctccgctgcgaccaccgaggaccaccagagcgggacgccgcggaactcgtcggccacgtcctggccgtcgcgcatgctgacgacgaggccgttgccctcccgggcaccctcgacgcggagctcgcgcgcgtcctgcgagcgcacggcgccgctcaggcggcgggcgcgccggcggaggaacaggttgaggtaggtccagaacagaggacagggagggacctaaaaatcaagcccaaaggcccaaagcccgaagtttcttttcttccccgcaaagaaagaaggcaagagttctcggcttctcgcaagtcgcgacagagaaagaggcggagttgcggagaagatgcagagcagcagcatgaagagggagatcagcgaggcccacaacaccattcgcttcggcatcaacgctggcgtcaaagcggaccttgccccgccgcacccgctccagtctaccatccaatcggtaaggattcgtcgctctccttcgtttcgtggttcacgcgtggtgtcgcatcgggcggctcgacgaggcggacaaagccggtggccagtgcgtccaccacctaggggcgcgaccgactcgtcttccccaccggtctggtgctccatggaggtggctgtctccattggtaccacgcagggccaggcttgttccactggctgcagcgtggacaatgacgtgaagccgaagctctagacggcgatcaaagcagaggaggaacaccagctgagactactctacacccgagtgtcacagtggtggcccatgaatacgcaggctggagctgcgatctcgtcgcagaccatgggtgcaatgggtgcagaggtgagtgcctggatgattccgtctgttctgttcttatataatattgaacaaatattcagacatgatacaagtgcagacttaggtggatggttctaaatgttcacggcaaaaaaatgtgtggcgcatgggtttctatcctgagggtgcgcagatcggtcgccattagaaagatgcagcttcaactactttggaccaggtgcaaactcatggcagttctgatagggcacgtaagtattttgctttcttgatacacttcaatccttcatttgttccactgcactgacattcgtttctgacaaacccatctcataatctcactgataaaatggactttgtactagcttgctaatttatgacactagattcattttgagtacacattgtctggacaaaatctaataaaattacaatatccagatgaaagcacaaacaatattttttattgctacttatgtttacattaaccagtggtggtcattcactcctgactttcttaagaaagaacgcagacgaaatattcaattaggcttgttttgttgttcagaagattttaaatatgctgcttcattcagttgactgaattttccaaaaattctcacaactaggattttttaaaatccgctttctgaaatcatctaaaagaaagcagtgactcacaaattagtagagaattttgtgaaattattcaaaaaaattcaaagtattcaatgagtcactgagatctttgaataatcgatgatgcttcattgctctttcaaacaagtgttacaggagtcatttataaaaccgtggaaaaactttagataaaattcccatgaaattagtgtgaagcaacgcagaacattaacatgttgtgcactcatgcaaggaacagagcacccagtactactggttcttagataaatggattaacacccagtactgcaaggaacagagcatccgtgcatacctgttggcaacaaagccttctgttgcatcattatgcattcacttttgcaatgatttttttgcactgataaagagaagtagtcttttatgttattttgccaccatttgcaatagttctagctttactcgttggccaatttatcagttgcaggtactaatggtgccaggctaccagctttgactatgtgatttcattacttgttgtatttagaaaatctaatattatgaaggtcaactttcttattttactgaaagtctaaaacacactacctattaacatattagtgcctgctcaagtgcagaaaaatggtcaaaatcttccttgtgttgtcttagcaatgctttagcactccatatattctattataattaggcagggttggagaagaaaagcgcatcacagggaatatctatggcacttttatactcatgttcttgtgtttcttgtttgcagcctacacaaatctggagtttgaacacacgacaggtgatatgcttatcttttgtggatggactgttcgcttggcttttgctgattgaattggagctgcacttgtagtttggtaatgtttatatacataactatgcggattgcgttagctagaatatgtcttccagtaccagggtgagtgggtgacaatgggctctaaattttacactaaaatttaagaatccgatcgggttatgatcaggttatatttatatttattattgaactaaaattaatttagggctctaacaaattgtggagaaacattttgaatcgtgatccattatcacccctaccagtaccacatacatacctcccgttgtggtgtttaaccctacgtgcagaccttgtcaccttattttggatcgattccctgttgtatgtggcttgtgctaaaacaagaaacacttgcaactttactagaaattatggtcagactctctttctctgtgttcgtttgattgttgctctggctgtctcctgctaaccaattttgtgggaaattcaacctttgaagcatcaatgtggtgaataatttctcaaaccctcagtatgttttccctaatgctggataaggcgctctcaaaaagcgaggctgtggtcagcgccttcgcctccatgacgccgatgctcatcggctccgtcgtgctggactccacgcagggggtactctgcggcgtcgccaggggctgcaggtggcagcacctggcggcgtggaccaacctggtggccttctatgtcatcggcttgccgctcgccatccttttcggattcacgctcgccttccaaaccaaggggctgtggatggggcagatatgcagcctcctctgccagaactacgtcctcttttttatcaccctgtgaaccaactggcaggagttagacctgaccatgttcaacaaggacaacgattttgtgtgctaggaatctagaaagagtttttattttcttttttgccatgtgctgttgctgaaacattgaaccatcagcatcaggcttcgacagagctgtctggtgtttgctcatcaattcatcatcagtgtaatactacagattataacatttggaatctcgaagataggaattaaaaatgttctgatacgccaatatagctgacgctttgttgaaccaattgtggtataagaggacatgacaagcccaaattggtggggatccgttagaaccaattgtggaaacagcccagcaggcagcagaaacgcctagaaaacattccaaggccccagtccaccgttgttttgctcgtactaagcctggacggatcacaaaaggcaaatccggacgctttggccaccatcatatctgcacagcgaaaagggagcgaaatgagacagtcggcatcgccgtctttggagggtgatggagtgtggagcgccgaaatcagagatgatttcccggtgcagctgctatgttaatcccatgcctaagacgatcttcaggggagcgtgtatataagtgtgtaaa

SEQ ID NO: 37149 - DNA, 2761 bp, Zea Mays
gcgtccgccccttgccccctccctctccgtctccgattctggatctgcccatgccgtaacccgcaggctcccggcatctcgttctcgcctccaaaattcaccttcgccgattgccgccgtgggccgccgcgacggcgttgcggacgcctcgtaccacctccgtcgcattctccgctgactcccccctcggtggcgtcccactgcgctcctcaacagcctgctccattcccacgccacctcctctcgctccgctgcgaccaccgaggaccaccagagcgggacgccgcggaactcgtcggccacgtcctggccgtcgcgcatgctgacgacgaggccgttgccctcccgggcaccctcgacgcggagctcgcgcgcgtcctgcgagcgcacggcgccgctcaggggtccacgacgttgagtaggcggcgggcgcgccggcggaggaacaggttgaggtaggtccagaacagaggacagggagggacctaaaaatcaagcccaaaggcccaaagcccgaagtttcttttcttccccgcaaagaaagaaggcaagagttctcggcttctcgcaagtcgcgacagagaaagaggcggagttgcggagaagatgcagagcagcagcatgaagagggagatcagcgaggcccacaacaccattcgcttcggcatcaacgctggcgtcaaagcggaccttgccccgccgcacccgctccagtctaccatccaatcggtaaggattcgtcgctctccttcgtttcgtggttcacgcgtggtgtcgcatcgggcggctcgacgaggcggacaaagccggtggccagtgcgtccaccacctaggggcgcgaccgactcgtcttccccaccggtctggtgctccatggaggtggctgtctccattggtaccacgcagggccaggcttgttccactggctgcagcgtggacaatgacgtgaagccgaagctctagacggcgatcaaagcagaggaggaacaccagctgagactactctacacccgagtgtcacagtggtggcccatgaatacgcaggctggagctgcgatctcgtcgcagaccatgggtgcaatgggtgcagagacttaggtggatggttctaaatgttcacggcaaaaaaatgtgtggcgcatgggtttctatcctgagggtgcgcagatcggtcgccattagaaagatgcagcttcaactactttggaccaggtgcaaactcatggcagttctgatagggcaccctacacaaatctggagtttgaacacacgacaggtgatatgcttatcttttgtggatggactgttcgcttggcttttgctgattgaattggagctgcacttgtagtttggtaatgtttatatacataactatgcggattgcgttagctagaatatgtcttccagtaccagggtgagtgggtgacaatgggctctaaattttacactaaaatttaagaatccgatcgggttatgatcaggttatatttatatttattattgaactaaaattaatttagggctctaacaaattgtggagaaacattttgaatcgtgatccattatcacccctaccagtaccacatacatacctcccgttgtggtgtttaaccctacgtgcagaccttgtcaccttattttggatcgattccctgttgtatgtggcttgtgctaaaacaagaaacacttgcaactttactagaaattatggtcagactctctttctctgtgttcgtttgattgttgctctggctgtctcctgctaaccaattttgtgggaaattcaacctttgaagcatcaatgtggtgaataatttctcaaaccctcagtatgttttccctaatgctggataaggcgctctcaaaaagcgaggctgtggtcagcgccttcgcctccatgacgccgatgctcatcggctccgtcgtgctggactccacgcagggggtactctgcggcgtcgccaggggctgcaggtggcagcacctggcggcgtggaccaacctggtggccttctatgtcatcggcttgccgctcgccatccttttcggattcacgctcgccttccaaaccaaggggctgtggatggggcagatatgcagcctcctctgccagaactacgtcctcttttttatcaccctgtgaaccaactggcaggagttagacctgaccatgttcaacaaggacaacgattttgtgtgctaggaatctagaaagagtttttattttcttttttgccatgtgctgttgctgaaacattgaaccatcagcatcaggcttcgacagagctgtctggtgtttgctcatcaattcatcatcagtgtaatactacagattataacatttggaatctcgaagataggaattaaaaatgttctgatacgccaatatagctgacgctttgttgaaccaattgtggtataagaggacatgacaagcccaaattggtggggatccgttagaaccaattgtggaaacagcccagcaggcagcagaaacgcctagaaaacattccaaggccccagtccaccgttgttttgctcgtactaagcctggacggatcacaaaaggcaaatccggacgctttggccaccatcatatctgcacagcgaaaagggagcgaaatgagacagtcggcatcgccgtctttggagggtgatggagtgtggagcgccgaaatcagagatgatttcccggtgcagctgctatgttaatcccatgcctaagacgatcttcaggggagcgtgtatataagtgtgtaaa

SEQ ID NO: 37150 - DNA, 2198 bp, Zea Mays
cccacaaaaaagctgaagcattacctttagttaaaagacgctatggattgaagccaccccgcatctcacgcgcacggcgggcagcgcatgccaacacgtggcgtaggctcggacccgaatagttcattcaatccagcagcagaacaatcgagttgcgtccgccccttgccccctccctctccgtctccgattctggatctgcccatgccgtaacccgcaggctcccggcatctcgttctcgcctccaaaattcaccttcgccgattgccgccgtgggccgccgcgacggcgttgcggacgcctcgtaccacctccgtcgcattctccgctgactcccccctcggtggcgtcccactgcgctcctcaacagcctgctccattcccacgccacctcctctcgctccgctgcgaccaccgaggaccaccagagcgggacgccgcggaactcgtcggccacgtcctggccgtcgcgcatgctgacgacgaggccgttgccctcccgggcaccctcgacgcggagctcgcgcgcgtcctgcgagcgcacggcgccgctcaggcggcgggcgcgccggcggaggaacaggttgaggtaggtccagaacagaggacagggagggacctaaaaatcaagcccaaaggcccaaagcccgaagtttcttttcttccccgcaaagaaagaaggcaagagttctcggcttctcgcaagtcgcgacagagaaagaggcggagttgcggagaagatgcagagcagcagcatgaagagggagatcagcgaggcccacaacaccattcgcttcggcatcaacgctggcgtcaaagcggaccttgccccgccgcacccgctccagtctaccatccaatcgggccaggcttgttccactggctgcagcgtggacaatgacgtgaagccgaagctctagacggcgatcaaagcagaggaggaacaccagctgagactactctacacccgagtgtcacagtggtggcccatgaatacgcaggctggagctgcgatctcgtcgcagaccatgggtgcaatgggtgcagagacttaggtggatggttctaaatgttcacggcaaaaaaatgtgtggcgcatgggtttctatcctgagggtgcgcagatcggtcgccattagaaagatgcagcttcaactactttggaccaggtgcaaactcatggcagttctgatagggcaccctacacaaatctggagtttgaacacacgacagcatcaatgtggtgaataatttctcaaaccctcagtatgttttccctaatgctggataaggcgctctcaaaaagcgaggctgtggtcagcgccttcgcctccatgacgccgatgctcatcggctccgtcgtgctggactccacgcagggggtactctgcggcgtcgccaggggctgcaggtggcagcacctggcggcgtggaccaacctggtggccttctatgtcatcggcttgccgctcgccatccttttcggattcacgctcgccttccaaaccaaggggctgtggatggggcagatatgcagcctcctctgccagaactacgtcctcttttttatcaccctgtgaaccaactggcaggagttagacctgaccatgttcaacaaggacaacgattttgtgtgctaggaatctagaaagagtttttattttcttttttgccatgtgctgttgctgaaacattgaaccatcagcatcaggcttcgacagagctgtctggtgtttgctcatcaattcatcatcagtgtaatactacagattataacatttggaatctcgaagataggaattaaaaatgttctgatacgccaatatagctgacgctttgttgaaccaattgtggtataagaggacatgacaagcccaaattggtggggatccgttagaaccaattgtggaaacagcccagcaggcagcagaaacgcctagaaaacattccaaggccccagtccaccgttgttttgctcgtactaagcctggacggatcacaaaaggcaaatccggacgctttggccaccatcatatctgcacagcgaaaagggagcgaaatgagacagtcggcatcgccgtctttggagggtgatggagtgtggagcgccgaaatcagagatgatttcccggtgcagctgctatgttaatcccatgcctaagacgatcttcaggggagcgtgtatataagtgtgtaaa

SEQ ID NO: 37151 - DNA, 478 bp, Zea Mays
cgcactggctgcgtcgtcgggtgcctgaggaagctgcacaagtggtgcctgtcttcggtgttcgacaagtcgagctatgtgaagaacacgaattcattgttttggcatgcgatggcatctgggactacatgtcaagccagcagttggtcgatttcatccgcgagcatatagacacattagcttcagagtacctgttgcccattaaagaaccactactagaattagaaatgccgccaatttttttagcacagatggttccagcaccagcagcaatggattggctaagaaagtctggtgttcactagagctactttgtagaggctgctcttttttgtgcagtaatacacagtaacctgagagagagataaagaagcagatcttgtgctctatgcagttgacaaacaaataaccacatcgacttcagagggatttgaagaaggttcatcaccccgaattgtcttatggaagtaacttgaat

SEQ ID NO: 37152 - DNA, 451 bp, Zea Mays
ttcctaacagatggagcaagcccggcagtacacatgattttgcagttattgataaggtctgagaaggatggcattctctgccctattccacagtacccattgtactctgcatcaattgctcttcatggtggttcccttgttccttatttccttgatgaagagacagggtgggcacttgaggttgatgagctcaagaaacaacttgaggaggctcgatctaagggcatcagtgttagggcgcttgttgttataaatccaggaaacccaacaggacaggcatgttgttctcaaaccaaaccaggggcgtcactcgattagacaaacttaggcgactggtatagtatcaaaccacttttaaatcgttacaatgtgtggagcttactaatcgttgttgtccagactggtccgacagtgccgaatgccatggtggtgcaggaaccattcgtctaca

SEQ ID NO: 37153 - DNA, 1139 bp, Zea Mays
aaaataagttgggatagactaaagttggaatccaactgaaactaagtcaaggtttttggaaggggtggagaagagatggatttcttacagcaacagggaattaaagttgaagttatcccaggaattacttctgcttcgggtattgcagcagagctaggcattccgttaacccatagaggtgttgctaccagtgtcagatttttaactggccactccagaaatggtgggacagatccactatatgtagctggaaatgcggctgatccagacactactttggttgtgtatatgggtttgtcaacacttccatcacttgctccaaagttaatgaagcacggcctgccaccagatacccctgctgttgcagtagagcgcgggactacaccccaacaacgaacggtgttcgcctcgttgaaggatcttgtggatgaagtcaagtcagccgatctagtttctccaactctaataattattgggaaagtggtatccttgtcacccttctgggttgagtcatctgaacatgatgcactgaaagttcagagctcgtatgcaaatgaggccagatgacaacagattttcttggtttttagtgactggacaatacttgagaaatgcaagatcccagatatgggagcacaggttcgacctggtgtacacagaaacatctcaggaagcatggatcctgaatggcggatggtagcttaagcttataacagacttggggcagaagcgcacttggactgatcatgcttgattctttggcctaatctacatgagattcacaatttttcgatttagttgagttcgacaatagttgtgtgcttctttgttactagtagccatgtacgtgcggcgcacgcgtgtttacgattctatgccctagcatagtaaggctattccaacgctgccacgttatgattttatgataatgggagtttcgtagcaccatgataatgagaaatagtgctacgaagctcttattatatgacaagtgccataaatcgtagcacttatgattttatgataatggggagcttcgtagagctctttctaacgtgccacgtcatcataagtgctatgaaactatgaattaaacaatgtctcttaatataatattttacgtcaatattttataggct

SEQ ID NO: 37154 - DNA, 1203 bp, Zea Mays
tgctaattgggcgggcattctgcaataacgatttcaagaggagattcacgagctgctgctgagctttgcggaggccggtgccaatgttgtgcgcttgaaaggtggcgatcctctggtttttggaaggggtggagaagagatggatttcttacagcaacagggaattaaagttgaagttatcccaggaattacttctgcttcgggtattgcagcagagctaggcattccgttaacccatagaggtgttgctaccagtgtcagatttttaactggccactccagaaatggtgggacagatccactatatgtagctggaaatgcggctgatccagacactactttggttgtgtatatgggtttgtcaacacttccatcacttgctccaaagttaatgaagcacggcctgccaccagatacccctgctgttgcagtagagcgcgggactacaccccaacaacgaacggtgttcgcctcgttgaaggatcttgtggatgaagtcaagtcagccgatctagtttctccaactctaataattattgggaaagtggtatccttgtcacccttctgggttgagtcatctgaacatgatgcactgaaagttcagagctcgtatgcaaatgaggccagatgacaacagattttcttggtttttagtgactggacaatacttgagaaatgcaagatcccagatatgggagcacaggttcgacctggtgtacacagaaacatctcaggaagcatggatcctgaatggcggatggtagcttaagcttataacagacttggggcagaagcgcacttggactgatcatgcttgattctttggcctaatctacatgagattcacaatttttcgatttagttgagttcgacaatagttgtgtgcttctttgttactagtagccatgtacgtgcggcgcacgcgtgtttacgattctatgccctagcatagtaaggctattccaacgctgccacgttatgattttatgataatgggagtttcgtagcaccatgataatgagaaatagtgctacgaagctcttattatatgacaagtgccataaatcgtagcacttatgattttatgataatggggagcttcgtagagctctttctaacgtgccacgtcatcataagtgctatgaaactatgaattaaacaatgtctcttaatataatattttacgtcaatattttataggct

SEQ ID NO: 37155 - DNA, 4415 bp, Zea Mays
atgttttttttgccatttcctgaatcgttgacatgcatttttttgttgggtttctgtttcttttcttttcagcacatagcgcatatgcagcatttaggcttattcatttatttgtgcaggcttgatatttgactgggacactgggcaaattttaacaagtttcagcaatggggtttgataatgaatgcatcttgagtattcaatcccttcctggtgaatatttctgccctgtttgccggacacttgtatatccgaatgaggccctacaaactcaatgcacacatctctactgcaaatcctgcttggcatatgtagtggcaaccacacaagcttgtccttatgatggataccttgtaacagaagctgattccaagcctcttgtggaatcaaataaaacccttgctgagactattggcaaagtcgcggtctattgcctgtataataagagtggatgccaatggcatggagagctatctgcctgtgtcacacatggtactgcttgtgcatatgggaactctcctgttgtttgcaatcgttgtgggacacaaattgtgcatcgtcaagtgcaagaacatgctcaagtctgccatggcttacaatctcaaacacaacaagctgatggtagtcaggtgcagctggcaacggcaacaactcagccagtcatccaagattcatcacttgcctcagctggatctgctgcagctgcagctacaaccctaacaaagccatcttcaactacagccacagctgtaacagattctgcagcagcaacaggaggggcagctggtgcaaccacagcagctgtgccttcttcagcttcatctatttctgcttcccaaactccaacagctgagcagtggtaccagcagcagcagcagctccaatactcgcaatactaccagcagcagcaccctggatccaacccttacatgcagcaacatcaacaatatgaccaataccagcaggcatatcagcaatacatgcaacctccaatgcaagtaccatcccaaaatgtggtgcaaggatctgcacaacctgcttcttatgttcagcctcaagttcagtcctcccaggtgatgatgcaagcccaaagtcagccccaggtccatccattgacgagtcagccacagcttcaacagcatccagttcaaccccgaccccaaagtcaccctcatatttcccatgttcaagcaccttcaggtcagtcgcagcttcatcaaccaattcagtcagcccaagttccacaggtccaaccaagtcaagttcctctccaaccatctggtctccaagtacaatctgcagcacatccatctgctcctactcaagttggtaatcagcaatttgcgactcaagcaatggcgtatcaggtccagccacatgtacaagctcaacctccgcagcagcaacatattgttgcacatcaacaacatccacatatgcaagctttacccctacagcaaaatattcaacctaagatgcagctaaactctcaagttcagctacagcctccacatgtccagcagcaagcttacccacaatctcaggtctatcctcaacagacacatcatatgcactcccagaatactacatatgcacagcagcaaacccaaggtgctttgatgcaacctgtacatgtgtcccaccaacaaacacatgtttctcatcatcctgcaccgatgcgtcctccatcgtcaggccatcagccagctttgcagcatcctcaggcccagggaattcaacatacatcacaacatgaaaaacatattgggtttcatgctcagtggccaacaatgtattccaacattccttcccaagcaccaccacagggattgtctgtgcactcatctgtttcctcacaatcagttcaatcataccagcaaggaatgtcttcatcacaacagatgcattcccaacctggtcagccatatacacaacagcatgttactggcaatactggacaacatgttcaaacttctgctggcagacctatggcccatcttgcaccaacacagcaatttcagcagcaacatccagcaatgcttagaactgagtcacctgctgctgggcactctattgggcagggtcctttagatcttgaaaaacatacttcaaaatcagggaagttggataatgcaactattgctgctgtcggtgaaaataaaaatagtggtcctgagtcagttgtcatgagacctacaaagtcacaattgggtgatgaaaacatgaacagcgaacacaatggttttgttggtgttagaaaagatgcagtgcaaactggcattgtatcacacaatttagatggttcaattaggagggatgggaatactgaccaggcaggcaattcacatggcccacttgtgcagggaggcaaagatcacaaggcttcagatgcatctactgatcatgagaaaggacgactgtttcaacaggcatcactgcaaaatgcaggggcaccgggctcttatgtgcccccaggtgtggtaccacatccatctggaccagataaaatgcttcctcagcatatgacgaatcatggtcatatgcatggtttctctgaaaatatccgtcctccgctgcaacaaccatatggtgtgtttcattctggaacgataacaaggccatttggagagaaccagattcagatgccaatgccacagcctgggggtatcagacctggtgatggtatgattcgtccttgtttggttggcccattacctggacatcatggtgcagtgttgccttcttttgatcttgaacgtttgggtcagccacgtcctcttggaatgttgaacagcaatgactttggtggtgaggggttcaacgcttcagggggtgcagcgtatcctgaaagacatgataataccgaagacagtcggaaacattttccagcaccagcccctctagatgatcagggcttgcgaagggaccctagacattttgagagagctttaggtagacctgatggtttccttgattcagtacctggaaggcctccatttgcaaaccacagaagtgcaggtttgcatgaggattttccaagaaagcaaaatgcaactgccagtcaccctgacttcctgtcacatggagcagaatttgatcatcacagggctattggaatgcctaatttcagaaatccaggcccatttgctcaagggacaagtggcggtcctggtggccctcctaaacaccagcttggctctggtgacatgcatccaggtgaccctcatcttgtcgctgaatatgctcagcatggatttcctaaaactgcagcacactttggtttgggtggattcttgagaaacgggaattctggttggtgccgaatatgcatgtttaactgtgggagtgcagagaatctggatttgcatgtacaaacaagggaacatcagcaatgtgcaatggacattgtcctgaaaatgaagcaagatgttgcaaaaaggaattatggagggcccaagtcattcaacaacaaaaaggtttctgggaagggccattttcgtgggaacaggcgctagtgttaactgattaaaattgatgtggttttgaaggttgctactggtgcttatggatgtgtcaatggcaatcgagaattgagatcttttcagacattctgttcatgcggttcagcgtatttgaagggaaacttgtaatggtcccaaacttttgttccatgttgatctgcagagttcacatggctatgtttacttcacgtatttttgccgaagttgttctgggattgcttaacatgctaatatccttcttctgtacgtgctgatttataactcctgtttctttcaactaggctcatgctttttctaatggcgacctaataatagaccatgctggaacttttacaaagagacttgtaattgtgtcatcagacatccataacatgaaactgcaaagtgtaggataatttccagcagagggctcctgtcatacttgcatgtttccctaacgatgataaaccaatcaaaagtaaaaaggagaggcgcgtgaagcctaacctacgaaggctacgagtatgaagtcgattatccaatgaagcctcacttacgaaagctatgggtgcaaagttacacatcctgtgaagccttgacgagaagaagaattgctccaagcccttaagaagtcaaagaaccttcactaggtgcatgtatgtgctcgtgaaggccagtcgatcatgaggacccgttaataccatggaatttggatgaaccattgtattttaagccaaaaggtgtttggtagcctttaaaaactctgtatataatactgtggtattatcgatactatggttattttggggtatagaaaactttggtccagaccaaagtttctttgctgtgcgcaatatctgttgagtatgcaagccatggaactggtaaaaaaactgttaagcaaagaataggaag

SEQ ID NO: 37156 - DNA, 5339 bp, Zea Mays
cgatcccggttgggaatggcctaaacgaacgaacaaggccactcggccccatccggcatccccgacccccgagcgtcttctttcgtctgctcgctctgcgctcgcatctaccatggagactagggtctagggtttagtgcgccgctgcctacatcgccgccatcctcaacttcctacgggatcctgacgaggcgccgtatcatcctcaacgccgcgaacctccgctcccacgttatcctcacgcccaccagtagctctcggcctctacctcgttaaggcttgatatttgactgggacactgggcaaattttaacaagtttcagcaatggggtttgataatgaatgcatcttgagtattcaatcccttcctggtgaatatttctgccctgtttgccggacacttgtatatccgaatgaggccctacaaactcaatgcacacatctctactgcaaatcctgcttggcatatgtagtggcaaccacacaagcttgtccttatgatggataccttgtaacagaagctgattccaagcctcttgtggaatcaaataaaacccttgctgagactattggcaaagtcgcggtctattgcctgtataataagagtggatgccaatggcatggagagctatctgcctgtgtcacacatggtactgcttgtgcatatgggaactctcctgttgtttgcaatcgttgtgggacacaaattgtgcatcgtcaagtgcaagaacatgctcaagtctgccatggcttacaatctcaaacacaacaagctgatggtagtcaggtgcagctggcaacggcaacaactcagccagtcatccaagattcatcacttgcctcagctggatctgctgcagctgcagctacaaccctaacaaagccatcttcaactacagccacagctgtaacagattctgcagcagcaacaggaggggcagctggtgcaaccacagcagctgtgccttcttcagcttcatctatttctgcttcccaaactccaacagctgagcagtggtaccagcagcagcagcagctccaatactcgcaatactaccagcagcagcaccctggatccaacccttacatgcagcaacatcaacaatatgaccaataccagcaggcatatcagcaatacatgcaacctccaatgcaagtaccatcccaaaatgtggtgcaaggatctgcacaacctgcttcttatgttcagcctcaagttcagtcctcccaggtgatgatgcaagcccaaagtcagccccaggtccatccattgacgagtcagccacagcttcaacagcatccagttcaaccccgaccccaaagtcaccctcatatttcccatgttcaagcaccttcaggtcagtcgcagcttcatcaaccaattcagtcagcccaagttccacaggtccaaccaagtcaagttcctctccaaccatctggtctccaagtacaatctgcagcacatccatctgctcctactcaagttggtaatcagcaatttgcgactcaagcaatggcgtatcaggtccagccacatgtacaagctcaacctccgcagcagcaacatattgttgcacatcaacaacatccacatatgcaagctttacccctacagcaaaatattcaacctaagatgcagctaaactctcaagttcagctacagcctccacatgtccagcagcaagcttacccacaatctcaggtctatcctcaacagacacatcatatgcactcccagaatactacatatgcacagcagcaaacccaaggtgctttgatgcaacctgtacatgtgtcccaccaacaaacacatgtttctcatcatcctgcaccgatgcgtcctccatcgtcaggccatcagccagctttgcagcatcctcaggcccagggaattcaacatacatcacaacatgaaaaacatattgggtttcatgctcagtggccaacaatgtattccaacattccttcccaagcaccaccacagggattgtctgtgcactcatctgtttcctcacaatcagttcaatcataccagcaaggaatgtcttcatcacaacagatgcattcccaacctggtcagccatatacacaacagcatgttactggcaatactggacaacatgttcaaacttctgctggcagacctatggcccatcttgcaccaacacagcaatttcagcagcaacatccagcaatgcttagaactgagtcacctgctgctgggcactctattgggcagggtcctttagatcttgaaaaacatacttcaaaatcagggaagttggataatgcaactattgctgctgtcggtgaaaataaaaatagtggtcctgagtcagttgtcatgagacctacaaagtcacaattgggtgatgaaaacatgaacagcgaacacaatggttttgttggtgttagaaaagatgcagtgcaaactggcattgtatcacacaatttagatggttcaattaggagggatgggaatactgaccaggcaggcaattcacatggcccacttgtgcagggaggcaaagatcacaaggcttcagatgcatctactgatcatgagaaaggacgactgtttcaacaggcatcactgcaaaatgcaggggcaccgggctcttatgtgcccccaggtgtggtaccacatccatctggaccagataaaatgcttcctcagcatatgacgaatcatggtcatatgcatggtttctctgaaaatatccgtcctccgctgcaacaaccatatggtgtgtttcattctggaacgataacaaggccatttggagagaaccagattcagatgccaatgccacagcctgggggtatcagacctggtgatggtatgattcgtccttgtttggttggcccattacctggacatcatggtgcagtgttgccttcttttgatcttgaacgtttgggtcagccacgtcctcttggaatgttgaacagcaatgactttggtggtgaggggttcaacgcttcagggggtgcagcgcctccatttgcaaaccacagaagtgcaggtttgcatgaggattttccaagaaagcaaaatgcaactgccagtcaccctgacttcctgtcacatggagcagaatttgatcatcacagggctattggaatgcctaatttcagaaatccaggcccatttgctcaagggacaagtggcggtcctggtggccctcctaaacaccagcttggctctggtaaccttcctgggaatttacattcttttgagggtgacatgcatccaggtgaccctcatcttgtcgctgaatatgctcagcatggatttcctaaaactgcagcacactttggtttgggtggattcttgagaaacgggaattctggttggtgccgaatatgcatgtttaactgtgggagtgcagagaatctggatttgcatgtacaaacaagggaacatcagcaatgtgcaatggacattgtcctgaaaatgaagcaagatgttgcaaaaaggaattatggagggcccaagtcattcaacaacaaaaaggtttctgggaagggccattttcgtgggaacaggcgctagtgttaactgattaaaattgatgtggttttgaaggttgctactggtgcttatggatgtgtcaatggcaatcgagaattgagatcttttcagacattctgttcatgcggttcagcgtatttgaagggaaacttgtaatggtcccaaacttttgttccatgttgatctgcagagttcacatggctatgtttacttcacgtatttttgccgaagttgttctgggattgcttaacatgctaatatccttcttctgtacgtgctgatttataactcctgtttctttcaactaggctcatgctttttctaatggcgacctaataatagaccatgctggaacttttacaaagagacttgtaattgtgtcatcagacatccataacatggtaaattttgttggaatcttttggtagggggctaatggaaacatgttgaagttactttcagtgcctgaaaattgtgctagttttgcatagtttaaatccaaaaaaatctaagggtgcattggacaaatagttttttttatgtcacagcccaatttgcttaatcatttattttaataaaattattgaatactgactctgtgatatgtccccattcaaaacaagaagggcaaaagtgctgcattcctgaataaacacaagggctagagttgttgacatgtcattgcatgacaacaaagcaatccaaatcaacaaaaataatctcattgaagcggttgcctattttgtgccttgagggatgcattagtgataaagggagacttggaagcctgcaaggaaacacaaaagcatgaagaggtttgagttgggatatgtactttgagtgttagcatgagatgggagggaatcgatggtaaacctaatttagaaccaaaacatgagttgtgctcaaatatagaaggaaaagaaagatatactggttttcatatgaatactggtatgtgcatcatatacgcagtaacgcagagcttgttgataccgaactggagttgtattattcacttctagttagttattcgagatagtgatggttttattgtcataggtttgatgttcagaataggacatcataggattctacaggctacaagcactaaatattatgggtaaaatacttaggtttccaattcactgctgctggacagatgtgattgtttgcatgtgacattttgctgatggtggcctttctctagatgtctgttttaaatcatctgtctttgctgtttgtttgctaaacagaaactgcaaagtgtaggataatttccagcagagggctcctgtcatacttgcatgtttccctaacgatggtaaggatgacatgctttcataatgctgataaaccaatcaaaagtaaaaaggagaggcgcgtgaagcctaacctacgaaggctacgagtatgaagtcgattatccaatgaagcctcacttacgaaagctatgggtgcaaagttacacatcctgtgaagccttgacgagaagaagaattgctccaagcccttaagaagtcaaagaaccttcactaggtgcatgtatgtgctcgtgaaggccagtcgatcatgaggacccgttaataccatggaatttggatgaaccattgtattttaagccaaaaggtgtttggtagcctttaaaaactctgtatataatactgtggtattatcgatactatggttattttggggtatagaaaactttggtccagaccaaagtttctttgctgtgcgcaatatctgttgagtatgcaagccatggaactggtaaaaaaactgttaagcaaagaataggaag

SEQ ID NO: 37157 - DNA, 4454 bp, Zea Mays
cgatcccggttgggaatggcctaaacgaacgaacaaggccactcggccccatccggcatccccgacccccgagcgtcttctttcgtctgctcgctctgcgctcgcatctaccatggagactagggtctagggtttagtgcgccgctgcctacatcgccgccatcctcaacttcctacgggatcctgacgaggcgccgtatcatcctcaacgccgcgaacctccgctcccacgttatcctcacgcccaccagtagctctcggcctctacctcgttaaggcttgatatttgactgggacactgggcaaattttaacaagtttcagcaatggggtttgataatgaatgcatcttgagtattcaatcccttcctggtgaatatttctgccctgtttgccggacacttgtatatccgaatgaggccctacaaactcaatgcacacatctctactgcaaatcctgcttggcatatgtagtggcaaccacacaagcttgtccttatgatggataccttgtaacagaagctgattccaagcctcttgtggaatcaaataaaacccttgctgagactattggcaaagtcgcggtctattgcctgtataataagagtggatgccaatggcatggagagctatctgcctgtgtcacacatggtactgcttgtgcatatgggaactctcctgttgtttgcaatcgttgtgggacacaaattgtgcatcgtcaagtgcaagaacatgctcaagtctgccatggcttacaatctcaaacacaacaagctgatggtagtcaggtgcagctggcaacggcaacaactcagccagtcatccaagattcatcacttgcctcagctggatctgctgcagctgcagctacaaccctaacaaagccatcttcaactacagccacagctgtaacagattctgcagcagcaacaggaggggcagctggtgcaaccacagcagctgtgccttcttcagcttcatctatttctgcttcccaaactccaacagctgagcagtggtaccagcagcagcagcagctccaatactcgcaatactaccagcagcagcaccctggatccaacccttacatgcagcaacatcaacaatatgaccaataccagcaggcatatcagcaatacatgcaacctccaatgcaagtaccatcccaaaatgtggtgcaaggatctgcacaacctgcttcttatgttcagcctcaagttcagtcctcccaggtgatgatgcaagcccaaagtcagccccaggtccatccattgacgagtcagccacagcttcaacagcatccagttcaaccccgaccccaaagtcaccctcatatttcccatgttcaagcaccttcaggtcagtcgcagcttcatcaaccaattcagtcagcccaagttccacaggtccaaccaagtcaagttcctctccaaccatctggtctccaagtacaatctgcagcacatccatctgctcctactcaagttggtaatcagcaatttgcgactcaagcaatggcgtatcaggtccagccacatgtacaagctcaacctccgcagcagcaacatattgttgcacatcaacaacatccacatatgcaagctttacccctacagcaaaatattcaacctaagatgcagctaaactctcaagttcagctacagcctccacatgtccagcagcaagcttacccacaatctcaggtctatcctcaacagacacatcatatgcactcccagaatactacatatgcacagcagcaaacccaaggtgctttgatgcaacctgtacatgtgtcccaccaacaaacacatgtttctcatcatcctgcaccgatgcgtcctccatcgtcaggccatcagccagctttgcagcatcctcaggcccagggaattcaacatacatcacaacatgaaaaacatattgggtttcatgctcagtggccaacaatgtattccaacattccttcccaagcaccaccacagggattgtctgtgcactcatctgtttcctcacaatcagttcaatcataccagcaaggaatgtcttcatcacaacagatgcattcccaacctggtcagccatatacacaacagcatgttactggcaatactggacaacatgttcaaacttctgctggcagacctatggcccatcttgcaccaacacagcaatttcagcagcaacatccagcaatgcttagaactgagtcacctgctgctgggcactctattgggcagggtcctttagatcttgaaaaacatacttcaaaatcagggaagttggataatgcaactattgctgctgtcggtgaaaataaaaatagtggtcctgagtcagttgtcatgagacctacaaagtcacaattgggtgatgaaaacatgaacagcgaacacaatggttttgttggtgttagaaaagatgcagtgcaaactggcattgtatcacacaatttagatggttcaattaggagggatgggaatactgaccaggcaggcaattcacatggcccacttgtgcagggaggcaaagatcacaaggcttcagatgcatctactgatcatgagaaaggacgactgtttcaacaggcatcactgcaaaatgcaggggcaccgggctcttatgtgcccccaggtgtggtaccacatccatctggaccagataaaatgcttcctcagcatatgacgaatcatggtcatatgcatggtttctctgaaaatatccgtcctccgctgcaacaaccatatggtgtgtttcattctggaacgataacaaggccatttggagagaaccagattcagatgccaatgccacagcctgggggtatcagacctggtgatggtatgattcgtccttgtttggttggcccattacctggacatcatggtgcagtgttgccttcttttgatcttgaacgtttgggtcagccacgtcctcttggaatgttgaacagcaatgactttggtggtgaggggttcaacgcttcagggggtgcagcgtatcctgaaagacatgataataccgaagacagtcggaaacattttccagcaccagcccctctagatgatcagggcttgcgaagggaccctagacattttgagagagctttaggtagacctgatggtttccttgattcagtacctggaaggcctccatttgcaaaccacagaagtgcaggtttgcatgaggattttccaagaaagcaaaatgcaactgccagtcaccctgacttcctgtcacatggagcagaatttgatcatcacagggctattggaatgcctaatttcagaaatccaggcccatttgctcaagggacaagtggcggtcctggtggccctcctaaacaccagcttggctctggtgacatgcatccaggtgaccctcatcttgtcgctgaatatgctcagcatggatttcctaaaactgcagcacactttggtttgggtggattcttgagaaacgggaattctggttggtgccgaatatgcatgtttaactgtgggagtgcagagaatctggatttgcatgtacaaacaagggaacatcagcaatgtgcaatggacattgtcctgaaaatgaagcaagatgttgcaaaaaggcaaaaactgaattatggagggcccaagtcattcaacaacaaaaaggtttctgggaagggccattttcgtgggaacaggcgctagtgttaactgattaaaattgatgtggttttgaaggttgctactggtgcttatggatgtgtcaatggcaatcgagaattgagatcttttcagacattctgttcatgcggttcagcgtatttgaagggaaacttgctcatgctttttctaatggcgacctaataatagaccatgctggaacttttacaaagagacttgtaattgtgtcatcagacatccataacatgaaactgcaaagtgtaggataatttccagcagagggctcctgtcatacttgcatgtttccctaacgatggtaaggatgacatgctttcataatgctgataaaccaatcaaaagtaaaaaggagaggcgcgtgaagcctaacctacgaaggctacgagtatgaagtcgattatccaatgaagcctcacttacgaaagctatgggtgcaaagttacacatcctgtgaagccttgacgagaagaagaattgctccaagcccttaagaagtcaaagaaccttcactaggtgcatgtatgtgctcgtgaaggccagtcgatcatgaggacccgttaataccatggaatttggatgaaccattgtattttaagccaaaaggtgtttggtagcctttaaaaactctgtatataatactgtggtattatcgatactatggttattttggggtatagaaaactttggtccagaccaaagtttctttgctgtgcgcaatatctgttgagtatgcaagccatggaactggtaaaaaaactgttaagcaaagaataggaag

SEQ ID NO: 37158 - DNA, 4183 bp, Zea Mays
cgatcccggttgggaatggcctaaacgaacgaacaaggccactcggccccatccggcatccccgacccccgagcgtcttctttcgtctgctcgctctgcgctcgcatctaccatggagactagggtctagggtttagtgcgccgctgcctacatcgccgccatcctcaacttcctacgggatcctgacgaggcgccgtatcatcctcaacgccgcgaacctccgctcccacgttatcctcacgcccaccagtagctctcggcctctacctcgttaaggcttgatatttgactgggacactgggcaaattttaacaagtttcagcaatggggtttgataatgaatgcatcttgagtattcaatcccttcctggtgaatatttctgccctgtttgccggacacttgtatatccgaatgaggccctacaaactcaatgcacacatctctactgcaaatcctgcttggcatatgtagtggcaaccacacaagcttgtccttatgatggataccttgtaacagaagctgattccaagcctcttgtggaatcaaataaaacccttgctgagactattggcaaagtcgcggtctattgcctgtataataagagtggatgccaatggcatggagagctatctgcctgtgtcacacatggtactgcttgtgcatatgggaactctcctgttgtttgcaatcgttgtgggacacaaattgtgcatcgtcaagtgcaagaacatgctcaagtctgccatggcttacaatctcaaacacaacaagctgatggtagtcaggtgcagctggcaacggcaacaactcagccagtcatccaagattcatcacttgcctcagctggatctgctgcagctgcagctacaaccctaacaaagccatcttcaactacagccacagctgtaacagattctgcagcagcaacaggaggggcagctggtgcaaccacagcagctgtgccttcttcagcttcatctatttctgcttcccaaactccaacagctgagcagtggtaccagcagcagcagcagctccaatactcgcaatactaccagcagcagcaccctggatccaacccttacatgcagcaacatcaacaatatgaccaataccagcaggcatatcagcaatacatgcaacctccaatgcaagtaccatcccaaaatgtggtgcaaggatctgcacaacctgcttcttatgttcagcctcaagttcagtcctcccaggtgatgatgcaagcccaaagtcagccccaggtccatccattgacgagtcagccacagcttcaacagcatccagttcaaccccgaccccaaagtcaccctcatatttcccatgttcaagcaccttcaggtcagtcgcagcttcatcaaccaattcagtcagcccaagttccacaggtccaaccaagtcaagttcctctccaaccatctggtctccaagtacaatctgcagcacatccatctgctcctactcaagttggtaatcagcaatttgcgactcaagcaatggcgtatcaggtccagccacatgtacaagctcaacctccgcagcagcaacatattgttgcacatcaacaacatccacatatgcaagctttacccctacagcaaaatattcaacctaagatgcagctaaactctcaagttcagctacagcctccacatgtccagcagcaagcttacccacaatctcaggtctatcctcaacagacacatcatatgcactcccagaatactacatatgcacagcagcaaacccaaggtgctttgatgcaacctgtacatgtgtcccaccaacaaacacatgtttctcatcatcctgcaccgatgcgtcctccatcgtcaggccatcagccagctttgcagcatcctcaggcccagggaattcaacatacatcacaacatgaaaaacatattgggtttcatgctcagtggccaacaatgtattccaacattccttcccaagcaccaccacagggattgtctgtgcactcatctgtttcctcacaatcagttcaatcataccagcaaggaatgtcttcatcacaacagatgcattcccaacctggtcagccatatacacaacagcatgttactggcaatactggacaacatgttcaaacttctgctggcagacctatggcccatcttgcaccaacacagcaatttcagcagcaacatccagcaatgcttagaactgagtcacctgctgctgggcactctattgggcagggtcctttagatcttgaaaaacatacttcaaaatcagggaagttggataatgcaactattgctgctgtcggtgaaaataaaaatagtggtcctgagtcagttgtcatgagacctacaaagtcacaattgggtgatgaaaacatgaacagcgaacacaatggttttgttggtgttagaaaagatgcagtgcaaactggcattgtatcacacaatttagatggttcaattaggagggatgggaatactgaccaggcaggcaattcacatggcccacttgtgcagggaggcaaagatcacaaggcttcagatgcatctactgatcatgagaaaggacgactgtttcaacaggcatcactgcaaaatgcaggggcaccgggctcttatgtgcccccaggtgtggtaccacatccatctggaccagataaaatgcttcctcagcatatgacgaatcatggtcatatgcatggtttctctgaaaatatccgtcctccgctgcaacaaccatatggtgtgtttcattctggaacgataacaaggccatttggagagaaccagattcagatgccaatgccacagcctgggggtatcagacctggtgatggtatgattcgtccttgtttggttggcccattacctggacatcatggtgcagtgttgccttcttttgatcttgaacgtttgggtcagccacgtcctcttggaatgttgaacagcaatgactttggtggtgaggggttcaacgcttcagggggtgcagcgcctccatttgcaaaccacagaagtgcaggtttgcatgaggattttccaagaaagcaaaatgcaactgccagtcaccctgacttcctgtcacatggagcagaatttgatcatcacagggctattggaatgcctaatttcagaaatccaggcccatttgctcaagggacaagtggcggtcctggtggccctcctaaacaccagcttggctctggtgacatgcatccaggtgaccctcatcttgtcgctgaatatgctcagcatggatttcctaaaactgcagcacactttggtttgggtggattcttgagaaacgggaattctggttggtgccgaatatgcatgtttaactgtgggagtgcagagaatctggatttgcatgtacaaacaagggaacatcagcaatgtgcaatggacattgtcctgaaaatgaagcaagatgttgcaaaaaggcaaaaactgaattatggagggcccaagtcattcaacaacaaaaaggtttctgggaagggccattttcgtgggaacaggcgctagtgttaactgattaaaattgatgtggttttgaaggttgctactggtgcttatggatgtgtcaatggcaatcgagaattgagatcttttcagacattctgttcatgcggttcagcgtatttgaagggaaacttaaactgcaaagtgtaggataatttccagcagagggctcctgtcatacttgcatgtttccctaacgatgataaaccaatcaaaagtaaaaaggagaggcgcgtgaagcctaacctacgaaggctacgagtatgaagtcgattatccaatgaagcctcacttacgaaagctatgggtgcaaagttacacatcctgtgaagccttgacgagaagaagaattgctccaagcccttaagaagtcaaagaaccttcactaggtgcatgtatgtgctcgtgaaggccagtcgatcatgaggacccgttaataccatggaatttggatgaaccattgtattttaagccaaaaggtgtttggtagcctttaaaaactctgtatataatactgtggtattatcgatactatggttattttggggtatagaaaactttggtccagaccaaagtttctttgctgtgcgcaatatctgttgagtatgcaagccatggaactggtaaaaaaactgttaagcaaagaataggaag

SEQ ID NO: 37159 - DNA, 4366 bp, Zea Mays
cgatcccggttgggaatggcctaaacgaacgaacaaggccactcggccccatccggcatccccgacccccgagcgtcttctttcgtctgctcgctctgcgctcgcatctaccatggagactagggtctagggtttagtgcgccgctgcctacatcgccgccatcctcaacttcctacgggatcctgacgaggcgccgtatcatcctcaacgccgcgaacctccgctcccacgttatcctcacgcccaccagtagctctcggcctctacctcgttaaggcttgatatttgactgggacactgggcaaattttaacaagtttcagcaatggggtttgataatgaatgcatcttgagtattcaatcccttcctggtgaatatttctgccctgtttgccggacacttgtatatccgaatgaggccctacaaactcaatgcacacatctctactgcaaatcctgcttggcatatgtagtggcaaccacacaagcttgtccttatgatggataccttgtaacagaagctgattccaagcctcttgtggaatcaaataaaacccttgctgagactattggcaaagtcgcggtctattgcctgtataataagagtggatgccaatggcatggagagctatctgcctgtgtcacacatggtactgcttgtgcatatgggaactctcctgttgtttgcaatcgttgtgggacacaaattgtgcatcgtcaagtgcaagaacatgctcaagtctgccatggcttacaatctcaaacacaacaagctgatggtagtcaggtgcagctggcaacggcaacaactcagccagtcatccaagattcatcacttgcctcagctggatctgctgcagctgcagctacaaccctaacaaagccatcttcaactacagccacagctgtaacagattctgcagcagcaacaggaggggcagctggtgcaaccacagcagctgtgccttcttcagcttcatctatttctgcttcccaaactccaacagctgagcagtggtaccagcagcagcagcagctccaatactcgcaatactaccagcagcagcaccctggatccaacccttacatgcagcaacatcaacaatatgaccaataccagcaggcatatcagcaatacatgcaacctccaatgcaagtaccatcccaaaatgtggtgcaaggatctgcacaacctgcttcttatgttcagcctcaagttcagtcctcccaggtgatgatgcaagcccaaagtcagccccaggtccatccattgacgagtcagccacagcttcaacagcatccagttcaaccccgaccccaaagtcaccctcatatttcccatgttcaagcaccttcaggtcagtcgcagcttcatcaaccaattcagtcagcccaagttccacaggtccaaccaagtcaagttcctctccaaccatctggtctccaagtacaatctgcagcacatccatctgctcctactcaagttggtaatcagcaatttgcgactcaagcaatggcgtatcaggtccagccacatgtacaagctcaacctccgcagcagcaacatattgttgcacatcaacaacatccacatatgcaagctttacccctacagcaaaatattcaacctaagatgcagctaaactctcaagttcagctacagcctccacatgtccagcagcaagcttacccacaatctcaggtctatcctcaacagacacatcatatgcactcccagaatactacatatgcacagcagcaaacccaaggtgctttgatgcaacctgtacatgtgtcccaccaacaaacacatgtttctcatcatcctgcaccgatgcgtcctccatcgtcaggccatcagccagctttgcagcatcctcaggcccagggaattcaacatacatcacaacatgaaaaacatattgggtttcatgctcagtggccaacaatgtattccaacattccttcccaagcaccaccacagggattgtctgtgcactcatctgtttcctcacaatcagttcaatcataccagcaaggaatgtcttcatcacaacagatgcattcccaacctggtcagccatatacacaacagcatgttactggcaatactggacaacatgttcaaacttctgctggcagacctatggcccatcttgcaccaacacagcaatttcagcagcaacatccagcaatgcttagaactgagtcacctgctgctgggcactctattgggcagggtcctttagatcttgaaaaacatacttcaaaatcagggaagttggataatgcaactattgctgctgtcggtgaaaataaaaatagtggtcctgagtcagttgtcatgagacctacaaagtcacaattgggtgatgaaaacatgaacagcgaacacaatggttttgttggtgttagaaaagatgcagtgcaaactggcattgtatcacacaatttagatggttcaattaggagggatgggaatactgaccaggcaggcaattcacatggcccacttgtgcagggaggcaaagatcacaaggcttcagatgcatctactgatcatgagaaaggacgactgtttcaacaggcatcactgcaaaatgcaggggcaccgggctcttatgtgcccccaggtgtggtaccacatccatctggaccagataaaatgcttcctcagcatatgacgaatcatggtcatatgcatggtttctctgaaaatatccgtcctccgctgcaacaaccatatggtgtgtttcattctggaacgataacaaggccatttggagagaaccagattcagatgccaatgccacagcctgggggtatcagacctggtgatggtatgattcgtccttgtttggttggcccattacctggacatcatggtgcagtgttgccttcttttgatcttgaacgtttgggtcagccacgtcctcttggaatgttgaacagcaatgactttggtggtgaggggttcaacgcttcagggggtgcagcgtatcctgaaagacatgataataccgaagacagtcggaaacattttccagcaccagcccctctagatgatcagggcttgcgaagggaccctagacattttgagagagctttaggtagacctgatggtttccttgattcagtacctggaaggcctccatttgcaaaccacagaagtgcaggtttgcatgaggattttccaagaaagcaaaatgcaactgccagtcaccctgacttcctgtcacatggagcagaatttgatcatcacagggctattggaatgcctaatttcagaaatccaggcccatttgctcaagggacaagtggcggtcctggtggccctcctaaacaccagcttggctctggtaaccttcctgggaatttacattcttttgagggtgacatgcatccaggtgaccctcatcttgtcgctgaatatgctcagcatggatttcctaaaactgcagcacactttggtttgggtggattcttgagaaacgggaattctggttggtgccgaatatgcatgtttaactgtgggagtgcagagaatctggatttgcatgtacaaacaagggaacatcagcaatgtgcaatggacattgtcctgaaaatgaagcaagatgttgcaaaaaggcaaaaactgaattatggagggcccaagtcattcaacaacaaaaaggtttctgggaagggccattttcgtgggaacaggcgctagtgttaactgattaaaattgatgtggttttgaaggttgctactggtgcttatggatgtgtcaatggcaatcgagaattgagatcttttcagacattctgttcatgcggttcagcgtatttgaagggaaacttaaactgcaaagtgtaggataatttccagcagagggctcctgtcatacttgcatgtttccctaacgatgataaaccaatcaaaagtaaaaaggagaggcgcgtgaagcctaacctacgaaggctacgagtatgaagtcgattatccaatgaagcctcacttacgaaagctatgggtgcaaagttacacatcctgtgaagccttgacgagaagaagaattgctccaagcccttaagaagtcaaagaaccttcactaggtgcatgtatgtgctcgtgaaggccagtcgatcatgaggacccgttaataccatggaatttggatgaaccattgtattttaagccaaaaggtgtttggtagcctttaaaaactctgtatataatactgtggtattatcgatactatggttattttggggtatagaaaactttggtccagaccaaagtttctttgctgtgcgcaatatctgttgagtatgcaagccatggaactggtaaaaaaactgttaagcaaagaataggaag

SEQ ID NO: 37160 - DNA, 4621 bp, Zea Mays
cgatcccggttgggaatggcctaaacgaacgaacaaggccactcggccccatccggcatccccgacccccgagcgtcttctttcgtctgctcgctctgcgctcgcatctaccatggagactagggtctagggtttagtgcgccgctgcctacatcgccgccatcctcaacttcctacgggatcctgacgaggcgccgtatcatcctcaacgccgcgaacctccgctcccacgttatcctcacgcccaccagtagctctcggcctctacctcgttaaggcttgatatttgactgggacactgggcaaattttaacaagtttcagcaatggggtttgataatgaatgcatcttgagtattcaatcccttcctggtgaatatttctgccctgtttgccggacacttgtatatccgaatgaggccctacaaactcaatgcacacatctctactgcaaatcctgcttggcatatgtagtggcaaccacacaagcttgtccttatgatggataccttgtaacagaagctgattccaagcctcttgtggaatcaaataaaacccttgctgagactattggcaaagtcgcggtctattgcctgtataataagagtggatgccaatggcatggagagctatctgcctgtgtcacacatggtactgcttgtgcatatgggaactctcctgttgtttgcaatcgttgtgggacacaaattgtgcatcgtcaagtgcaagaacatgctcaagtctgccatggcttacaatctcaaacacaacaagctgatggtagtcaggtgcagctggcaacggcaacaactcagccagtcatccaagattcatcacttgcctcagctggatctgctgcagctgcagctacaaccctaacaaagccatcttcaactacagccacagctgtaacagattctgcagcagcaacaggaggggcagctggtgcaaccacagcagctgtgccttcttcagcttcatctatttctgcttcccaaactccaacagctgagcagtggtaccagcagcagcagcagctccaatactcgcaatactaccagcagcagcaccctggatccaacccttacatgcagcaacatcaacaatatgaccaataccagcaggcatatcagcaatacatgcaacctccaatgcaagtaccatcccaaaatgtggtgcaaggatctgcacaacctgcttcttatgttcagcctcaagttcagtcctcccaggtgatgatgcaagcccaaagtcagccccaggtccatccattgacgagtcagccacagcttcaacagcatccagttcaaccccgaccccaaagtcaccctcatatttcccatgttcaagcaccttcaggtcagtcgcagcttcatcaaccaattcagtcagcccaagttccacaggtccaaccaagtcaagttcctctccaaccatctggtctccaagtacaatctgcagcacatccatctgctcctactcaagttggtaatcagcaatttgcgactcaagcaatggcgtatcaggtccagccacatgtacaagctcaacctccgcagcagcaacatattgttgcacatcaacaacatccacatatgcaagctttacccctacagcaaaatattcaacctaagatgcagctaaactctcaagttcagctacagcctccacatgtccagcagcaagcttacccacaatctcaggtctatcctcaacagacacatcatatgcactcccagaatactacatatgcacagcagcaaacccaaggtgctttgatgcaacctgtacatgtgtcccaccaacaaacacatgtttctcatcatcctgcaccgatgcgtcctccatcgtcaggccatcagccagctttgcagcatcctcaggcccagggaattcaacatacatcacaacatgaaaaacatattgggtttcatgctcagtggccaacaatgtattccaacattccttcccaagcaccaccacagggattgtctgtgcactcatctgtttcctcacaatcagttcaatcataccagcaaggaatgtcttcatcacaacagatgcattcccaacctggtcagccatatacacaacagcatgttactggcaatactggacaacatgttcaaacttctgctggcagacctatggcccatcttgcaccaacacagcaatttcagcagcaacatccagcaatgcttagaactgagtcacctgctgctgggcactctattgggcagggtcctttagatcttgaaaaacatacttcaaaatcagggaagttggataatgcaactattgctgctgtcggtgaaaataaaaatagtggtcctgagtcagttgtcatgagacctacaaagtcacaattgggtgatgaaaacatgaacagcgaacacaatggttttgttggtgttagaaaagatgcagtgcaaactggcattgtatcacacaatttagatggttcaattaggagggatgggaatactgaccaggcaggcaattcacatggcccacttgtgcagggaggcaaagatcacaaggcttcagatgcatctactgatcatgagaaaggacgactgtttcaacaggcatcactgcaaaatgcaggggcaccgggctcttatgtgcccccaggtgtggtaccacatccatctggaccagataaaatgcttcctcagcatatgacgaatcatggtcatatgcatggtttctctgaaaatatccgtcctccgctgcaacaaccatatggtgtgtttcattctggaacgataacaaggccatttggagagaaccagattcagatgccaatgccacagcctgggggtatcagacctggtgatggtatgattcgtccttgtttggttggcccattacctggacatcatggtgcagtgttgccttcttttgatcttgaacgtttgggtcagccacgtcctcttggaatgttgaacagcaatgactttggtggtgaggggttcaacgcttcagggggtgcagcgtatcctgaaagacatgataataccgaagacagtcggaaacattttccagcaccagcccctctagatgatcagggcttgcgaagggaccctagacattttgagagagctttaggtagacctgatggtttccttgattcagtacctggaaggcctccatttgcaaaccacagaagtgcaggtttgcatgaggattttccaagaaagcaaaatgcaactgccagtcaccctgacttcctgtcacatggagcagaatttgatcatcacagggctattggaatgcctaatttcagaaatccaggcccatttgctcaagggacaagtggcggtcctggtggccctcctaaacaccagcttggctctggtaaccttcctgggaatttacattcttttgagggtgacatgcatccaggtgaccctcatcttgtcgctgaatatgctcagcatggatttcctaaaactgcagcacactttggtttgggtggattcttgagaaacgggaattctggttggtgccgaatatgcatgtttaactgtgggagtgcagagaatctggatttgcatgtacaaacaagggaacatcagcaatgtgcaatggacattgtcctgaaaatgaagcaagatgttgcaaaaaggcaaaaactgaattatggagggcccaagtcattcaacaacaaaaaggtttctgggaagggccattttcgtgggaacaggcgctagtgttaactgattaaaattgatgtggttttgaaggttgctactggtgcttatggatgtgtcaatggcaatcgagaattgagatcttttcagacattctgttcatgcggttcagcgtatttgaagggaaacttgtaatggtcccaaacttttgttccatgttgatctgcagagttcacatggctatgtttacttcacgtatttttgccgaagttgttctgggattgcttaacatgctaatatccttcttctgtacgtgctgatttataactcctgtttctttcaactaggctcatgctttttctaatggcgacctaataatagaccatgctggaacttttacaaagagacttgtaattgtgtcatcagacatccataacatgaaactgcaaagtgtaggataatttccagcagagggctcctgtcatacttgcatgtttccctaacgatggtaaggataaaccaatcaaaagtaaaaaggagaggcgcgtgaagcctaacctacgaaggctacgagtatgaagtcgattatccaatgaagcctcacttacgaaagctatgggtgcaaagttacacatcctgtgaagccttgacgagaagaagaattgctccaagcccttaagaagtcaaagaaccttcactaggtgcatgtatgtgctcgtgaaggccagtcgatcatgaggacccgttaataccatggaatttggatgaaccattgtattttaagccaaaaggtgtttggtagcctttaaaaactctgtatataatactgtggtattatcgatactatggttattttggggtatagaaaactttggtccagaccaaagtttctttgctgtgcgcaatatctgttgagtatgcaagccatggaactggtaaaaaaactgttaagcaaagaataggaag

SEQ ID NO: 37161 - DNA, 4576 bp, Zea Mays
cgatcccggttgggaatggcctaaacgaacgaacaaggccactcggccccatccggcatccccgacccccgagcgtcttctttcgtctgctcgctctgcgctcgcatctaccatggagactagggtctagggtttagtgcgccgctgcctacatcgccgccatcctcaacttcctacgggatcctgacgaggcgccgtatcatcctcaacgccgcgaacctccgctcccacgttatcctcacgcccaccagtagctctcggcctctacctcgttaaggcttgatatttgactgggacactgggcaaattttaacaagtttcagcaatggggtttgataatgaatgcatcttgagtattcaatcccttcctggtgaatatttctgccctgtttgccggacacttgtatatccgaatgaggccctacaaactcaatgcacacatctctactgcaaatcctgcttggcatatgtagtggcaaccacacaagcttgtccttatgatggataccttgtaacagaagctgattccaagcctcttgtggaatcaaataaaacccttgctgagactattggcaaagtcgcggtctattgcctgtataataagagtggatgccaatggcatggagagctatctgcctgtgtcacacatggtactgcttgtgcatatgggaactctcctgttgtttgcaatcgttgtgggacacaaattgtgcatcgtcaagtgcaagaacatgctcaagtctgccatggcttacaatctcaaacacaacaagctgatggtagtcaggtgcagctggcaacggcaacaactcagccagtcatccaagattcatcacttgcctcagctggatctgctgcagctgcagctacaaccctaacaaagccatcttcaactacagccacagctgtaacagattctgcagcagcaacaggaggggcagctggtgcaaccacagcagctgtgccttcttcagcttcatctatttctgcttcccaaactccaacagctgagcagtggtaccagcagcagcagcagctccaatactcgcaatactaccagcagcagcaccctggatccaacccttacatgcagcaacatcaacaatatgaccaataccagcaggcatatcagcaatacatgcaacctccaatgcaagtaccatcccaaaatgtggtgcaaggatctgcacaacctgcttcttatgttcagcctcaagttcagtcctcccaggtgatgatgcaagcccaaagtcagccccaggtccatccattgacgagtcagccacagcttcaacagcatccagttcaaccccgaccccaaagtcaccctcatatttcccatgttcaagcaccttcaggtcagtcgcagcttcatcaaccaattcagtcagcccaagttccacaggtccaaccaagtcaagttcctctccaaccatctggtctccaagtacaatctgcagcacatccatctgctcctactcaagttggtaatcagcaatttgcgactcaagcaatggcgtatcaggtccagccacatgtacaagctcaacctccgcagcagcaacatattgttgcacatcaacaacatccacatatgcaagctttacccctacagcaaaatattcaacctaagatgcagctaaactctcaagttcagctacagcctccacatgtccagcagcaagcttacccacaatctcaggtctatcctcaacagacacatcatatgcactcccagaatactacatatgcacagcagcaaacccaaggtgctttgatgcaacctgtacatgtgtcccaccaacaaacacatgtttctcatcatcctgcaccgatgcgtcctccatcgtcaggccatcagccagctttgcagcatcctcaggcccagggaattcaacatacatcacaacatgaaaaacatattgggtttcatgctcagtggccaacaatgtattccaacattccttcccaagcaccaccacagggattgtctgtgcactcatctgtttcctcacaatcagttcaatcataccagcaaggaatgtcttcatcacaacagatgcattcccaacctggtcagccatatacacaacagcatgttactggcaatactggacaacatgttcaaacttctgctggcagacctatggcccatcttgcaccaacacagcaatttcagcagcaacatccagcaatgcttagaactgagtcacctgctgctgggcactctattgggcagggtcctttagatcttgaaaaacatacttcaaaatcagggaagttggataatgcaactattgctgctgtcggtgaaaataaaaatagtggtcctgagtcagttgtcatgagacctacaaagtcacaattgggtgatgaaaacatgaacagcgaacacaatggttttgttggtgttagaaaagatgcagtgcaaactggcattgtatcacacaatttagatggttcaattaggagggatgggaatactgaccaggcaggcaattcacatggcccacttgtgcagggaggcaaagatcacaaggcttcagatgcatctactgatcatgagaaaggacgactgtttcaacaggcatcactgcaaaatgcaggggcaccgggctcttatgtgcccccaggtgtggtaccacatccatctggaccagataaaatgcttcctcagcatatgacgaatcatggtcatatgcatggtttctctgaaaatatccgtcctccgctgcaacaaccatatggtgtgtttcattctggaacgataacaaggccatttggagagaaccagattcagatgccaatgccacagcctgggggtatcagacctggtgatggtatgattcgtccttgtttggttggcccattacctggacatcatggtgcagtgttgccttcttttgatcttgaacgtttgggtcagccacgtcctcttggtaatactctaggtcataggccaatacttcttctgttgttgcaagtatgctgatctaacttccatttattcaggaatgttgaacagcaatgactttggtggtgaggggttcaacgcttcagggggtgcagcgtatcctgaaagacatgataataccgaagacagtcggaaacattttccagcaccagcccctctagatgatcagggcttgcgaagggaccctagacattttgagagagctttaggtagacctgatggtttccttgattcagtacctggaaggcctccatttgcaaaccacagaagtgcaggtttgcatgaggattttccaagaaagcaaaatgcaactgccagtcaccctgacttcctgtcacatggagcagaatttgatcatcacagggctattggaatgcctaatttcagaaatccaggcccatttgctcaagggacaagtggcggtcctggtggccctcctaaacaccagcttggctctggtaaccttcctgggaatttacattcttttgagggtgacatgcatccaggtgaccctcatcttgtcgctgaatatgctcagcatggatttcctaaaactgcagcacactttggtttgggtggattcttgagaaacgggaattctggttggtgccgaatatgcatgtttaactgtgggagtgcagagaatctggatttgcatgtacaaacaagggaacatcagcaatgtgcaatggacattgtcctgaaaatgaagcaagatgttgcaaaaaggaattatggagggcccaagtcattcaacaacaaaaaggtttctgggaagggccattttcgtgggaacaggcgctagtgttaactgattaaaattgatgtggttttgaaggttgctactggtgcttatggatgtgtcaatggcaatcgagaattgagatcttttcagacattctgttcatgcggttcagcgtatttgaagggaaacttgtaatggtcccaaacttttgttccatgttgatctgcagagttcacatggctatgtttacttcacgtatttttgccgaagttgttctgggattgcttaacatgctaatatccttcttctaaactgcaaagtgtaggataatttccagcagagggctcctgtcatacttgcatgtttccctaacgatggtaaggatgacatgctttcataatgctgataaaccaatcaaaagtaaaaaggagaggcgcgtgaagcctaacctacgaaggctacgagtatgaagtcgattatccaatgaagcctcacttacgaaagctatgggtgcaaagttacacatcctgtgaagccttgacgagaagaagaattgctccaagcccttaagaagtcaaagaaccttcactaggtgcatgtatgtgctcgtgaaggccagtcgatcatgaggacccgttaataccatggaatttggatgaaccattgtattttaagccaaaaggtgtttggtagcctttaaaaactctgtatataatactgtggtattatcgatactatggttattttggggtatagaaaactttggtccagaccaaagtttctttgctgtgcgcaatatctgttgagtatgcaagccatggaactggtaaaaaaactgttaagcaaagaataggaag

SEQ ID NO: 37162 - DNA, 5498 bp, Zea Mays
cgatcccggttgggaatggcctaaacgaacgaacaaggccactcggccccatccggcatccccgacccccgagcgtcttctttcgtctgctcgctctgcgctcgcatctaccatggagactagggtctagggtttagtgcgccgctgcctacatcgccgccatcctcaacttcctacgggatcctgacgaggcgccgtatcatcctcaacgccgcgaacctccgctcccacgttatcctcacgcccaccagtagctctcggcctctacctcgttaaggcttgatatttgactgggacactgggcaaattttaacaagtttcagcaatggggtttgataatgaatgcatcttgagtattcaatcccttcctggtgaatatttctgccctgtttgccggacacttgtatatccgaatgaggccctacaaactcaatgcacacatctctactgcaaatcctgcttggcatatgtagtggcaaccacacaagcttgtccttatgatggataccttgtaacagaagctgattccaagcctcttgtggaatcaaataaaacccttgctgagactattggcaaagtcgcggtctattgcctgtataataagagtggatgccaatggcatggagagctatctgcctgtgtcacacatggtactgcttgtgcatatgggaactctcctgttgtttgcaatcgttgtgggacacaaattgtgcatcgtcaagtgcaagaacatgctcaagtctgccatggcttacaatctcaaacacaacaagctgatggtagtcaggtgcagctggcaacggcaacaactcagccagtcatccaagattcatcacttgcctcagctggatctgctgcagctgcagctacaaccctaacaaagccatcttcaactacagccacagctgtaacagattctgcagcagcaacaggaggggcagctggtgcaaccacagcagctgtgccttcttcagcttcatctatttctgcttcccaaactccaacagctgagcagtggtaccagcagcagcagcagctccaatactcgcaatactaccagcagcagcaccctggatccaacccttacatgcagcaacatcaacaatatgaccaataccagcaggcatatcagcaatacatgcaacctccaatgcaagtaccatcccaaaatgtggtgcaaggatctgcacaacctgcttcttatgttcagcctcaagttcagtcctcccaggtgatgatgcaagcccaaagtcagccccaggtccatccattgacgagtcagccacagcttcaacagcatccagttcaaccccgaccccaaagtcaccctcatatttcccatgttcaagcaccttcaggtcagtcgcagcttcatcaaccaattcagtcagcccaagttccacaggtccaaccaagtcaagttcctctccaaccatctggtctccaagtacaatctgcagcacatccatctgctcctactcaagttggtaatcagcaatttgcgactcaagcaatggcgtatcaggtccagccacatgtacaagctcaacctccgcagcagcaacatattgttgcacatcaacaacatccacatatgcaagctttacccctacagcaaaatattcaacctaagatgcagctaaactctcaagttcagctacagcctccacatgtccagcagcaagcttacccacaatctcaggtctatcctcaacagacacatcatatgcactcccagaatactacatatgcacagcagcaaacccaaggtgctttgatgcaacctgtacatgtgtcccaccaacaaacacatgtttctcatcatcctgcaccgatgcgtcctccatcgtcaggccatcagccagctttgcagcatcctcaggcccagggaattcaacatacatcacaacatgaaaaacatattgggtttcatgctcagtggccaacaatgtattccaacattccttcccaagcaccaccacagggattgtctgtgcactcatctgtttcctcacaatcagttcaatcataccagcaaggaatgtcttcatcacaacagatgcattcccaacctggtcagccatatacacaacagcatgttactggcaatactggacaacatgttcaaacttctgctggcagacctatggcccatcttgcaccaacacagcaatttcagcagcaacatccagcaatgcttagaactgagtcacctgctgctgggcactctattgggcagggtcctttagatcttgaaaaacatacttcaaaatcagggaagttggataatgcaactattgctgctgtcggtgaaaataaaaatagtggtcctgagtcagttgtcatgagacctacaaagtcacaattgggtgatgaaaacatgaacagcgaacacaatggttttgttggtgttagaaaagatgcagtgcaaactggcattgtatcacacaatttagatggttcaattaggagggatgggaatactgaccaggcaggcaattcacatggcccacttgtgcagggaggcaaagatcacaaggcttcagatgcatctactgatcatgagaaaggacgactgtttcaacaggcatcactgcaaaatgcaggggcaccgggctcttatgtgcccccaggtgtggtaccacatccatctggaccagataaaatgcttcctcagcatatgacgaatcatggtcatatgcatggtttctctgaaaatatccgtcctccgctgcaacaaccatatggtgtgtttcattctggaacgataacaaggccatttggagagaaccagattcagatgccaatgccacagcctgggggtatcagacctggtgatggtatgattcgtccttgtttggttggcccattacctggacatcatggtgcagtgttgccttcttttgatcttgaacgtttgggtcagccacgtcctcttggaatgttgaacagcaatgactttggtggtgaggggttcaacgcttcagggggtgcagcgtatcctgaaagacatgataataccgaagacagtcggaaacattttccagcaccagcccctctagatgatcagggcttgcgaagggaccctagacattttgagagagctttaggtagacctgatggtttccttgattcagtacctggaaggcctccatttgcaaaccacagaagtgcaggtttgcatgaggattttccaagaaagcaaaatgcaactgccagtcaccctgacttcctgtcacatggagcagaatttgatcatcacagggctattggaatgcctaatttcagaaatccaggcccatttgctcaagggacaagtggcggtcctggtggccctcctaaacaccagcttggctctggtaaccttcctgggaatttacattcttttgagggtgacatgcatccaggtgaccctcatcttgtcgctgaatatgctcagcatggatttcctaaaactgcagcacactttggtttgggtggattcttgagaaacgggaattctggttggtgccgaatatgcatgtttaactgtgggagtgcagagaatctggatttgcatgtacaaacaagggaacatcagcaatgtgcaatggacattgtcctgaaaatgaagcaagatgttgcaaaaaggcaaaaactgaattatggagggcccaagtcattcaacaacaaaaaggtttctgggaagggccattttcgtgggaacaggcgctagtgttaactgattaaaattgatgtggttttgaaggttgctactggtgcttatggatgtgtcaatggcaatcgagaattgagatcttttcagacattctgttcatgcggttcagcgtatttgaagggaaacttgtaatggtcccaaacttttgttccatgttgatctgcagagttcacatggctatgtttacttcacgtatttttgccgaagttgttctgggattgcttaacatgctaatatccttcttctgtacgtgctgatttataactcctgtttctttcaactaggctcatgctttttctaatggcgacctaataatagaccatgctggaacttttacaaagagacttgtaattgtgtcatcagacatccataacatggtaaattttgttggaatcttttggtagggggctaatggaaacatgttgaagttactttcagtgcctgaaaattgtgctagttttgcatagtttaaatccaaaaaaatctaagggtgcattggacaaatagttttttttatgtcacagcccaatttgcttaatcatttattttaataaaattattgaatactgactctgtgatatgtccccattcaaaacaagaagggcaaaagtgctgcattcctgaataaacacaagggctagagttgttgacatgtcattgcatgacaacaaagcaatccaaatcaacaaaaataatctcattgaagcggttgcctattttgtgccttgagggatgcattagtgataaagggagacttggaagcctgcaaggaaacacaaaagcatgaagaggtttgagttgggatatgtactttgagtgttagcatgagatgggagggaatcgatggtaaacctaatttagaaccaaaacatgagttgtgctcaaatatagaaggaaaagaaagatatactggttttcatatgaatactggtatgtgcatcatatacgcagtaacgcagagcttgttgataccgaactggagttgtattattcacttctagttagttattcgagatagtgatggttttattgtcataggtttgatgttcagaataggacatcataggattctacaggctacaagcactaaatattatgggtaaaatacttaggtttccaattcactgctgctggacagatgtgattgtttgcatgtgacattttgctgatggtggcctttctctagatgtctgttttaaatcatctgtctttgctgtttgtttgctaaacagaaactgcaaagtgtaggataatttccagcagagggctcctgtcatacttgcatgtttccctaacgatggtaaggatgacatgctttcataatgctgataaaccaatcaaaagtaaaaaggagaggcgcgtgaagcctaacctacgaaggctacgagtatgaagtcgattatccaatgaagcctcacttacgaaagctatgggtgcaaagttacacatcctgtgaagccttgacgagaagaagaattgctccaagcccttaagaagtcaaagaaccttcactaggtgcatgtatgtgctcgtgaaggccagtcgatcatgaggacccgttaataccatggaatttggatgaaccattgtattttaagccaaaaggtgtttggtagcctttaaaaactctgtatataatactgtggtattatcgatactatggttattttggggtatagaaaactttggtccagaccaaagtttctttgctgtgcgcaatatctgttgagtatgcaagccatggaactggtaaaaaaactgttaagcaaagaataggaag

SEQ ID NO: 37163 - DNA, 4361 bp, Zea Mays
cgatcccggttgggaatggcctaaacgaacgaacaaggccactcggccccatccggcatccccgacccccgagcgtcttctttcgtctgctcgctctgcgctcgcatctaccatggagactagggtctagggtttagtgcgccgctgcctacatcgccgccatcctcaacttcctacgggatcctgacgaggcgccgtatcatcctcaacgccgcgaacctccgctcccacgttatcctcacgcccaccagtagctctcggcctctacctcgttaaggcttgatatttgactgggacactgggcaaattttaacaagtttcagcaatggggtttgataatgaatgcatcttgagtattcaatcccttcctggtgaatatttctgccctgtttgccggacacttgtatatccgaatgaggccctacaaactcaatgcacacatctctactgcaaatcctgcttggcatatgtagtggcaaccacacaagcttgtccttatgatggataccttgtaacagaagctgattccaagcctcttgtggaatcaaataaaacccttgctgagactattggcaaagtcgcggtctattgcctgtataataagagtggatgccaatggcatggagagctatctgcctgtgtcacacatggtactgcttgtgcatatgggaactctcctgttgtttgcaatcgttgtgggacacaaattgtgcatcgtcaagtgcaagaacatgctcaagtctgccatggcttacaatctcaaacacaacaagctgatggtagtcaggtgcagctggcaacggcaacaactcagccagtcatccaagattcatcacttgcctcagctggatctgctgcagctgcagctacaaccctaacaaagccatcttcaactacagccacagctgtaacagattctgcagcagcaacaggaggggcagctggtgcaaccacagcagctgtgccttcttcagcttcatctatttctgcttcccaaactccaacagctgagcagtggtaccagcagcagcagcagctccaatactcgcaatactaccagcagcagcaccctggatccaacccttacatgcagcaacatcaacaatatgaccaataccagcaggcatatcagcaatacatgcaacctccaatgcaagtaccatcccaaaatgtggtgcaaggatctgcacaacctgcttcttatgttcagcctcaagttcagtcctcccaggtgatgatgcaagcccaaagtcagccccaggtccatccattgacgagtcagccacagcttcaacagcatccagttcaaccccgaccccaaagtcaccctcatatttcccatgttcaagcaccttcaggtcagtcgcagcttcatcaaccaattcagtcagcccaagttccacaggtccaaccaagtcaagttcctctccaaccatctggtctccaagtacaatctgcagcacatccatctgctcctactcaagttggtaatcagcaatttgcgactcaagcaatggcgtatcaggtccagccacatgtacaagctcaacctccgcagcagcaacatattgttgcacatcaacaacatccacatatgcaagctttacccctacagcaaaatattcaacctaagatgcagctaaactctcaagttcagctacagcctccacatgtccagcagcaagcttacccacaatctcaggtctatcctcaacagacacatcatatgcactcccagaatactacatatgcacagcagcaaacccaaggtgctttgatgcaacctgtacatgtgtcccaccaacaaacacatgtttctcatcatcctgcaccgatgcgtcctccatcgtcaggccatcagccagctttgcagcatcctcaggcccagggaattcaacatacatcacaacatgaaaaacatattgggtttcatgctcagtggccaacaatgtattccaacattccttcccaagcaccaccacagggattgtctgtgcactcatctgtttcctcacaatcagttcaatcataccagcaaggaatgtcttcatcacaacagatgcattcccaacctggtcagccatatacacaacagcatgttactggcaatactggacaacatgttcaaacttctgctggcagacctatggcccatcttgcaccaacacagcaatttcagcagcaacatccagcaatgcttagaactgagtcacctgctgctgggcactctattgggcagggtcctttagatcttgaaaaacatacttcaaaatcagggaagttggataatgcaactattgctgctgtcggtgaaaataaaaatagtggtcctgagtcagttgtcatgagacctacaaagtcacaattgggtgatgaaaacatgaacagcgaacacaatggttttgttggtgttagaaaagatgcagtgcaaactggcattgtatcacacaatttagatggttcaattaggagggatgggaatactgaccaggcaggcaattcacatggcccacttgtgcagggaggcaaagatcacaaggcttcagatgcatctactgatcatgagaaaggacgactgtttcaacaggcatcactgcaaaatgcaggggcaccgggctcttatgtgcccccaggtgtggtaccacatccatctggaccagataaaatgcttcctcagcatatgacgaatcatggtcatatgcatggtttctctgaaaatatccgtcctccgctgcaacaaccatatggtgtgtttcattctggaacgataacaaggccatttggagagaaccagattcagatgccaatgccacagcctgggggtatcagacctggtgatggtatgattcgtccttgtttggttggcccattacctggacatcatggtgcagtgttgccttcttttgatcttgaacgtttgggtcagccacgtcctcttggaatgttgaacagcaatgactttggtggtgaggggttcaacgcttcagggggtgcagcgtatcctgaaagacatgataataccgaagacagtcggaaacattttccagcaccagcccctctagatgatcagggcttgcgaagggaccctagacattttgagagagctttaggtagacctgatggtttccttgattcagtacctggaaggcctccatttgcaaaccacagaagtgcaggtttgcatgaggattttccaagaaagcaaaatgcaactgccagtcaccctgacttcctgtcacatggagcagaatttgatcatcacagggctattggaatgcctaatttcagaaatccaggcccatttgctcaagggacaagtggcggtcctggtggccctcctaaacaccagcttggctctggtgacatgcatccaggtgaccctcatcttgtcgctgaatatgctcagcatggatttcctaaaactgcagcacactttggtttgggtggattcttgagaaacgggaattctggttggtgccgaatatgcatgtttaactgtgggagtgcagagaatctggatttgcatgtacaaacaagggaacatcagcaatgtgcaatggacattgtcctgaaaatgaagcaagatgttgcaaaaaggcaaaaactgaattatggagggcccaagtcattcaacaacaaaaaggtttctgggaagggccattttcgtgggaacaggcgctagtgttaactgattaaaattgatgtggttttgaaggttgctactggtgcttatggatgtgtcaatggcaatcgagaattgagatcttttcagacattctgttcatgcggttcagcgtatttgaagggaaacttaaactgcaaagtgtaggataatttccagcagagggctcctgtcatacttgcatgtttccctaacgatggtaaggatgacatgctttcataatgctgataaaccaatcaaaagtaaaaaggagaggcgcgtgaagcctaacctacgaaggctacgagtatgaagtcgattatccaatgaagcctcacttacgaaagctatgggtgcaaagttacacatcctgtgaagccttgacgagaagaagaattgctccaagcccttaagaagtcaaagaaccttcactaggtgcatgtatgtgctcgtgaaggccagtcgatcatgaggacccgttaataccatggaatttggatgaaccattgtattttaagccaaaaggtgtttggtagcctttaaaaactctgtatataatactgtggtattatcgatactatggttattttggggtatagaaaactttggtccagaccaaagtttctttgctgtgcgcaatatctgttgagtatgcaagccatggaactggtaaaaaaactgttaagcaaagaataggaag

SEQ ID NO: 37164 - DNA, 4512 bp, Zea Mays
cgatcccggttgggaatggcctaaacgaacgaacaaggccactcggccccatccggcatccccgacccccgagcgtcttctttcgtctgctcgctctgcgctcgcatctaccatggagactagggtctagggtttagtgcgccgctgcctacatcgccgccatcctcaacttcctacgggatcctgacgaggcgccgtatcatcctcaacgccgcgaacctccgctcccacgttatcctcacgcccaccagtagctctcggcctctacctcgttaaggcttgatatttgactgggacactgggcaaattttaacaagtttcagcaatggggtttgataatgaatgcatcttgagtattcaatcccttcctggtgaatatttctgccctgtttgccggacacttgtatatccgaatgaggccctacaaactcaatgcacacatctctactgcaaatcctgcttggcatatgtagtggcaaccacacaagcttgtccttatgatggataccttgtaacagaagctgattccaagcctcttgtggaatcaaataaaacccttgctgagactattggcaaagtcgcggtctattgcctgtataataagagtggatgccaatggcatggagagctatctgcctgtgtcacacatggtactgcttgtgcatatgggaactctcctgttgtttgcaatcgttgtgggacacaaattgtgcatcgtcaagtgcaagaacatgctcaagtctgccatggcttacaatctcaaacacaacaagctgatggtagtcaggtgcagctggcaacggcaacaactcagccagtcatccaagattcatcacttgcctcagctggatctgctgcagctgcagctacaaccctaacaaagccatcttcaactacagccacagctgtaacagattctgcagcagcaacaggaggggcagctggtgcaaccacagcagctgtgccttcttcagcttcatctatttctgcttcccaaactccaacagctgagcagtggtaccagcagcagcagcagctccaatactcgcaatactaccagcagcagcaccctggatccaacccttacatgcagcaacatcaacaatatgaccaataccagcaggcatatcagcaatacatgcaacctccaatgcaagtaccatcccaaaatgtggtgcaaggatctgcacaacctgcttcttatgttcagcctcaagttcagtcctcccaggtgatgatgcaagcccaaagtcagccccaggtccatccattgacgagtcagccacagcttcaacagcatccagttcaaccccgaccccaaagtcaccctcatatttcccatgttcaagcaccttcaggtcagtcgcagcttcatcaaccaattcagtcagcccaagttccacaggtccaaccaagtcaagttcctctccaaccatctggtctccaagtacaatctgcagcacatccatctgctcctactcaagttggtaatcagcaatttgcgactcaagcaatggcgtatcaggtccagccacatgtacaagctcaacctccgcagcagcaacatattgttgcacatcaacaacatccacatatgcaagctttacccctacagcaaaatattcaacctaagatgcagctaaactctcaagttcagctacagcctccacatgtccagcagcaagcttacccacaatctcaggtctatcctcaacagacacatcatatgcactcccagaatactacatatgcacagcagcaaacccaaggtgctttgatgcaacctgtacatgtgtcccaccaacaaacacatgtttctcatcatcctgcaccgatgcgtcctccatcgtcaggccatcagccagctttgcagcatcctcaggcccagggaattcaacatacatcacaacatgaaaaacatattgggtttcatgctcagtggccaacaatgtattccaacattccttcccaagcaccaccacagggattgtctgtgcactcatctgtttcctcacaatcagttcaatcataccagcaaggaatgtcttcatcacaacagatgcattcccaacctggtcagccatatacacaacagcatgttactggcaatactggacaacatgttcaaacttctgctggcagacctatggcccatcttgcaccaacacagcaatttcagcagcaacatccagcaatgcttagaactgagtcacctgctgctgggcactctattgggcagggtcctttagatcttgaaaaacatacttcaaaatcagggaagttggataatgcaactattgctgctgtcggtgaaaataaaaatagtggtcctgagtcagttgtcatgagacctacaaagtcacaattgggtgatgaaaacatgaacagcgaacacaatggttttgttggtgttagaaaagatgcagtgcaaactggcattgtatcacacaatttagatggttcaattaggagggatgggaatactgaccaggcaggcaattcacatggcccacttgtgcagggaggcaaagatcacaaggcttcagatgcatctactgatcatgagaaaggacgactgtttcaacaggcatcactgcaaaatgcaggggcaccgggctcttatgtgcccccaggtgtggtaccacatccatctggaccagataaaatgcttcctcagcatatgacgaatcatggtcatatgcatggtttctctgaaaatatccgtcctccgctgcaacaaccatatggtgtgtttcattctggaacgataacaaggccatttggagagaaccagattcagatgccaatgccacagcctgggggtatcagacctggtgatggtatgattcgtccttgtttggttggcccattacctggacatcatggtgcagtgttgccttcttttgatcttgaacgtttgggtcagccacgtcctcttggaatgttgaacagcaatgactttggtggtgaggggttcaacgcttcagggggtgcagcgtatcctgaaagacatgataataccgaagacagtcggaaacattttccagcaccagcccctctagatgatcagggcttgcgaagggaccctagacattttgagagagctttaggtagacctgatggtttccttgattcagtacctggaaggcctccatttgcaaaccacagaagtgcaggtttgcatgaggattttccaagaaagcaaaatgcaactgccagtcaccctgacttcctgtcacatggagcagaatttgatcatcacagggctattggaatgcctaatttcagaaatccaggcccatttgctcaagggacaagtggcggtcctggtggccctcctaaacaccagcttggctctggtaaccttcctgggaatttacattcttttgagggtgacatgcatccaggtgaccctcatcttgtcgctgaatatgctcagcatggatttcctaaaactgcagcacactttggtttgggtggattcttgagaaacgggaattctggttggtgccgaatatgcatgtttaactgtgggagtgcagagaatctggatttgcatgtacaaacaagggaacatcagcaatgtgcaatggacattgtcctgaaaatgaagcaagatgttgcaaaaaggcaaaaactgaattatggagggcccaagtcattcaacaacaaaaaggtttctgggaagggccattttcgtgggaacaggcgctagtgttaactgattaaaattgatgtggttttgaaggttgctactggtgcttatggatgtgtcaatggcaatcgagaattgagatcttttcagacattctgttcatgcggttcagcgtatttgaagggaaacttgtaatggtcccaaacttttgttccatgttgatctgcagagttcacatggctatgtttacttcacgtatttttgccgaagttgttctgggattgcttaacatgctaatatccttcttctaaactgcaaagtgtaggataatttccagcagagggctcctgtcatacttgcatgtttccctaacgatggtaaggatgacatgctttcataatgctgataaaccaatcaaaagtaaaaaggagaggcgcgtgaagcctaacctacgaaggctacgagtatgaagtcgattatccaatgaagcctcacttacgaaagctatgggtgcaaagttacacatcctgtgaagccttgacgagaagaagaattgctccaagcccttaagaagtcaaagaaccttcactaggtgcatgtatgtgctcgtgaaggccagtcgatcatgaggacccgttaataccatggaatttggatgaaccattgtattttaagccaaaaggtgtttggtagcctttaaaaactctgtatataatactgtggtattatcgatactatggttattttggggtatagaaaactttggtccagaccaaagtttctttgctgtgcgcaatatctgttgagtatgcaagccatggaactggtaaaaaaactgttaagcaaagaataggaag

SEQ ID NO: 37165 - DNA, 5465 bp, Zea Mays
cgatcccggttgggaatggcctaaacgaacgaacaaggccactcggccccatccggcatccccgacccccgagcgtcttctttcgtctgctcgctctgcgctcgcatctaccatggagactagggtctagggtttagtgcgccgctgcctacatcgccgccatcctcaacttcctacgggatcctgacgaggcgccgtatcatcctcaacgccgcgaacctccgctcccacgttatcctcacgcccaccagtagctctcggcctctacctcgttaaggcttgatatttgactgggacactgggcaaattttaacaagtttcagcaatggggtttgataatgaatgcatcttgagtattcaatcccttcctggtgaatatttctgccctgtttgccggacacttgtatatccgaatgaggccctacaaactcaatgcacacatctctactgcaaatcctgcttggcatatgtagtggcaaccacacaagcttgtccttatgatggataccttgtaacagaagctgattccaagcctcttgtggaatcaaataaaacccttgctgagactattggcaaagtcgcggtctattgcctgtataataagagtggatgccaatggcatggagagctatctgcctgtgtcacacatggtactgcttgtgcatatgggaactctcctgttgtttgcaatcgttgtgggacacaaattgtgcatcgtcaagtgcaagaacatgctcaagtctgccatggcttacaatctcaaacacaacaagctgatggtagtcaggtgcagctggcaacggcaacaactcagccagtcatccaagattcatcacttgcctcagctggatctgctgcagctgcagctacaaccctaacaaagccatcttcaactacagccacagctgtaacagattctgcagcagcaacaggaggggcagctggtgcaaccacagcagctgtgccttcttcagcttcatctatttctgcttcccaaactccaacagctgagcagtggtaccagcagcagcagcagctccaatactcgcaatactaccagcagcagcaccctggatccaacccttacatgcagcaacatcaacaatatgaccaataccagcaggcatatcagcaatacatgcaacctccaatgcaagtaccatcccaaaatgtggtgcaaggatctgcacaacctgcttcttatgttcagcctcaagttcagtcctcccaggtgatgatgcaagcccaaagtcagccccaggtccatccattgacgagtcagccacagcttcaacagcatccagttcaaccccgaccccaaagtcaccctcatatttcccatgttcaagcaccttcaggtcagtcgcagcttcatcaaccaattcagtcagcccaagttccacaggtccaaccaagtcaagttcctctccaaccatctggtctccaagtacaatctgcagcacatccatctgctcctactcaagttggtaatcagcaatttgcgactcaagcaatggcgtatcaggtccagccacatgtacaagctcaacctccgcagcagcaacatattgttgcacatcaacaacatccacatatgcaagctttacccctacagcaaaatattcaacctaagatgcagctaaactctcaagttcagctacagcctccacatgtccagcagcaagcttacccacaatctcaggtctatcctcaacagacacatcatatgcactcccagaatactacatatgcacagcagcaaacccaaggtgctttgatgcaacctgtacatgtgtcccaccaacaaacacatgtttctcatcatcctgcaccgatgcgtcctccatcgtcaggccatcagccagctttgcagcatcctcaggcccagggaattcaacatacatcacaacatgaaaaacatattgggtttcatgctcagtggccaacaatgtattccaacattccttcccaagcaccaccacagggattgtctgtgcactcatctgtttcctcacaatcagttcaatcataccagcaaggaatgtcttcatcacaacagatgcattcccaacctggtcagccatatacacaacagcatgttactggcaatactggacaacatgttcaaacttctgctggcagacctatggcccatcttgcaccaacacagcaatttcagcagcaacatccagcaatgcttagaactgagtcacctgctgctgggcactctattgggcagggtcctttagatcttgaaaaacatacttcaaaatcagggaagttggataatgcaactattgctgctgtcggtgaaaataaaaatagtggtcctgagtcagttgtcatgagacctacaaagtcacaattgggtgatgaaaacatgaacagcgaacacaatggttttgttggtgttagaaaagatgcagtgcaaactggcattgtatcacacaatttagatggttcaattaggagggatgggaatactgaccaggcaggcaattcacatggcccacttgtgcagggaggcaaagatcacaaggcttcagatgcatctactgatcatgagaaaggacgactgtttcaacaggcatcactgcaaaatgcaggggcaccgggctcttatgtgcccccaggtgtggtaccacatccatctggaccagataaaatgcttcctcagcatatgacgaatcatggtcatatgcatggtttctctgaaaatatccgtcctccgctgcaacaaccatatggtgtgtttcattctggaacgataacaaggccatttggagagaaccagattcagatgccaatgccacagcctgggggtatcagacctggtgatggtatgattcgtccttgtttggttggcccattacctggacatcatggtgcagtgttgccttcttttgatcttgaacgtttgggtcagccacgtcctcttggaatgttgaacagcaatgactttggtggtgaggggttcaacgcttcagggggtgcagcgtatcctgaaagacatgataataccgaagacagtcggaaacattttccagcaccagcccctctagatgatcagggcttgcgaagggaccctagacattttgagagagctttaggtagacctgatggtttccttgattcagtacctggaaggcctccatttgcaaaccacagaagtgcaggtttgcatgaggattttccaagaaagcaaaatgcaactgccagtcaccctgacttcctgtcacatggagcagaatttgatcatcacagggctattggaatgcctaatttcagaaatccaggcccatttgctcaagggacaagtggcggtcctggtggccctcctaaacaccagcttggctctggtgacatgcatccaggtgaccctcatcttgtcgctgaatatgctcagcatggatttcctaaaactgcagcacactttggtttgggtggattcttgagaaacgggaattctggttggtgccgaatatgcatgtttaactgtgggagtgcagagaatctggatttgcatgtacaaacaagggaacatcagcaatgtgcaatggacattgtcctgaaaatgaagcaagatgttgcaaaaaggcaaaaactgaattatggagggcccaagtcattcaacaacaaaaaggtttctgggaagggccattttcgtgggaacaggcgctagtgttaactgattaaaattgatgtggttttgaaggttgctactggtgcttatggatgtgtcaatggcaatcgagaattgagatcttttcagacattctgttcatgcggttcagcgtatttgaagggaaacttgtaatggtcccaaacttttgttccatgttgatctgcagagttcacatggctatgtttacttcacgtatttttgccgaagttgttctgggattgcttaacatgctaatatccttcttctgtacgtgctgatttataactcctgtttctttcaactaggctcatgctttttctaatggcgacctaataatagaccatgctggaacttttacaaagagacttgtaattgtgtcatcagacatccataacatggtaaattttgttggaatcttttggtagggggctaatggaaacatgttgaagttactttcagtgcctgaaaattgtgctagttttgcatagtttaaatccaaaaaaatctaagggtgcattggacaaatagttttttttatgtcacagcccaatttgcttaatcatttattttaataaaattattgaatactgactctgtgatatgtccccattcaaaacaagaagggcaaaagtgctgcattcctgaataaacacaagggctagagttgttgacatgtcattgcatgacaacaaagcaatccaaatcaacaaaaataatctcattgaagcggttgcctattttgtgccttgagggatgcattagtgataaagggagacttggaagcctgcaaggaaacacaaaagcatgaagaggtttgagttgggatatgtactttgagtgttagcatgagatgggagggaatcgatggtaaacctaatttagaaccaaaacatgagttgtgctcaaatatagaaggaaaagaaagatatactggttttcatatgaatactggtatgtgcatcatatacgcagtaacgcagagcttgttgataccgaactggagttgtattattcacttctagttagttattcgagatagtgatggttttattgtcataggtttgatgttcagaataggacatcataggattctacaggctacaagcactaaatattatgggtaaaatacttaggtttccaattcactgctgctggacagatgtgattgtttgcatgtgacattttgctgatggtggcctttctctagatgtctgttttaaatcatctgtctttgctgtttgtttgctaaacagaaactgcaaagtgtaggataatttccagcagagggctcctgtcatacttgcatgtttccctaacgatggtaaggatgacatgctttcataatgctgataaaccaatcaaaagtaaaaaggagaggcgcgtgaagcctaacctacgaaggctacgagtatgaagtcgattatccaatgaagcctcacttacgaaagctatgggtgcaaagttacacatcctgtgaagccttgacgagaagaagaattgctccaagcccttaagaagtcaaagaaccttcactaggtgcatgtatgtgctcgtgaaggccagtcgatcatgaggacccgttaataccatggaatttggatgaaccattgtattttaagccaaaaggtgtttggtagcctttaaaaactctgtatataatactgtggtattatcgatactatggttattttggggtatagaaaactttggtccagaccaaagtttctttgctgtgcgcaatatctgttgagtatgcaagccatggaactggtaaaaaaactgttaagcaaagaataggaag

SEQ ID NO: 37166 - DNA, 4484 bp, Zea Mays
cgatcccggttgggaatggcctaaacgaacgaacaaggccactcggccccatccggcatccccgacccccgagcgtcttctttcgtctgctcgctctgcgctcgcatctaccatggagactagggtctagggtttagtgcgccgctgcctacatcgccgccatcctcaacttcctacgggatcctgacgaggcgccgtatcatcctcaacgccgcgaacctccgctcccacgttatcctcacgcccaccagtagctctcggcctctacctcgttaaggcttgatatttgactgggacactgggcaaattttaacaagtttcagcaatggggtttgataatgaatgcatcttgagtattcaatcccttcctggtgaatatttctgccctgtttgccggacacttgtatatccgaatgaggccctacaaactcaatgcacacatctctactgcaaatcctgcttggcatatgtagtggcaaccacacaagcttgtccttatgatggataccttgtaacagaagctgattccaagcctcttgtggaatcaaataaaacccttgctgagactattggcaaagtcgcggtctattgcctgtataataagagtggatgccaatggcatggagagctatctgcctgtgtcacacatggtactgcttgtgcatatgggaactctcctgttgtttgcaatcgttgtgggacacaaattgtgcatcgtcaagtgcaagaacatgctcaagtctgccatggcttacaatctcaaacacaacaagctgatggtagtcaggtgcagctggcaacggcaacaactcagccagtcatccaagattcatcacttgcctcagctggatctgctgcagctgcagctacaaccctaacaaagccatcttcaactacagccacagctgtaacagattctgcagcagcaacaggaggggcagctggtgcaaccacagcagctgtgccttcttcagcttcatctatttctgcttcccaaactccaacagctgagcagtggtaccagcagcagcagcagctccaatactcgcaatactaccagcagcagcaccctggatccaacccttacatgcagcaacatcaacaatatgaccaataccagcaggcatatcagcaatacatgcaacctccaatgcaagtaccatcccaaaatgtggtgcaaggatctgcacaacctgcttcttatgttcagcctcaagttcagtcctcccaggtgatgatgcaagcccaaagtcagccccaggtccatccattgacgagtcagccacagcttcaacagcatccagttcaaccccgaccccaaagtcaccctcatatttcccatgttcaagcaccttcaggtcagtcgcagcttcatcaaccaattcagtcagcccaagttccacaggtccaaccaagtcaagttcctctccaaccatctggtctccaagtacaatctgcagcacatccatctgctcctactcaagttggtaatcagcaatttgcgactcaagcaatggcgtatcaggtccagccacatgtacaagctcaacctccgcagcagcaacatattgttgcacatcaacaacatccacatatgcaagctttacccctacagcaaaatattcaacctaagatgcagctaaactctcaagttcagctacagcctccacatgtccagcagcaagcttacccacaatctcaggtctatcctcaacagacacatcatatgcactcccagaatactacatatgcacagcagcaaacccaaggtgctttgatgcaacctgtacatgtgtcccaccaacaaacacatgtttctcatcatcctgcaccgatgcgtcctccatcgtcaggccatcagccagctttgcagcatcctcaggcccagggaattcaacatacatcacaacatgaaaaacatattgggtttcatgctcagtggccaacaatgtattccaacattccttcccaagcaccaccacagggattgtctgtgcactcatctgtttcctcacaatcagttcaatcataccagcaaggaatgtcttcatcacaacagatgcattcccaacctggtcagccatatacacaacagcatgttactggcaatactggacaacatgttcaaacttctgctggcagacctatggcccatcttgcaccaacacagcaatttcagcagcaacatccagcaatgcttagaactgagtcacctgctgctgggcactctattgggcagggtcctttagatcttgaaaaacatacttcaaaatcagggaagttggataatgcaactattgctgctgtcggtgaaaataaaaatagtggtcctgagtcagttgtcatgagacctacaaagtcacaattgggtgatgaaaacatgaacagcgaacacaatggttttgttggtgttagaaaagatgcagtgcaaactggcattgtatcacacaatttagatggttcaattaggagggatgggaatactgaccaggcaggcaattcacatggcccacttgtgcagggaggcaaagatcacaaggcttcagatgcatctactgatcatgagaaaggacgactgtttcaacaggcatcactgcaaaatgcaggggcaccgggctcttatgtgcccccaggtgtggtaccacatccatctggaccagataaaatgcttcctcagcatatgacgaatcatggtcatatgcatggtttctctgaaaatatccgtcctccgctgcaacaaccatatggtgtgtttcattctggaacgataacaaggccatttggagagaaccagattcagatgccaatgccacagcctgggggtatcagacctggtgatggtatgattcgtccttgtttggttggcccattacctggacatcatggtgcagtgttgccttcttttgatcttgaacgtttgggtcagccacgtcctcttggaatgttgaacagcaatgactttggtggtgaggggttcaacgcttcagggggtgcagcgtatcctgaaagacatgataataccgaagacagtcggaaacattttccagcaccagcccctctagatgatcagggcttgcgaagggaccctagacattttgagagagctttaggtagacctgatggtttccttgattcagtacctggaaggcctccatttgcaaaccacagaagtgcaggtttgcatgaggattttccaagaaagcaaaatgcaactgccagtcaccctgacttcctgtcacatggagcagaatttgatcatcacagggctattggaatgcctaatttcagaaatccaggcccatttgctcaagggacaagtggcggtcctggtggccctcctaaacaccagcttggctctggtaaccttcctgggaatttacattcttttgagggtgacatgcatccaggtgaccctcatcttgtcgctgaatatgctcagcatggatttcctaaaactgcagcacactttggtttgggtggattcttgagaaacgggaattctggttggtgccgaatatgcatgtttaactgtgggagtgcagagaatctggatttgcatgtacaaacaagggaacatcagcaatgtgcaatggacattgtcctgaaaatgaagcaagatgttgcaaaaaggcaaaaactgaattatggagggcccaagtcattcaacaacaaaaaggtttctgggaagggccattttcgtgggaacaggcgctagtgttaactgattaaaattgatgtggttttgaaggttgctactggtgcttatggatgtgtcaatggcaatcgagaattgagatcttttcagacattctgttcatgcggttcagcgtatttgaagggaaacttgtaatggtcccaaacttttgttccatgttgatctgcagagttcacatggctatgtttacttcacgtatttttgccgaagttgttctgggattgcttaacatgctaatatccttcttctaaactgcaaagtgtaggataatttccagcagagggctcctgtcatacttgcatgtttccctaacgatgataaaccaatcaaaagtaaaaaggagaggcgcgtgaagcctaacctacgaaggctacgagtatgaagtcgattatccaatgaagcctcacttacgaaagctatgggtgcaaagttacacatcctgtgaagccttgacgagaagaagaattgctccaagcccttaagaagtcaaagaaccttcactaggtgcatgtatgtgctcgtgaaggccagtcgatcatgaggacccgttaataccatggaatttggatgaaccattgtattttaagccaaaaggtgtttggtagcctttaaaaactctgtatataatactgtggtattatcgatactatggttattttggggtatagaaaactttggtccagaccaaagtttctttgctgtgcgcaatatctgttgagtatgcaagccatggaactggtaaaaaaactgttaagcaaagaataggaag

SEQ ID NO: 37167 - DNA, 4535 bp, Zea Mays
cgccggatcgggccacgatcccggttgggaatggcctaaacgaacgaacaaggccactcggccccatccggcatccccgacccccgagcgtcttctttcgtctgctcgctctgcgctcgcatctaccatggagactagggtctagggtttagtgcgccgctgcctacatcgccgccatcctcaacttcctacgggatcctgacgaggcgccgtatcatcctcaacgccgcgaacctccgctcccacgttatcctcacgcccaccagtagctctcggcctctacctcgttaaggcttgatatttgactgggacactgggcaaattttaacaagtttcagcaatggggtttgataatgaatgcatcttgagtattcaatcccttcctggtgaatatttctgccctgtttgccggacacttgtatatccgaatgaggccctacaaactcaatgcacacatctctactgcaaatcctgcttggcatatgtagtggcaaccacacaagcttgtccttatgatggataccttgtaacagaagctgattccaagcctcttgtggaatcaaataaaacccttgctgagactattggcaaagtcgcggtctattgcctgtataataagagtggatgccaatggcatggagagctatctgcctgtgtcacacatggtactgcttgtgcatatgggaactctcctgttgtttgcaatcgttgtgggacacaaattgtgcatcgtcaagtgcaagaacatgctcaagtctgccatggcttacaatctcaaacacaacaagctgatggtagtcaggtgcagctggcaacggcaacaactcagccagtcatccaagattcatcacttgcctcagctggatctgctgcagctgcagctacaaccctaacaaagccatcttcaactacagccacagctgtaacagattctgcagcagcaacaggaggggcagctggtgcaaccacagcagctgtgccttcttcagcttcatctatttctgcttcccaaactccaacagctgagcagtggtaccagcagcagcagcagctccaatactcgcaatactaccagcagcagcaccctggatccaacccttacatgcagcaacatcaacaatatgaccaataccagcaggcatatcagcaatacatgcaacctccaatgcaagtaccatcccaaaatgtggtgcaaggatctgcacaacctgcttcttatgttcagcctcaagttcagtcctcccaggtgatgatgcaagcccaaagtcagccccaggtccatccattgacgagtcagccacagcttcaacagcatccagttcaaccccgaccccaaagtcaccctcatatttcccatgttcaagcaccttcaggtcagtcgcagcttcatcaaccaattcagtcagcccaagttccacaggtccaaccaagtcaagttcctctccaaccatctggtctccaagtacaatctgcagcacatccatctgctcctactcaagttggtaatcagcaatttgcgactcaagcaatggcgtatcaggtccagccacatgtacaagctcaacctccgcagcagcaacatattgttgcacatcaacaacatccacatatgcaagctttacccctacagcaaaatattcaacctaagatgcagctaaactctcaagttcagctacagcctccacatgtccagcagcaagcttacccacaatctcaggtctatcctcaacagacacatcatatgcactcccagaatactacatatgcacagcagcaaacccaaggtgctttgatgcaacctgtacatgtgtcccaccaacaaacacatgtttctcatcatcctgcaccgatgcgtcctccatcgtcaggccatcagccagctttgcagcatcctcaggcccagggaattcaacatacatcacaacatgaaaaacatattgggtttcatgctcagtggccaacaatgtattccaacattccttcccaagcaccaccacagggattgtctgtgcactcatctgtttcctcacaatcagttcaatcataccagcaaggaatgtcttcatcacaacagatgcattcccaacctggtcagccatatacacaacagcatgttactggcaatactggacaacatgttcaaacttctgctggcagacctatggcccatcttgcaccaacacagcaatttcagcagcaacatccagcaatgcttagaactgagtcacctgctgctgggcactctattgggcagggtcctttagatcttgaaaaacatacttcaaaatcagggaagttggataatgcaactattgctgctgtcggtgaaaataaaaatagtggtcctgagtcagttgtcatgagacctacaaagtcacaattgggtgatgaaaacatgaacagcgaacacaatggttttgttggtgttagaaaagatgcagtgcaaactggcattgtatcacacaatttagatggttcaattaggagggatgggaatactgaccaggcaggcaattcacatggcccacttgtgcagggaggcaaagatcacaaggcttcagatgcatctactgatcatgagaaaggacgactgtttcaacaggcatcactgcaaaatgcaggggcaccgggctcttatgtgcccccaggtgtggtaccacatccatctggaccagataaaatgcttcctcagcatatgacgaatcatggtcatatgcatggtttctctgaaaatatccgtcctccgctgcaacaaccatatggtgtgtttcattctggaacgataacaaggccatttggagagaaccagattcagatgccaatgccacagcctgggggtatcagacctggtgatggtatgattcgtccttgtttggttggcccattacctggacatcatggtgcagtgttgccttcttttgatcttgaacgtttgggtcagccacgtcctcttggaatgttgaacagcaatgactttggtggtgaggggttcaacgcttcagggggtgcagcgtatcctgaaagacatgataataccgaagacagtcggaaacattttccagcaccagcccctctagatgatcagggcttgcgaagggaccctagacattttgagagagctttaggtagacctgatggtttccttgattcagtacctggaaggcctccatttgcaaaccacagaagtgcaggtttgcatgaggattttccaagaaagcaaaatgcaactgccagtcaccctgacttcctgtcacatggagcagaatttgatcatcacagggctattggaatgcctaatttcagaaatccaggcccatttgctcaagggacaagtggcggtcctggtggccctcctaaacaccagcttggctctggtaaccttcctgggaatttacattcttttgagggtctggacttccctccagctcctttcaaccttggtgacatgcatccaggtgaccctcatcttgtcgctgaatatgctcagcatggatttcctaaaactgcagcacactttggtttgggtggattcttgagaaacgggaattctggttggtgccgaatatgcatgtttaactgtgggagtgcagagaatctggatttgcatgtacaaacaagggaacatcagcaatgtgcaatggacattgtcctgaaaatgaagcaagatgttgcaaaaaggcaaaaactgaattatggagggcccaagtcattcaacaacaaaaaggtttctgggaagggccattttcgtgggaacaggcgctagtgttaactgattaaaattgatgtggttttgaaggttgctactggtgcttatggatgtgtcaatggcaatcgagaattgagatcttttcagacattctgttcatgcggttcagcgtatttgaagggaaacttgctcatgctttttctaatggcgacctaataatagaccatgctggaacttttacaaagagacttgtaattgtgtcatcagacatccataacatgaaactgcaaagtgtaggataatttccagcagagggctcctgtcatacttgcatgtttccctaacgatggtaaggatgacatgctttcataatgctgataaaccaatcaaaagtaaaaaggagaggcgcgtgaagcctaacctacgaaggctacgagtatgaagtcgattatccaatgaagcctcacttacgaaagctatgggtgcaaagttacacatcctgtgaagccttgacgagaagaagaattgctccaagcccttaagaagtcaaagaaccttcactaggtgcatgtatgtgctcgtgaaggccagtcgatcatgaggacccgttaataccatggaatttggatgaaccattgtattttaagccaaaaggtgtttggtagcctttaaaaactctgtatataatactgtggtattatcgatactatggttattttggggtatagaaaactttggtccagaccaaagtttctttgctgtgcgcaatatctgttgagtatgcaagccatggaactggtaaaaaaactgttaagcaaagaataggaag

SEQ ID NO: 37168 - DNA, 4474 bp, Zea Mays
cgccggatcgggccacgatcccggttgggaatggcctaaacgaacgaacaaggccactcggccccatccggcatccccgacccccgagcgtcttctttcgtctgctcgctctgcgctcgcatctaccatggagactagggtctagggtttagtgcgccgctgcctacatcgccgccatcctcaacttcctacgggatcctgacgaggcgccgtatcatcctcaacgccgcgaacctccgctcccacgttatcctcacgcccaccagtagctctcggcctctacctcgttaaggcttgatatttgactgggacactgggcaaattttaacaagtttcagcaatggggtttgataatgaatgcatcttgagtattcaatcccttcctggtgaatatttctgccctgtttgccggacacttgtatatccgaatgaggccctacaaactcaatgcacacatctctactgcaaatcctgcttggcatatgtagtggcaaccacacaagcttgtccttatgatggataccttgtaacagaagctgattccaagcctcttgtggaatcaaataaaacccttgctgagactattggcaaagtcgcggtctattgcctgtataataagagtggatgccaatggcatggagagctatctgcctgtgtcacacatggtactgcttgtgcatatgggaactctcctgttgtttgcaatcgttgtgggacacaaattgtgcatcgtcaagtgcaagaacatgctcaagtctgccatggcttacaatctcaaacacaacaagctgatggtagtcaggtgcagctggcaacggcaacaactcagccagtcatccaagattcatcacttgcctcagctggatctgctgcagctgcagctacaaccctaacaaagccatcttcaactacagccacagctgtaacagattctgcagcagcaacaggaggggcagctggtgcaaccacagcagctgtgccttcttcagcttcatctatttctgcttcccaaactccaacagctgagcagtggtaccagcagcagcagcagctccaatactcgcaatactaccagcagcagcaccctggatccaacccttacatgcagcaacatcaacaatatgaccaataccagcaggcatatcagcaatacatgcaacctccaatgcaagtaccatcccaaaatgtggtgcaaggatctgcacaacctgcttcttatgttcagcctcaagttcagtcctcccaggtgatgatgcaagcccaaagtcagccccaggtccatccattgacgagtcagccacagcttcaacagcatccagttcaaccccgaccccaaagtcaccctcatatttcccatgttcaagcaccttcaggtcagtcgcagcttcatcaaccaattcagtcagcccaagttccacaggtccaaccaagtcaagttcctctccaaccatctggtctccaagtacaatctgcagcacatccatctgctcctactcaagttggtaatcagcaatttgcgactcaagcaatggcgtatcaggtccagccacatgtacaagctcaacctccgcagcagcaacatattgttgcacatcaacaacatccacatatgcaagctttacccctacagcaaaatattcaacctaagatgcagctaaactctcaagttcagctacagcctccacatgtccagcagcaagcttacccacaatctcaggtctatcctcaacagacacatcatatgcactcccagaatactacatatgcacagcagcaaacccaaggtgctttgatgcaacctgtacatgtgtcccaccaacaaacacatgtttctcatcatcctgcaccgatgcgtcctccatcgtcaggccatcagccagctttgcagcatcctcaggcccagggaattcaacatacatcacaacatgaaaaacatattgggtttcatgctcagtggccaacaatgtattccaacattccttcccaagcaccaccacagggattgtctgtgcactcatctgtttcctcacaatcagttcaatcataccagcaaggaatgtcttcatcacaacagatgcattcccaacctggtcagccatatacacaacagcatgttactggcaatactggacaacatgttcaaacttctgctggcagacctatggcccatcttgcaccaacacagcaatttcagcagcaacatccagcaatgcttagaactgagtcacctgctgctgggcactctattgggcagggtcctttagatcttgaaaaacatacttcaaaatcagggaagttggataatgcaactattgctgctgtcggtgaaaataaaaatagtggtcctgagtcagttgtcatgagacctacaaagtcacaattgggtgatgaaaacatgaacagcgaacacaatggttttgttggtgttagaaaagatgcagtgcaaactggcattgtatcacacaatttagatggttcaattaggagggatgggaatactgaccaggcaggcaattcacatggcccacttgtgcagggaggcaaagatcacaaggcttcagatgcatctactgatcatgagaaaggacgactgtttcaacaggcatcactgcaaaatgcaggggcaccgggctcttatgtgcccccaggtgtggtaccacatccatctggaccagataaaatgcttcctcagcatatgacgaatcatggtcatatgcatggtttctctgaaaatatccgtcctccgctgcaacaaccatatggtgtgtttcattctggaacgataacaaggccatttggagagaaccagattcagatgccaatgccacagcctgggggtatcagacctggtgatggtatgattcgtccttgtttggttggcccattacctggacatcatggtgcagtgttgccttcttttgatcttgaacgtttgggtcagccacgtcctcttggaatgttgaacagcaatgactttggtggtgaggggttcaacgcttcagggggtgcagcgtatcctgaaagacatgataataccgaagacagtcggaaacattttccagcaccagcccctctagatgatcagggcttgcgaagggaccctagacattttgagagagctttaggtagacctgatggtttccttgattcagtacctggaaggcctccatttgcaaaccacagaagtgcaggtttgcatgaggattttccaagaaagcaaaatgcaactgccagtcaccctgacttcctgtcacatggagcagaatttgatcatcacagggctattggaatgcctaatttcagaaatccaggcccatttgctcaagggacaagtggcggtcctggtggccctcctaaacaccagcttggctctggtaaccttcctgggaatttacattcttttgagggtgacatgcatccaggtgaccctcatcttgtcgctgaatatgctcagcatggatttcctaaaactgcagcacactttggtttgggtggattcttgagaaacgggaattctggttggtgccgaatatgcatgtttaactgtgggagtgcagagaatctggatttgcatgtacaaacaagggaacatcagcaatgtgcaatggacattgtcctgaaaatgaagcaagatgttgcaaaaaggcaaaaactgaattatggagggcccaagtcattcaacaacaaaaaggtttctgggaagggccattttcgtgggaacaggcgctagtgttaactgattaaaattgatgtggttttgaaggttgctactggtgcttatggatgtgtcaatggcaatcgagaattgagatcttttcagacattctgttcatgcggttcagcgtatttgaagggaaacttgctcatgctttttctaatggcgacctaataatagaccatgctggaacttttacaaagagacttgtaattgtgtcatcagacatccataacatgaaactgcaaagtgtaggataatttccagcagagggctcctgtcatacttgcatgtttccctaacgatgataaaccaatcaaaagtaaaaaggagaggcgcgtgaagcctaacctacgaaggctacgagtatgaagtcgattatccaatgaagcctcacttacgaaagctatgggtgcaaagttacacatcctgtgaagccttgacgagaagaagaattgctccaagcccttaagaagtcaaagaaccttcactaggtgcatgtatgtgctcgtgaaggccagtcgatcatgaggacccgttaataccatggaatttggatgaaccattgtattttaagccaaaaggtgtttggtagcctttaaaaactctgtatataatactgtggtattatcgatactatggttattttggggtatagaaaactttggtccagaccaaagtttctttgctgtgcgcaatatctgttgagtatgcaagccatggaactggtaaaaaaactgttaagcaaagaataggaag

SEQ ID NO: 37169 - DNA, 4430 bp, Zea Mays
gtcaggtgcatccgcggggatcgccggatcgggccacgatcccggttgggaatggcctaaacgaacgaacaaggccactcggccccatccggcatccccgacccccgagcgtcttctttcgtctgctcgctctgcgctcgcatctaccatggagactagggtctagggtttagtgcgccgctgcctacatcgccgccatcctcaacttcctacgggatcctgacgaggcgccgtatcatcctcaacgccgcgaacctccgctcccacgttatcctcacgcccaccagtagctctcggcctctacctcgttaaggcttgatatttgactgggacactgggcaaattttaacaagtttcagcaatggggtttgataatgaatgcatcttgagtattcaatcccttcctggtgaatatttctgccctgtttgccggacacttgtatatccgaatgaggccctacaaactcaatgcacacatctctactgcaaatcctgcttggcatatgtagtggcaaccacacaagcttgtccttatgatggataccttgtaacagaagctgattccaagcctcttgtggaatcaaataaaacccttgctgagactattggcaaagtcgcggtctattgcctgtataataagagtggatgccaatggcatggagagctatctgcctgtgtcacacatggtactgcttgtgcatatgggaactctcctgttgtttgcaatcgttgtgggacacaaattgtgcatcgtcaagtgcaagaacatgctcaagtctgccatggcttacaatctcaaacacaacaagctgatggtagtcaggtgcagctggcaacggcaacaactcagccagtcatccaagattcatcacttgcctcagctggatctgctgcagctgcagctacaaccctaacaaagccatcttcaactacagccacagctgtaacagattctgcagcagcaacaggaggggcagctggtgcaaccacagcagctgtgccttcttcagcttcatctatttctgcttcccaaactccaacagctgagcagtggtaccagcagcagcagcagctccaatactcgcaatactaccagcagcagcaccctggatccaacccttacatgcagcaacatcaacaatatgaccaataccagcaggcatatcagcaatacatgcaacctccaatgcaagtaccatcccaaaatgtggtgcaaggatctgcacaacctgcttcttatgttcagcctcaagttcagtcctcccaggtgatgatgcaagcccaaagtcagccccaggtccatccattgacgagtcagccacagcttcaacagcatccagttcaaccccgaccccaaagtcaccctcatatttcccatgttcaagcaccttcaggtcagtcgcagcttcatcaaccaattcagtcagcccaagttccacaggtccaaccaagtcaagttcctctccaaccatctggtctccaagtacaatctgcagcacatccatctgctcctactcaagttggtaatcagcaatttgcgactcaagcaatggcgtatcaggtccagccacatgtacaagctcaacctccgcagcagcaacatattgttgcacatcaacaacatccacatatgcaagctttacccctacagcaaaatattcaacctaagatgcagctaaactctcaagttcagctacagcctccacatgtccagcagcaagcttacccacaatctcaggtctatcctcaacagacacatcatatgcactcccagaatactacatatgcacagcagcaaacccaaggtgctttgatgcaacctgtacatgtgtcccaccaacaaacacatgtttctcatcatcctgcaccgatgcgtcctccatcgtcaggccatcagccagctttgcagcatcctcaggcccagggaattcaacatacatcacaacatgaaaaacatattgggtttcatgctcagtggccaacaatgtattccaacattccttcccaagcaccaccacagggattgtctgtgcactcatctgtttcctcacaatcagttcaatcataccagcaaggaatgtcttcatcacaacagatgcattcccaacctggtcagccatatacacaacagcatgttactggcaatactggacaacatgttcaaacttctgctggcagacctatggcccatcttgcaccaacacagcaatttcagcagcaacatccagcaatgcttagaactgagtcacctgctgctgggcactctattgggcagggtcctttagatcttgaaaaacatacttcaaaatcagggaagttggataatgcaactattgctgctgtcggtgaaaataaaaatagtggtcctgagtcagttgtcatgagacctacaaagtcacaattgggtgatgaaaacatgaacagcgaacacaatggttttgttggtgttagaaaagatgcagtgcaaactggcattgtatcacacaatttagatggttcaattaggagggatgggaatactgaccaggcaggcaattcacatggcccacttgtgcagggaggcaaagatcacaaggcttcagatgcatctactgatcatgagaaaggacgactgtttcaacaggcatcactgcaaaatgcaggggcaccgggctcttatgtgcccccaggtgtggtaccacatccatctggaccagataaaatgcttcctcagcatatgacgaatcatggtcatatgcatggtttctctgaaaatatccgtcctccgctgcaacaaccatatggtgtgtttcattctggaacgataacaaggccatttggagagaaccagattcagatgccaatgccacagcctgggggtatcagacctggtgatggtatgattcgtccttgtttggttggcccattacctggacatcatggtgcagtgttgccttcttttgatcttgaacgtttgggtcagccacgtcctcttggaatgttgaacagcaatgactttggtggtgaggggttcaacgcttcagggggtgcagcgtatcctgaaagacatgataataccgaagacagtcggaaacattttccagcaccagcccctctagatgatcagggcttgcgaagggaccctagacattttgagagagctttaggtagacctgatggtttccttgattcagtacctggaaggcctccatttgcaaaccacagaagtgcaggtttgcatgaggattttccaagaaagcaaaatgcaactgccagtcaccctgacttcctgtcacatggagcagaatttgatcatcacagggctattggaatgcctaatttcagaaatccaggcccatttgctcaagggacaagtggcggtcctggtggccctcctaaacaccagcttggctctggtaaccttcctgggaatttacattcttttgagggtgacatgcatccaggtgaccctcatcttgtcgctgaatatgctcagcatggatttcctaaaactgcagcacactttggtttgggtggattcttgagaaacgggaattctggttggtgccgaatatgcatgtttaactgtgggagtgcagagaatctggatttgcatgtacaaacaagggaacatcagcaatgtgcaatggacattgtcctgaaaatgaagcaagatgttgcaaaaaggcaaaaactgaattatggagggcccaagtcattcaacaacaaaaaggtttctgggaagggccattttcgtgggaacaggcgctagtgttaactgattaaaattgatgtggttttgaaggttgctactggtgcttatggatgtgtcaatggcaatcgagaattgagatcttttcagacattctgttcatgcggttcagcgtatttgaagggaaacttaaactgcaaagtgtaggataatttccagcagagggctcctgtcatacttgcatgtttccctaacgatggtaaggatgacatgctttcataatgctgataaaccaatcaaaagtaaaaaggagaggcgcgtgaagcctaacctacgaaggctacgagtatgaagtcgattatccaatgaagcctcacttacgaaagctatgggtgcaaagttacacatcctgtgaagccttgacgagaagaagaattgctccaagcccttaagaagtcaaagaaccttcactaggtgcatgtatgtgctcgtgaaggccagtcgatcatgaggacccgttaataccatggaatttggatgaaccattgtattttaagccaaaaggtgtttggtagcctttaaaaactctgtatataatactgtggtattatcgatactatggttattttggggtatagaaaactttggtccagaccaaagtttctttgctgtgcgcaatatctgttgagtatgcaagccatggaactggtaaaaaaactgttaagcaaagaataggaag

SEQ ID NO: 37170 - DNA, 4373 bp, Zea Mays
gtcaggtgcatccgcggggatcgccggatcgggccacgatcccggttgggaatggcctaaacgaacgaacaaggccactcggccccatccggcatccccgacccccgagcgtcttctttcgtctgctcgctctgcgctcgcatctaccatggagactagggtctagggtttagtgcgccgctgcctacatcgccgccatcctcaacttcctacgggatcctgacgaggcgccgtatcatcctcaacgccgcgaacctccgctcccacgttatcctcacgcccaccagtagctctcggcctctacctcgttaaggcttgatatttgactgggacactgggcaaattttaacaagtttcagcaatggggtttgataatgaatgcatcttgagtattcaatcccttcctggtgaatatttctgccctgtttgccggacacttgtatatccgaatgaggccctacaaactcaatgcacacatctctactgcaaatcctgcttggcatatgtagtggcaaccacacaagcttgtccttatgatggataccttgtaacagaagctgattccaagcctcttgtggaatcaaataaaacccttgctgagactattggcaaagtcgcggtctattgcctgtataataagagtggatgccaatggcatggagagctatctgcctgtgtcacacatggtactgcttgtgcatatgggaactctcctgttgtttgcaatcgttgtgggacacaaattgtgcatcgtcaagtgcaagaacatgctcaagtctgccatggcttacaatctcaaacacaacaagctgatggtagtcaggtgcagctggcaacggcaacaactcagccagtcatccaagattcatcacttgcctcagctggatctgctgcagctgcagctacaaccctaacaaagccatcttcaactacagccacagctgtaacagattctgcagcagcaacaggaggggcagctggtgcaaccacagcagctgtgccttcttcagcttcatctatttctgcttcccaaactccaacagctgagcagtggtaccagcagcagcagcagctccaatactcgcaatactaccagcagcagcaccctggatccaacccttacatgcagcaacatcaacaatatgaccaataccagcaggcatatcagcaatacatgcaacctccaatgcaagtaccatcccaaaatgtggtgcaaggatctgcacaacctgcttcttatgttcagcctcaagttcagtcctcccaggtgatgatgcaagcccaaagtcagccccaggtccatccattgacgagtcagccacagcttcaacagcatccagttcaaccccgaccccaaagtcaccctcatatttcccatgttcaagcaccttcaggtcagtcgcagcttcatcaaccaattcagtcagcccaagttccacaggtccaaccaagtcaagttcctctccaaccatctggtctccaagtacaatctgcagcacatccatctgctcctactcaagttggtaatcagcaatttgcgactcaagcaatggcgtatcaggtccagccacatgtacaagctcaacctccgcagcagcaacatattgttgcacatcaacaacatccacatatgcaagctttacccctacagcaaaatattcaacctaagatgcagctaaactctcaagttcagctacagcctccacatgtccagcagcaagcttacccacaatctcaggtctatcctcaacagacacatcatatgcactcccagaatactacatatgcacagcagcaaacccaaggtgctttgatgcaacctgtacatgtgtcccaccaacaaacacatgtttctcatcatcctgcaccgatgcgtcctccatcgtcaggccatcagccagctttgcagcatcctcaggcccagggaattcaacatacatcacaacatgaaaaacatattgggtttcatgctcagtggccaacaatgtattccaacattccttcccaagcaccaccacagggattgtctgtgcactcatctgtttcctcacaatcagttcaatcataccagcaaggaatgtcttcatcacaacagatgcattcccaacctggtcagccatatacacaacagcatgttactggcaatactggacaacatgttcaaacttctgctggcagacctatggcccatcttgcaccaacacagcaatttcagcagcaacatccagcaatgcttagaactgagtcacctgctgctgggcactctattgggcagggtcctttagatcttgaaaaacatacttcaaaatcagggaagttggataatgcaactattgctgctgtcggtgaaaataaaaatagtggtcctgagtcagttgtcatgagacctacaaagtcacaattgggtgatgaaaacatgaacagcgaacacaatggttttgttggtgttagaaaagatgcagtgcaaactggcattgtatcacacaatttagatggttcaattaggagggatgggaatactgaccaggcaggcaattcacatggcccacttgtgcagggaggcaaagatcacaaggcttcagatgcatctactgatcatgagaaaggacgactgtttcaacaggcatcactgcaaaatgcaggggcaccgggctcttatgtgcccccaggtgtggtaccacatccatctggaccagataaaatgcttcctcagcatatgacgaatcatggtcatatgcatggtttctctgaaaatatccgtcctccgctgcaacaaccatatggtgtgtttcattctggaacgataacaaggccatttggagagaaccagattcagatgccaatgccacagcctgggggtatcagacctggtgatggtatgattcgtccttgtttggttggcccattacctggacatcatggtgcagtgttgccttcttttgatcttgaacgtttgggtcagccacgtcctcttggaatgttgaacagcaatgactttggtggtgaggggttcaacgcttcagggggtgcagcgcctccatttgcaaaccacagaagtgcaggtttgcatgaggattttccaagaaagcaaaatgcaactgccagtcaccctgacttcctgtcacatggagcagaatttgatcatcacagggctattggaatgcctaatttcagaaatccaggcccatttgctcaagggacaagtggcggtcctggtggccctcctaaacaccagcttggctctggtaaccttcctgggaatttacattcttttgagggtgacatgcatccaggtgaccctcatcttgtcgctgaatatgctcagcatggatttcctaaaactgcagcacactttggtttgggtggattcttgagaaacgggaattctggttggtgccgaatatgcatgtttaactgtgggagtgcagagaatctggatttgcatgtacaaacaagggaacatcagcaatgtgcaatggacattgtcctgaaaatgaagcaagatgttgcaaaaaggcaaaaactgaattatggagggcccaagtcattcaacaacaaaaaggtttctgggaagggccattttcgtgggaacaggcgctagtgttaactgattaaaattgatgtggttttgaaggttgctactggtgcttatggatgtgtcaatggcaatcgagaattgagatcttttcagacattctgttcatgcggttcagcgtatttgaagggaaacttgctcatgctttttctaatggcgacctaataatagaccatgctggaacttttacaaagagacttgtaattgtgtcatcagacatccataacatgaaactgcaaagtgtaggataatttccagcagagggctcctgtcatacttgcatgtttccctaacgatggtaaggatgacatgctttcataatgctgataaaccaatcaaaagtaaaaaggagaggcgcgtgaagcctaacctacgaaggctacgagtatgaagtcgattatccaatgaagcctcacttacgaaagctatgggtgcaaagttacacatcctgtgaagccttgacgagaagaagaattgctccaagcccttaagaagtcaaagaaccttcactaggtgcatgtatgtgctcgtgaaggccagtcgatcatgaggacccgttaataccatggaatttggatgaaccattgtattttaagccaaaaggtgtttggtagcctttaaaaactctgtatataatactgtggtattatcgatactatggttattttggggtatagaaaactttggtccagaccaaagtttctttgctgtgcgcaatatctgttgagtatgcaagccatggaactggtaaaaaaactgttaagcaaagaataggaag

SEQ ID NO: 37171 - DNA, 4198 bp, Zea Mays
cgatcccggttgggaatggcctaaacgaacgaacaaggccactcggccccatccggcatccccgacccccgagcgtcttctttcgtctgctcgctctgcgctcgcatctaccatggagactagggtctagggtttagtgcgccgctgcctacatcgccgccatcctcaacttcctacgggatcctgacgaggcgccgtatcatcctcaacgccgcgaacctccgctcccacgttatcctcacgcccaccagtagctctcggcctctacctcgttaaggcttgatatttgactgggacactgggcaaattttaacaagtttcagcaatggggtttgataatgaatgcatcttgagtattcaatcccttcctggtgaatatttctgccctgtttgccggacacttgtatatccgaatgaggccctacaaactcaatgcacacatctctactgcaaatcctgcttggcatatgtagtggcaaccacacaagcttgtccttatgatggataccttgtaacagaagctgattccaagcctcttgtggaatcaaataaaacccttgctgagactattggcaaagtcgcggtctattgcctgtataataagagtggatgccaatggcatggagagctatctgcctgtgtcacacatggtactgcttgtgcatatgggaactctcctgttgtttgcaatcgttgtgggacacaaattgtgcatcgtcaagtgcaagaacatgctcaagtctgccatggcttacaatctcaaacacaacaagctgatggtagtcaggtgcagctggcaacggcaacaactcagccagtcatccaagattcatcacttgcctcagctggatctgctgcagctgcagctacaaccctaacaaagccatcttcaactacagccacagctgtaacagattctgcagcagcaacaggaggggcagctggtgcaaccacagcagctgtgccttcttcagcttcatctatttctgcttcccaaactccaacagctgagcagtggtaccagcagcagcagcagctccaatactcgcaatactaccagcagcagcaccctggatccaacccttacatgcagcaacatcaacaatatgaccaataccagcaggcatatcagcaatacatgcaacctccaatgcaagtaccatcccaaaatgtggtgcaaggatctgcacaacctgcttcttatgttcagcctcaagttcagtcctcccaggtgatgatgcaagcccaaagtcagccccaggtccatccattgacgagtcagccacagcttcaacagcatccagttcaaccccgaccccaaagtcaccctcatatttcccatgttcaagcaccttcaggtcagtcgcagcttcatcaaccaattcagtcagcccaagttccacaggtccaaccaagtcaagttcctctccaaccatctggtctccaagtacaatctgcagcacatccatctgctcctactcaagttggtaatcagcaatttgcgactcaagcaatggcgtatcaggtccagccacatgtacaagctcaacctccgcagcagcaacatattgttgcacatcaacaacatccacatatgcaagctttacccctacagcaaaatattcaacctaagatgcagctaaactctcaagttcagctacagcctccacatgtccagcagcaagcttacccacaatctcaggtctatcctcaacagacacatcatatgcactcccagaatactacatatgcacagcagcaaacccaaggtgctttgatgcaacctgtacatgtgtcccaccaacaaacacatgtttctcatcatcctgcaccgatgcgtcctccatcgtcaggccatcagccagctttgcagcatcctcaggcccagggaattcaacatacatcacaacatgaaaaacatattgggtttcatgctcagtggccaacaatgtattccaacattccttcccaagcaccaccacagggattgtctgtgcactcatctgtttcctcacaatcagttcaatcataccagcaaggaatgtcttcatcacaacagatgcattcccaacctggtcagccatatacacaacagcatgttactggcaatactggacaacatgttcaaacttctgctggcagacctatggcccatcttgcaccaacacagcaatttcagcagcaacatccagcaatgcttagaactgagtcacctgctgctgggcactctattgggcagggtcctttagatcttgaaaaacatacttcaaaatcagggaagttggataatgcaactattgctgctgtcggtgaaaataaaaatagtggtcctgagtcagttgtcatgagacctacaaagtcacaattgggtgatgaaaacatgaacagcgaacacaatggttttgttggtgttagaaaagatgcagtgcaaactggcattgtatcacacaatttagatggttcaattaggagggatgggaatactgaccaggcaggcaattcacatggcccacttgtgcagggaggcaaagatcacaaggcttcagatgcatctactgatcatgagaaaggacgactgtttcaacaggcatcactgcaaaatgcaggggcaccgggctcttatgtgcccccaggtgtggtaccacatccatctggaccagataaaatgcttcctcagcatatgacgaatcatggtcatatgcatggtttctctgaaaatatccgtcctccgctgcaacaaccatatggtgtgtttcattctggaacgataacaaggccatttggagagaaccagattcagatgccaatgccacagcctgggggtatcagacctggtgatggtatgattcgtccttgtttggttggcccattacctggacatcatggtgcagtgttgccttcttttgatcttgaacgtttgggtcagccacgtcctcttggaatgttgaacagcaatgactttggtggtgaggggttcaacgcttcagggggtgcagcgtatcctgaaagacatgataataccgaagacagtcggaaacattttccagcaccagcccctctagatgatcagggcttgcgaagggaccctagacattttgagagagctttaggtagacctgatggtttccttgattcagtacctggaaggcctccatttgcaaaccacagaagtgcaggtttgcatgaggattttccaagaaagcaaaatgcaactgccagtcaccctgacttcctgtcacatggagcagaatttgatcatcacagggctattggaatgcctaatttcagaaatccaggcccatttgctcaagggacaagtggcggtcctggtggccctcctaaacaccagcttggctctggtgacatgcatccaggtgaccctcatcttgtcgctgaatatgctcagcatggatttcctaaaactgcagcacactttggtttgggtggattcttgagaaacgggaattctggttggtgccgaatatgcatgtttaactgtgggagtgcagagaatctggatttgcatgtacaaacaagggaacatcagcaatgtgcaatggacattgtcctgaaaatgaagcaagatgttgcaaaaaggcaaaaactgaattatggagggcccaagtcattcaacaacaaaaaggtttctgggaagggccattttcgtgggaacaggcgctagtgttaactgattaaaattgatgtggttttgaaggttgctactggtgcttatggatgtgtcaatggcaatcgagaattgagatcttttcagacattctgttcatgcggttcagcgtatttgaagggaaacttaaactgcaaagtgtaggataatttccagcagagggctcctgtcatacttgcatgtttccctaacgatggtaaggatgacatgctttcataatgctgatggtggatgtgcatgggtgctgactactgtttgaacgaactggccacgccttggctctcattttctgccagcatcggatgtttttgactgaccccagggcaccttatatctattgttgtgagggttaaattgtaaaatttctggcccgtggttcattccttaccaactaatgcactcaggtgtaaaagaaaattcctgtaatgtatacacaaacatttatatacaattttgcactgtaaatatactaatattagtttcaatggagtgcacccacaaattaatgtacct

SEQ ID NO: 37172 - DNA, 4291 bp, Zea Mays
cgatcccggttgggaatggcctaaacgaacgaacaaggccactcggccccatccggcatccccgacccccgagcgtcttctttcgtctgctcgctctgcgctcgcatctaccatggagactagggtctagggtttagtgcgccgctgcctacatcgccgccatcctcaacttcctacgggatcctgacgaggcgccgtatcatcctcaacgccgcgaacctccgctcccacgttatcctcacgcccaccagtagctctcggcctctacctcgttaaggcttgatatttgactgggacactgggcaaattttaacaagtttcagcaatggggtttgataatgaatgcatcttgagtattcaatcccttcctggtgaatatttctgccctgtttgccggacacttgtatatccgaatgaggccctacaaactcaatgcacacatctctactgcaaatcctgcttggcatatgtagtggcaaccacacaagcttgtccttatgatggataccttgtaacagaagctgattccaagcctcttgtggaatcaaataaaacccttgctgagactattggcaaagtcgcggtctattgcctgtataataagagtggatgccaatggcatggagagctatctgcctgtgtcacacatggtactgcttgtgcatatgggaactctcctgttgtttgcaatcgttgtgggacacaaattgtgcatcgtcaagtgcaagaacatgctcaagtctgccatggcttacaatctcaaacacaacaagctgatggtagtcaggtgcagctggcaacggcaacaactcagccagtcatccaagattcatcacttgcctcagctggatctgctgcagctgcagctacaaccctaacaaagccatcttcaactacagccacagctgtaacagattctgcagcagcaacaggaggggcagctggtgcaaccacagcagctgtgccttcttcagcttcatctatttctgcttcccaaactccaacagctgagcagtggtaccagcagcagcagcagctccaatactcgcaatactaccagcagcagcaccctggatccaacccttacatgcagcaacatcaacaatatgaccaataccagcaggcatatcagcaatacatgcaacctccaatgcaagtaccatcccaaaatgtggtgcaaggatctgcacaacctgcttcttatgttcagcctcaagttcagtcctcccaggtgatgatgcaagcccaaagtcagccccaggtccatccattgacgagtcagccacagcttcaacagcatccagttcaaccccgaccccaaagtcaccctcatatttcccatgttcaagcaccttcaggtcagtcgcagcttcatcaaccaattcagtcagcccaagttccacaggtccaaccaagtcaagttcctctccaaccatctggtctccaagtacaatctgcagcacatccatctgctcctactcaagttggtaatcagcaatttgcgactcaagcaatggcgtatcaggtccagccacatgtacaagctcaacctccgcagcagcaacatattgttgcacatcaacaacatccacatatgcaagctttacccctacagcaaaatattcaacctaagatgcagctaaactctcaagttcagctacagcctccacatgtccagcagcaagcttacccacaatctcaggtctatcctcaacagacacatcatatgcactcccagaatactacatatgcacagcagcaaacccaaggtgctttgatgcaacctgtacatgtgtcccaccaacaaacacatgtttctcatcatcctgcaccgatgcgtcctccatcgtcaggccatcagccagctttgcagcatcctcaggcccagggaattcaacatacatcacaacatgaaaaacatattgggtttcatgctcagtggccaacaatgtattccaacattccttcccaagcaccaccacagggattgtctgtgcactcatctgtttcctcacaatcagttcaatcataccagcaaggaatgtcttcatcacaacagatgcattcccaacctggtcagccatatacacaacagcatgttactggcaatactggacaacatgttcaaacttctgctggcagacctatggcccatcttgcaccaacacagcaatttcagcagcaacatccagcaatgcttagaactgagtcacctgctgctgggcactctattgggcagggtcctttagatcttgaaaaacatacttcaaaatcagggaagttggataatgcaactattgctgctgtcggtgaaaataaaaatagtggtcctgagtcagttgtcatgagacctacaaagtcacaattgggtgatgaaaacatgaacagcgaacacaatggttttgttggtgttagaaaagatgcagtgcaaactggcattgtatcacacaatttagatggttcaattaggagggatgggaatactgaccaggcaggcaattcacatggcccacttgtgcagggaggcaaagatcacaaggcttcagatgcatctactgatcatgagaaaggacgactgtttcaacaggcatcactgcaaaatgcaggggcaccgggctcttatgtgcccccaggtgtggtaccacatccatctggaccagataaaatgcttcctcagcatatgacgaatcatggtcatatgcatggtttctctgaaaatatccgtcctccgctgcaacaaccatatggtgtgtttcattctggaacgataacaaggccatttggagagaaccagattcagatgccaatgccacagcctgggggtatcagacctggtgatggtatgattcgtccttgtttggttggcccattacctggacatcatggtgcagtgttgccttcttttgatcttgaacgtttgggtcagccacgtcctcttggaatgttgaacagcaatgactttggtggtgaggggttcaacgcttcagggggtgcagcgtatcctgaaagacatgataataccgaagacagtcggaaacattttccagcaccagcccctctagatgatcagggcttgcgaagggaccctagacattttgagagagctttaggtagacctgatggtttccttgattcagtacctggaaggcctccatttgcaaaccacagaagtgcaggtttgcatgaggattttccaagaaagcaaaatgcaactgccagtcaccctgacttcctgtcacatggagcagaatttgatcatcacagggctattggaatgcctaatttcagaaatccaggcccatttgctcaagggacaagtggcggtcctggtggccctcctaaacaccagcttggctctggtgacatgcatccaggtgaccctcatcttgtcgctgaatatgctcagcatggatttcctaaaactgcagcacactttggtttgggtggattcttgagaaacgggaattctggttggtgccgaatatgcatgtttaactgtgggagtgcagagaatctggatttgcatgtacaaacaagggaacatcagcaatgtgcaatggacattgtcctgaaaatgaagcaagatgttgcaaaaaggcaaaaactgaattatggagggcccaagtcattcaacaacaaaaaggtttctgggaagggccattttcgtgggaacaggcgctagtgttaactgattaaaattgatgtggttttgaaggttgctactggtgcttatggatgtgtcaatggcaatcgagaattgagatcttttcagacattctgttcatgcggttcagcgtatttgaagggaaacttgctcatgctttttctaatggcgacctaataatagaccatgctggaacttttacaaagagacttgtaattgtgtcatcagacatccataacatgaaactgcaaagtgtaggataatttccagcagagggctcctgtcatacttgcatgtttccctaacgatggtaaggatgacatgctttcataatgctgatggtggatgtgcatgggtgctgactactgtttgaacgaactggccacgccttggctctcattttctgccagcatcggatgtttttgactgaccccagggcaccttatatctattgttgtgagggttaaattgtaaaatttctggcccgtggttcattccttaccaactaatgcactcaggtgtaaaagaaaattcctgtaatgtatacacaaacatttatatacaattttgcactgtaaatatactaatattagtttcaatggagtgcacccacaaattaatgtacct

SEQ ID NO: 37173 - DNA, 4354 bp, Zea Mays
cgatcccggttgggaatggcctaaacgaacgaacaaggccactcggccccatccggcatccccgacccccgagcgtcttctttcgtctgctcgctctgcgctcgcatctaccatggagactagggtctagggtttagtgcgccgctgcctacatcgccgccatcctcaacttcctacgggatcctgacgaggcgccgtatcatcctcaacgccgcgaacctccgctcccacgttatcctcacgcccaccagtagctctcggcctctacctcgttaaggcttgatatttgactgggacactgggcaaattttaacaagtttcagcaatggggtttgataatgaatgcatcttgagtattcaatcccttcctggtgaatatttctgccctgtttgccggacacttgtatatccgaatgaggccctacaaactcaatgcacacatctctactgcaaatcctgcttggcatatgtagtggcaaccacacaagcttgtccttatgatggataccttgtaacagaagctgattccaagcctcttgtggaatcaaataaaacccttgctgagactattggcaaagtcgcggtctattgcctgtataataagagtggatgccaatggcatggagagctatctgcctgtgtcacacatggtactgcttgtgcatatgggaactctcctgttgtttgcaatcgttgtgggacacaaattgtgcatcgtcaagtgcaagaacatgctcaagtctgccatggcttacaatctcaaacacaacaagctgatggtagtcaggtgcagctggcaacggcaacaactcagccagtcatccaagattcatcacttgcctcagctggatctgctgcagctgcagctacaaccctaacaaagccatcttcaactacagccacagctgtaacagattctgcagcagcaacaggaggggcagctggtgcaaccacagcagctgtgccttcttcagcttcatctatttctgcttcccaaactccaacagctgagcagtggtaccagcagcagcagcagctccaatactcgcaatactaccagcagcagcaccctggatccaacccttacatgcagcaacatcaacaatatgaccaataccagcaggcatatcagcaatacatgcaacctccaatgcaagtaccatcccaaaatgtggtgcaaggatctgcacaacctgcttcttatgttcagcctcaagttcagtcctcccaggtgatgatgcaagcccaaagtcagccccaggtccatccattgacgagtcagccacagcttcaacagcatccagttcaaccccgaccccaaagtcaccctcatatttcccatgttcaagcaccttcaggtcagtcgcagcttcatcaaccaattcagtcagcccaagttccacaggtccaaccaagtcaagttcctctccaaccatctggtctccaagtacaatctgcagcacatccatctgctcctactcaagttggtaatcagcaatttgcgactcaagcaatggcgtatcaggtccagccacatgtacaagctcaacctccgcagcagcaacatattgttgcacatcaacaacatccacatatgcaagctttacccctacagcaaaatattcaacctaagatgcagctaaactctcaagttcagctacagcctccacatgtccagcagcaagcttacccacaatctcaggtctatcctcaacagacacatcatatgcactcccagaatactacatatgcacagcagcaaacccaaggtgctttgatgcaacctgtacatgtgtcccaccaacaaacacatgtttctcatcatcctgcaccgatgcgtcctccatcgtcaggccatcagccagctttgcagcatcctcaggcccagggaattcaacatacatcacaacatgaaaaacatattgggtttcatgctcagtggccaacaatgtattccaacattccttcccaagcaccaccacagggattgtctgtgcactcatctgtttcctcacaatcagttcaatcataccagcaaggaatgtcttcatcacaacagatgcattcccaacctggtcagccatatacacaacagcatgttactggcaatactggacaacatgttcaaacttctgctggcagacctatggcccatcttgcaccaacacagcaatttcagcagcaacatccagcaatgcttagaactgagtcacctgctgctgggcactctattgggcagggtcctttagatcttgaaaaacatacttcaaaatcagggaagttggataatgcaactattgctgctgtcggtgaaaataaaaatagtggtcctgagtcagttgtcatgagacctacaaagtcacaattgggtgatgaaaacatgaacagcgaacacaatggttttgttggtgttagaaaagatgcagtgcaaactggcattgtatcacacaatttagatggttcaattaggagggatgggaatactgaccaggcaggcaattcacatggcccacttgtgcagggaggcaaagatcacaaggcttcagatgcatctactgatcatgagaaaggacgactgtttcaacaggcatcactgcaaaatgcaggggcaccgggctcttatgtgcccccaggtgtggtaccacatccatctggaccagataaaatgcttcctcagcatatgacgaatcatggtcatatgcatggtttctctgaaaatatccgtcctccgctgcaacaaccatatggtgtgtttcattctggaacgataacaaggccatttggagagaaccagattcagatgccaatgccacagcctgggggtatcagacctggtgatggtatgattcgtccttgtttggttggcccattacctggacatcatggtgcagtgttgccttcttttgatcttgaacgtttgggtcagccacgtcctcttggaatgttgaacagcaatgactttggtggtgaggggttcaacgcttcagggggtgcagcgtatcctgaaagacatgataataccgaagacagtcggaaacattttccagcaccagcccctctagatgatcagggcttgcgaagggaccctagacattttgagagagctttaggtagacctgatggtttccttgattcagtacctggaaggcctccatttgcaaaccacagaagtgcaggtttgcatgaggattttccaagaaagcaaaatgcaactgccagtcaccctgacttcctgtcacatggagcagaatttgatcatcacagggctattggaatgcctaatttcagaaatccaggcccatttgctcaagggacaagtggcggtcctggtggccctcctaaacaccagcttggctctggtaaccttcctgggaatttacattcttttgagggtctggacttccctccagctcctttcaaccttggtgacatgcatccaggtgaccctcatcttgtcgctgaatatgctcagcatggatttcctaaaactgcagcacactttggtttgggtggattcttgagaaacgggaattctggttggtgccgaatatgcatgtttaactgtgggagtgcagagaatctggatttgcatgtacaaacaagggaacatcagcaatgtgcaatggacattgtcctgaaaatgaagcaagatgttgcaaaaaggcaaaaactgaattatggagggcccaagtcattcaacaacaaaaaggtttctgggaagggccattttcgtgggaacaggcgctagtgttaactgattaaaattgatgtggttttgaaggttgctactggtgcttatggatgtgtcaatggcaatcgagaattgagatcttttcagacattctgttcatgcggttcagcgtatttgaagggaaacttgtaatggtcccaaacttttgttccatgttgatctgcagagttcacatggctatgtttacttcacgtatttttgccgaagttgttctgggattgcttaacatgctaatatccttcttctaaactgcaaagtgtaggataatttccagcagagggctcctgtcatacttgcatgtttccctaacgatgatggtggatgtgcatgggtgctgactactgtttgaacgaactggccacgccttggctctcattttctgccagcatcggatgtttttgactgaccccagggcaccttatatctattgttgtgagggttaaattgtaaaatttctggcccgtggttcattccttaccaactaatgcactcaggtgtaaaagaaaattcctgtaatgtatacacaaacatttatatacaattttgcactgtaaatatactaatattagtttcaatggagtgcacccacaaattaatgtacct

SEQ ID NO: 37174 - DNA, 4236 bp, Zea Mays
ggccacgatcccggttgggaatggcctaaacgaacgaacaaggccactcggccccatccggcatccccgacccccgagcgtcttctttcgtctgctcgctctgcgctcgcatctaccatggagactagggtctagggtttagtgcgccgctgcctacatcgccgccatcctcaacttcctacgggatcctgacgaggcgccgtatcatcctcaacgccgcgaacctccgctcccacgttatcctcacgcccaccagtagctctcggcctctacctcgttaaggcttgatatttgactgggacactgggcaaattttaacaagtttcagcaatggggtttgataatgaatgcatcttgagtattcaatcccttcctggtgaatatttctgccctgtttgccggacacttgtatatccgaatgaggccctacaaactcaatgcacacatctctactgcaaatcctgcttggcatatgtagtggcaaccacacaagcttgtccttatgatggataccttgtaacagaagctgattccaagcctcttgtggaatcaaataaaacccttgctgagactattggcaaagtcgcggtctattgcctgtataataagagtggatgccaatggcatggagagctatctgcctgtgtcacacatggtactgcttgtgcatatgggaactctcctgttgtttgcaatcgttgtgggacacaaattgtgcatcgtcaagtgcaagaacatgctcaagtctgccatggcttacaatctcaaacacaacaagctgatggtagtcaggtgcagctggcaacggcaacaactcagccagtcatccaagattcatcacttgcctcagctggatctgctgcagctgcagctacaaccctaacaaagccatcttcaactacagccacagctgtaacagattctgcagcagcaacaggaggggcagctggtgcaaccacagcagctgtgccttcttcagcttcatctatttctgcttcccaaactccaacagctgagcagtggtaccagcagcagcagcagctccaatactcgcaatactaccagcagcagcaccctggatccaacccttacatgcagcaacatcaacaatatgaccaataccagcaggcatatcagcaatacatgcaacctccaatgcaagtaccatcccaaaatgtggtgcaaggatctgcacaacctgcttcttatgttcagcctcaagttcagtcctcccaggtgatgatgcaagcccaaagtcagccccaggtccatccattgacgagtcagccacagcttcaacagcatccagttcaaccccgaccccaaagtcaccctcatatttcccatgttcaagcaccttcaggtcagtcgcagcttcatcaaccaattcagtcagcccaagttccacaggtccaaccaagtcaagttcctctccaaccatctggtctccaagtacaatctgcagcacatccatctgctcctactcaagttggtaatcagcaatttgcgactcaagcaatggcgtatcaggtccagccacatgtacaagctcaacctccgcagcagcaacatattgttgcacatcaacaacatccacatatgcaagctttacccctacagcaaaatattcaacctaagatgcagctaaactctcaagttcagctacagcctccacatgtccagcagcaagcttacccacaatctcaggtctatcctcaacagacacatcatatgcactcccagaatactacatatgcacagcagcaaacccaaggtgctttgatgcaacctgtacatgtgtcccaccaacaaacacatgtttctcatcatcctgcaccgatgcgtcctccatcgtcaggccatcagccagctttgcagcatcctcaggcccagggaattcaacatacatcacaacatgaaaaacatattgggtttcatgctcagtggccaacaatgtattccaacattccttcccaagcaccaccacagggattgtctgtgcactcatctgtttcctcacaatcagttcaatcataccagcaaggaatgtcttcatcacaacagatgcattcccaacctggtcagccatatacacaacagcatgttactggcaatactggacaacatgttcaaacttctgctggcagacctatggcccatcttgcaccaacacagcaatttcagcagcaacatccagcaatgcttagaactgagtcacctgctgctgggcactctattgggcagggtcctttagatcttgaaaaacatacttcaaaatcagggaagttggataatgcaactattgctgctgtcggtgaaaataaaaatagtggtcctgagtcagttgtcatgagacctacaaagtcacaattgggtgatgaaaacatgaacagcgaacacaatggttttgttggtgttagaaaagatgcagtgcaaactggcattgtatcacacaatttagatggttcaattaggagggatgggaatactgaccaggcaggcaattcacatggcccacttgtgcagggaggcaaagatcacaaggcttcagatgcatctactgatcatgagaaaggacgactgtttcaacaggcatcactgcaaaatgcaggggcaccgggctcttatgtgcccccaggtgtggtaccacatccatctggaccagataaaatgcttcctcagcatatgacgaatcatggtcatatgcatggtttctctgaaaatatccgtcctccgctgcaacaaccatatggtgtgtttcattctggaacgataacaaggccatttggagagaaccagattcagatgccaatgccacagcctgggggtatcagacctggtgatggtatgattcgtccttgtttggttggcccattacctggacatcatggtgcagtgttgccttcttttgatcttgaacgtttgggtcagccacgtcctcttggaatgttgaacagcaatgactttggtggtgaggggttcaacgcttcagggggtgcagcgtatcctgaaagacatgataataccgaagacagtcggaaacattttccagcaccagcccctctagatgatcagggcttgcgaagggaccctagacattttgagagagctttaggtagacctgatggtttccttgattcagtacctggaaggcctccatttgcaaaccacagaagtgcaggtttgcatgaggattttccaagaaagcaaaatgcaactgccagtcaccctgacttcctgtcacatggagcagaatttgatcatcacagggctattggaatgcctaatttcagaaatccaggcccatttgctcaagggacaagtggcggtcctggtggccctcctaaacaccagcttggctctggtaaccttcctgggaatttacattcttttgagggtgacatgcatccaggtgaccctcatcttgtcgctgaatatgctcagcatggatttcctaaaactgcagcacactttggtttgggtggattcttgagaaacgggaattctggttggtgccgaatatgcatgtttaactgtgggagtgcagagaatctggatttgcatgtacaaacaagggaacatcagcaatgtgcaatggacattgtcctgaaaatgaagcaagatgttgcaaaaaggcaaaaactgaattatggagggcccaagtcattcaacaacaaaaaggtttctgggaagggccattttcgtgggaacaggcgctagtgttaactgattaaaattgatgtggttttgaaggttgctactggtgcttatggatgtgtcaatggcaatcgagaattgagatcttttcagacattctgttcatgcggttcagcgtatttgaagggaaacttaaactgcaaagtgtaggataatttccagcagagggctcctgtcatacttgcatgtttccctaacgatggtaaggatgacatgctttcataatgctgatggtggatgtgcatgggtgctgactactgtttgaacgaactggccacgccttggctctcattttctgccagcatcggatgtttttgactgaccccagggcaccttatatctattgttgtgagggttaaattgtaaaatttctggcccgtggttcattccttaccaactaatgcactcaggtgtaaaagaaaattcctgtaatgtatacacaaacatttatatacaattttgcactgtaaatatactaatattagtttcaatggagtgcacccacaaattaatgtacct

SEQ ID NO: 37175 - DNA, 5019 bp, Zea Mays
cgatcccggttgggaatggcctaaacgaacgaacaaggccactcggccccatccggcatccccgacccccgagcgtcttctttcgtctgctcgctctgcgctcgcatctaccatggagactagggtctagggtttagtgcgccgctgcctacatcgccgccatcctcaacttcctacgggatcctgacgaggcgccgtatcatcctcaacgccgcgaacctccgctcccacgttatcctcacgcccaccagtagctctcggcctctacctcgttaaggcttgatatttgactgggacactgggcaaattttaacaagtttcagcaatggggtttgataatgaatgcatcttgagtattcaatcccttcctggtgaatatttctgccctgtttgccggacacttgtatatccgaatgaggccctacaaactcaatgcacacatctctactgcaaatcctgcttggcatatgtagtggcaaccacacaagcttgtccttatgatggataccttgtaacagaagctgattccaagcctcttgtggaatcaaataaaacccttgctgagactattggcaaagtcgcggtctattgcctgtataataagagtggatgccaatggcatggagagctatctgcctgtgtcacacatggtactgcttgtgcatatgggaactctcctgttgtttgcaatcgttgtgggacacaaattgtgcatcgtcaagtgcaagaacatgctcaagtctgccatggcttacaatctcaaacacaacaagctgatggtagtcaggtgcagctggcaacggcaacaactcagccagtcatccaagattcatcacttgcctcagctggatctgctgcagctgcagctacaaccctaacaaagccatcttcaactacagccacagctgtaacagattctgcagcagcaacaggaggggcagctggtgcaaccacagcagctgtgccttcttcagcttcatctatttctgcttcccaaactccaacagctgagcagtggtaccagcagcagcagcagctccaatactcgcaatactaccagcagcagcaccctggatccaacccttacatgcagcaacatcaacaatatgaccaataccagcaggcatatcagcaatacatgcaacctccaatgcaagtaccatcccaaaatgtggtgcaaggatctgcacaacctgcttcttatgttcagcctcaagttcagtcctcccaggtgatgatgcaagcccaaagtcagccccaggtccatccattgacgagtcagccacagcttcaacagcatccagttcaaccccgaccccaaagtcaccctcatatttcccatgttcaagcaccttcaggtcagtcgcagcttcatcaaccaattcagtcagcccaagttccacaggtccaaccaagtcaagttcctctccaaccatctggtctccaagtacaatctgcagcacatccatctgctcctactcaagttggtaatcagcaatttgcgactcaagcaatggcgtatcaggtccagccacatgtacaagctcaacctccgcagcagcaacatattgttgcacatcaacaacatccacatatgcaagctttacccctacagcaaaatattcaacctaagatgcagctaaactctcaagttcagctacagcctccacatgtccagcagcaagcttacccacaatctcaggtctatcctcaacagacacatcatatgcactcccagaatactacatatgcacagcagcaaacccaaggtgctttgatgcaacctgtacatgtgtcccaccaacaaacacatgtttctcatcatcctgcaccgatgcgtcctccatcgtcaggccatcagccagctttgcagcatcctcaggcccagggaattcaacatacatcacaacatgaaaaacatattgggtttcatgctcagtggccaacaatgtattccaacattccttcccaagcaccaccacagggattgtctgtgcactcatctgtttcctcacaatcagttcaatcataccagcaaggaatgtcttcatcacaacagatgcattcccaacctggtcagccatatacacaacagcatgttactggcaatactggacaacatgttcaaacttctgctggcagacctatggcccatcttgcaccaacacagcaatttcagcagcaacatccagcaatgcttagaactgagtcacctgctgctgggcactctattgggcagggtcctttagatcttgaaaaacatacttcaaaatcagggaagttggataatgcaactattgctgctgtcggtgaaaataaaaatagtggtcctgagtcagttgtcatgagacctacaaagtcacaattgggtgatgaaaacatgaacagcgaacacaatggttttgttggtgttagaaaagatgcagtgcaaactggcattgtatcacacaatttagatggttcaattaggagggatgggaatactgaccaggcaggcaattcacatggcccacttgtgcagggaggcaaagatcacaaggcttcagatgcatctactgatcatgagaaaggacgactgtttcaacaggcatcactgcaaaatgcaggggcaccgggctcttatgtgcccccaggtgtggtaccacatccatctggaccagataaaatgcttcctcagcatatgacgaatcatggtcatatgcatggtttctctgaaaatatccgtcctccgctgcaacaaccatatggtgtgtttcattctggaacgataacaaggccatttggagagaaccagattcagatgccaatgccacagcctgggggtatcagacctggtgatggtatgattcgtccttgtttggttggcccattacctggacatcatggtgcagtgttgccttcttttgatcttgaacgtttgggtcagccacgtcctcttggaatgttgaacagcaatgactttggtggtgaggggttcaacgcttcagggggtgcagcgtatcctgaaagacatgataataccgaagacagtcggaaacattttccagcaccagcccctctagatgatcagggcttgcgaagggaccctagacattttgagagagctttaggtagacctgatggtttccttgattcagtacctggaaggcctccatttgcaaaccacagaagtgcaggtttgcatgaggattttccaagaaagcaaaatgcaactgccagtcaccctgacttcctgtcacatggagcagaatttgatcatcacagggctattggaatgcctaatttcagaaatccaggcccatttgctcaagggacaagtggcggtcctggtggccctcctaaacaccagcttggctctggtgacatgcatccaggtgaccctcatcttgtcgctgaatatgctcagcatggatttcctaaaactgcagcacactttggtttgggtggattcttgagaaacgggaattctggttggtgccgaatatgcatgtttaactgtgggagtgcagagaatctggatttgcatgtacaaacaagggaacatcagcaatgtgcaatggacattgtcctgaaaatgaagcaagatgttgcaaaaaggaattatggagggcccaagtcattcaacaacaaaaaggtttctgggaagggccattttcgtgggaacaggcgctagtgttaactgattaaaattgatgtggttttgaaggttgctactggtgcttatggatgtgtcaatggcaatcgagaattgagatcttttcagacattctgttcatgcggttcagcgtatttgaagggaaacttgctcatgctttttctaatggcgacctaataatagaccatgctggaacttttacaaagagacttgtaattgtgtcatcagacatccataacatgaaactgcaaagtgtaggataatttccagcagagggctcctgtcatacttgcatgtttccctaacgatgaagtttttcatatatgtattatggctaaagtgctgaagccattctgtggcctgtcaattacttggacactgaaggttccagtttgtataattgtgaggccatcatgaactgctatctttatctaaaaaaatcatgagctgccatgcttttggccgtaggaaaaaagaactcaccagggtcgtaggaaacaacgtaaggacatttatgtgtaaagtaatggattgtgtatatatatgttcctttggggtaaggagtgacattatggcatgttggataactttccagcgcttagatagtttgcctgaaacaaagctggttgggcatcacataaaatgtatttctcccaattcccaaacgcaggttgcttggggctagacttgttatatacattcttcaccttctcatggattttgtccaaactactcatagggttatcgttgacatgtgtaacttctttgacatactagtatactactgcgattttttatagaactaggtagaaaggctatttatcaagatgatagtatcattcagaagaacttggtgctttcagctctactacccttgactgtagctgctattagtttggatatgacaaatatattaaaagggctccaccttttccttttgctgcatgcacaatttggttcactggtagtggttgcaattgaattgtctacagatttgttccctcttcaaaattatttggcatagtttgctttgctcaagatgattatactgcccctgtttttttctgattggaatgggcttggctaccatgagtccatgatgacttaggccctgtttggaagcacccaatttttaagaaactggtttatagaaattgaggtggttccaaatgtaccagtttatgactcagtttatagaaattagattctcagtttcttaaaaactaagaaggtggcctctcctagctaaatgttaaaaactggttttttaaaaactgggttgcttcttaacgagtcttggcaaatattatgccaaactttgggtagtgatttgttatacagaacggtgggtggaaatgaaacat

SEQ ID NO: 37176 - DNA, 4523 bp, Zea Mays
cgatcccggttgggaatggcctaaacgaacgaacaaggccactcggccccatccggcatccccgacccccgagcgtcttctttcgtctgctcgctctgcgctcgcatctaccatggagactagggtctagggtttagtgcgccgctgcctacatcgccgccatcctcaacttcctacgggatcctgacgaggcgccgtatcatcctcaacgccgcgaacctccgctcccacgttatcctcacgcccaccagtagctctcggcctctacctcgttaaggcttgatatttgactgggacactgggcaaattttaacaagtttcagcaatggggtttgataatgaatgcatcttgagtattcaatcccttcctggtgaatatttctgccctgtttgccggacacttgtatatccgaatgaggccctacaaactcaatgcacacatctctactgcaaatcctgcttggcatatgtagtggcaaccacacaagcttgtccttatgatggataccttgtaacagaagctgattccaagcctcttgtggaatcaaataaaacccttgctgagactattggcaaagtcgcggtctattgcctgtataataagagtggatgccaatggcatggagagctatctgcctgtgtcacacatggtactgcttgtgcatatgggaactctcctgttgtttgcaatcgttgtgggacacaaattgtgcatcgtcaagtgcaagaacatgctcaagtctgccatggcttacaatctcaaacacaacaagctgatggtagtcaggtgcagctggcaacggcaacaactcagccagtcatccaagattcatcacttgcctcagctggatctgctgcagctgcagctacaaccctaacaaagccatcttcaactacagccacagctgtaacagattctgcagcagcaacaggaggggcagctggtgcaaccacagcagctgtgccttcttcagcttcatctatttctgcttcccaaactccaacagctgagcagtggtaccagcagcagcagcagctccaatactcgcaatactaccagcagcagcaccctggatccaacccttacatgcagcaacatcaacaatatgaccaataccagcaggcatatcagcaatacatgcaacctccaatgcaagtaccatcccaaaatgtggtgcaaggatctgcacaacctgcttcttatgttcagcctcaagttcagtcctcccaggtgatgatgcaagcccaaagtcagccccaggtccatccattgacgagtcagccacagcttcaacagcatccagttcaaccccgaccccaaagtcaccctcatatttcccatgttcaagcaccttcaggtcagtcgcagcttcatcaaccaattcagtcagcccaagttccacaggtccaaccaagtcaagttcctctccaaccatctggtctccaagtacaatctgcagcacatccatctgctcctactcaagttggtaatcagcaatttgcgactcaagcaatggcgtatcaggtccagccacatgtacaagctcaacctccgcagcagcaacatattgttgcacatcaacaacatccacatatgcaagctttacccctacagcaaaatattcaacctaagatgcagctaaactctcaagttcagctacagcctccacatgtccagcagcaagcttacccacaatctcaggtctatcctcaacagacacatcatatgcactcccagaatactacatatgcacagcagcaaacccaaggtgctttgatgcaacctgtacatgtgtcccaccaacaaacacatgtttctcatcatcctgcaccgatgcgtcctccatcgtcaggccatcagccagctttgcagcatcctcaggcccagggaattcaacatacatcacaacatgaaaaacatattgggtttcatgctcagtggccaacaatgtattccaacattccttcccaagcaccaccacagggattgtctgtgcactcatctgtttcctcacaatcagttcaatcataccagcaaggaatgtcttcatcacaacagatgcattcccaacctggtcagccatatacacaacagcatgttactggcaatactggacaacatgttcaaacttctgctggcagacctatggcccatcttgcaccaacacagcaatttcagcagcaacatccagcaatgcttagaactgagtcacctgctgctgggcactctattgggcagggtcctttagatcttgaaaaacatacttcaaaatcagggaagttggataatgcaactattgctgctgtcggtgaaaataaaaatagtggtcctgagtcagttgtcatgagacctacaaagtcacaattgggtgatgaaaacatgaacagcgaacacaatggttttgttggtgttagaaaagatgcagtgcaaactggcattgtatcacacaatttagatggttcaattaggagggatgggaatactgaccaggcaggcaattcacatggcccacttgtgcagggaggcaaagatcacaaggcttcagatgcatctactgatcatgagaaaggacgactgtttcaacaggcatcactgcaaaatgcaggggcaccgggctcttatgtgcccccaggtgtggtaccacatccatctggaccagataaaatgcttcctcagcatatgacgaatcatggtcatatgcatggtttctctgaaaatatccgtcctccgctgcaacaaccatatggtgtgtttcattctggaacgataacaaggccatttggagagaaccagattcagatgccaatgccacagcctgggggtatcagacctggtgatggtatgattcgtccttgtttggttggcccattacctggacatcatggtgcagtgttgccttcttttgatcttgaacgtttgggtcagccacgtcctcttggaatgttgaacagcaatgactttggtggtgaggggttcaacgcttcagggggtgcagcgtatcctgaaagacatgataataccgaagacagtcggaaacattttccagcaccagcccctctagatgatcagggcttgcgaagggaccctagacattttgagagagctttaggtagacctgatggtttccttgattcagtacctggaaggcctccatttgcaaaccacagaagtgcaggtttgcatgaggattttccaagaaagcaaaatgcaactgccagtcaccctgacttcctgtcacatggagcagaatttgatcatcacagggctattggaatgcctaatttcagaaatccaggcccatttgctcaagggacaagtggcggtcctggtggccctcctaaacaccagcttggctctggtgacatgcatccaggtgaccctcatcttgtcgctgaatatgctcagcatggatttcctaaaactgcagcacactttggtttgggtggattcttgagaaacgggaattctggttggtgccgaatatgcatgtttaactgtgggagtgcagagaatctggatttgcatgtacaaacaagggaacatcagcaatgtgcaatggacattgtcctgaaaatgaagcaagatgttgcaaaaaggaattatggagggcccaagtcattcaacaacaaaaaggtttctgggaagggccattttcgtgggaacaggcgctagtgttaactgattaaaattgatgtggttttgaaggttgctactggtgcttatggatgtgtcaatggcaatcgagaattgagatcttttcagacattctgttcatgcggttcagcgtatttgaagggaaacttgtaatggtcccaaacttttgttccatgttgatctgcagagttcacatggctatgtttacttcacgtatttttgccgaagttgttctgggattgcttaacatgctaatatccttcttctggcaaaagtgctgcattcctgaataaacacaagggctagagttgttgacatgtcattgcatgacaacaaagcaatccaaatcaacaaaaataatctcattgaagcggttgcctattttgtgccttgagggatgcattagtgataaagggagacttggaagcctgcaaggaaacacaaaagcatgaagaggtttgagttgggatatgtactttgagtgttagcatgagatgggagggaatcgatggtaaacctaatttagaaccaaaacatgagttgtgctcaaatatagaaggaaaagaaagatatactggttttcatatgaatactggtatgtgcatcatatacgcagtaacgcagagcttgttgataccgaactggagttgtattattcacttctagttagttattcgagatagtgatggttttattgtcataggtttgatgttcagaataggacatcataggattctacaggctacaagcactaaatattatgggtaaaatacttaggtttccaattcactgctgctggacagatgtgattgtttgcatgtgacattttgctgatggtggcctttctctagatgtctgttttaaatca

SEQ ID NO: 37177 - DNA, 1706 bp, Zea Mays
ctcgattatcaagctgtgagtgttctacttagaaacaatagtgtatcagtagaagtgaatgggatgatctttctaagcatcaatgcatcatcatgttccaatacaagtaccatcgtcatcagaccttgagagtatcctgtcaccagatccagtctgcagtgatcttcagttgaaagagataaactacaatgctgcagcaatggatgaaagcactgagctccttcacttgattcttggtggcaatgatgaaggatacaataccacaactgaattacaagtttgggatgttctggacttctatgtctcagaaaacttctcggctctccaatttgatagtttgatgggttttacaaatgaagttagtacttcctacaatgattgtatgaatttagttgacatggtagagtggcccgtggctcgtctgtctctagatgatacaccaaaactcagtaacagtgatgatgcggttctggcagacaatgtcacaacggaccctgatgaaacatccttataccttcgtacaaaaccaacagattcagaaactgaaagtagctctgacgcaggagatgttgaaactgaatatctagatcaaaagctactttctagatgtctgcctgatttaatggatgttgactcgcccaaccacttactgaaaacaccagtgagaacaaaacatgtgactcttgtgcttgatttggacgagactcttgtacattcaacattggatcagtgcgacagtgctgattttaccctagaagttttcttcaatatgaaaaatcacacagtgtatgtgaagaaaaggccttacctgaaagtgtttcttgagaaggttgctcagatgtttgagcttgtcattttcacagctagtcagagaatctatgctgagcaacttatagataaacttgatcctgatggaaaatatatctcacggcgtatttatcgtgaatcttgtatattctctgacggttgctatacaaaggatctgacaatcttggggatcgacttggcgaaagttgcaatagttgacaatactccacaggttttccagttgcaagtggataacggcataccaattaagagctggtttgatgaccccgcagaccaggaattaatcgagttactcccgttcctggagagcctcgtggactcagatgacgtgaggccaataatttcgaaggccttccatgacaaacctgagtagaaatagtcctggagagctggagaggttcactggaattaatccagtgaacctctcgctgaagttagcttcgctccacacggtgcaggccattcttgggaagttaggtataggatcaagattcaccatttatgttatgttagctgttacaaatagcaagcataaactgcggtcgtcgatgaaaatggcttgtgtgtgtatgtcccttcggtgttccgtgtcacagatcattgtacagagacgaacaatagtgctgaataaagtgatctgagtgcaattttgctcatgaggacggctcgagcaggaagccgtgcttctgttcataataacgtgaattatgttaggacgtatgcactaaccagtttaatttaatagaaaaagttagccaatccatttatacactccaacattagtcaatccatttgtacacttcaacattagtcaattcatttatacactccaacattagtcaatccatttatagaaagacgtaaacatggaaataaaa

SEQ ID NO: 37178 - DNA, 1319 bp, Zea Mays
gagctgtccctgcctgtgttcttgcctcttgcctcttgcgccttgctagcttgcttgcctccctgctccctcctcctccctcttcctcgtcgcttctctgattcttcctggcctttgccggagcaaggctaggcgcgaggagagggtgctgtgctcagccagaggtcatcggcgctacgcgagcgcactgcctgtgtacgtatctcttctcgtctctctcgagctctgcgcttggtctggtcggaggtttcgtgagcacaaagttcttgccccgtctctttagtagtatcgatgcttgttctcaactttctagcgtgtgattaagctggggacggccctctcagtctctcacggtgaatttggcggcgaatttggtgggtatttgtggtcttttgtagcatgaacacgaggagatttcggcgagctgctgaaaacgcggaactgttctggttttttttcctgtgtgaaattcgagtgccgaaggacgatcctgtagttccaagactctaagctcgacagagatgttcggtgaaggctgttggcctggtctctgttctccgcacttctttctccactcgtgattctgcgctgtgattttccgacgacgaggagtgaagggagatttgtgatggtctaaaaacgaaaagtagaggaaagggggaaaaggggacggatgctgtctggtagagttgttacttgctgccactgccagaggatccaagagtattagcggacctgttttgctttggcgaattcacttataacatgctcccggcatgcgagaagtgacagctgatttcgagtttcgagtagagtaaatttgttgactaatactattgtttagtcaaagacgcatatctttttcttgttttgttaataatgattacatttacattacttcctttgtctacggactaatcgtcacaatactaagtttttgttttttcatgtcgaattgattagcgctttccctttacagatttattagtggttaaagtatgttctttcgactgcattaggttgtagatagttccttgtttcaccttttctccactaatgtctttagtgatatcaaatgtttcaacagttggccttttcctactggaactgcagtactttgaacatgctttttgcaaatacttgcactaaggatgaataaaatgttaagcaacgactgtttagggacacaggagcctcatacattttgcaagaccactgaaacactggaacattcacaccctcaagaggttacacttgataaaacggtggcggggtcaacgctaataagtcatcaaaatggttgcgccttcgtaatctga

SEQ ID NO: 37179 - DNA, 1976 bp, Zea Mays
agtgtgccgccacagtgcagctgctgcttcctcctacagctaccccgtggacccacccaccaaaaccttgcgagttccgccgccatggcgaccggagcactgttacagccgtggagcttgctcggttttcttgcggcgctcgcggcgctctggtgggcgtgccgggtgctgcagtcgaccctgatcgtcccgcggaggctcggtcgggccctgcggtcgcagggcctccgcggcacgacgtaccgcttcccgttcggcgacctcaaggagctcgcgcggttggccgtggctgcccgggccaaggccatgccgctctcgcacgacatcacgccgcgcgtgaatcgcctctactacaacgtcatcggggaacatgtctccgtcacttggctcggtcccacgccaagggtgatcgtgaacgaccccaagctggtgcgggagatcctggccaacaagcttggtcacttccagaaacgcaagcacgacggcatcgtcaggcggctggccagcgggctggtcaaccacgagggcgagaaatgggctgcgcaccgcaagctcatcagcccggcctttcacctcgagaagctcaagaaaatgttgcccgcgtttgcttcgtgctcagacgagttgatagctagatgggcgggttacgtggggtccgacggagcgagggagatagatgtctggccggagttccagaacctcaccggcgacgtgatctcgcgcacggccttcggcagcagcttcagcgaggggaggaggattttcgagatacagtgcgagcaagttcagaatctagtgaagttgatgaacacactgtacctcccaggtttcaggttcctgccaacgcagctaaacagaaggctgaaggcgaacgcgcgagaggtccaggcgctcctgagaggcatcgtcagcaagcgggagcgggccatgaaagaaggccgtgccaacaacgacgacctgctgggcgtgctgatggagtccaacatcgctgagaccagacaggacgggagctccgagccagtcatgaccatggacgacatcatcggggagctgaagctgttctacttcgccgggatggataccaccgctgtgctgctcacgtggacgatggtcgtcctgagcgcgcacccggagtggcaggagcgagcgagggaggaggtccggcgcgtcttcggaaacaaccggccggacctggacggcatacagcagctgaaaaccgtgaccatgatactgtacgaggtgctcaggctgtacccgccggtcgtgcagctcgatcggcagacgcacaacgaggtcgagctgggcggcgtcacgtacccgcccggggtgctgctctcgctgccgatcgtcttcgttcaccacgacaaggacgtgtggggagaggacgccgacgagttcagcccggagaggttcaaggacggcgtctccagggcgtccaaggactcgccggcgttcttcccgttcggctggggtccacggatctgcgtcggccagaacttcgcgctggtcgaggccaagatggcgctcagcagcatcctgcagcacttctcgttcgccctctcgcagtcctacactcacgcgccgttcccggtgtccactctgcagccggaacacggggcgcatctcatgctcaagaaactctagtgcccacatcttttgctcaatttcgacaagcatgctacaacgaactacccaactcttccaagtactttgatactcctatttgatatctgatcttgtgaaagacgtagaaatttacatttagcctatctcgagcagcttactttttctcatctctcatttgaaaccacactatacaattacagacagtgtttctatagtattttgcacagatatatacagatatactggtcatagccttaggacagttcgagagagataggttggtaaacaaatttcagtgatctactccaaatcaaatcgcactaaatcctaagaattttgagcataagacc

SEQ ID NO: 37180 - DNA, 1667 bp, Zea Mays
ctcatttccccacttatacaaactcggcaacatctgtattacctggttcggaccgattcccagggtggtgatcacggaggcagagttagtcagagacatcctatcgaacaagtttggccacttcgagaagttcacgaacaagagtctcgggaagatgatcgccctcggggtggcgagctacgacggcgagaaatgggccaaacacaggaggatcctgaaccccgcgttccatctcgagaagctcaaggttggttggtttcgttgtccaacttccttcagttcaaggcgtatagagatgtgtgcgtgcttactactagagtgggtttttgcagcgcatgcagccggcgttcttgacgtgctgcaccgagctcattgatcgctgggacaaggaggtcgctggtggttccgacgggtcattcgagctggacgtctggccggagttccagagcctcaccggcgacgtgatctcccgcacggcgttcggcagcagcttcatggaagggcggaggatcttccagctccaggccgagcaagcggagcgagtgatcaaggctttccagtacatatacatcccaggcttcgtgttcttcccgacacccaacaaccggaggatgaaggagatcaacagggagatcgaagggactctgagaggcatgatcgagaagagggagcgcgcgatcgagaacggcgaagcgagcggcgacgacctgctcggcctgctgctgcagtccaacatggagagcgggaaaggcggcctgaggatgagcacggaggacgtggtcgaggagtgcaagctcttctacttcgccggcatggagaccacgtcggtgctgctcacctggacgctcgtcatcctaggcatgcaccccgagtggcaggaccgcgccagggaggaggtcttcagcgtcttcggcagggacaagcgccccgatttcgacggcatcagtcggctcaaaacggttacgatgatactgtacgaggtgctcaggctgtacccgccggcggtgacgctgaaccgaagaacgttcaaagacatgcagatcggaggcatcacgtaccctgcgggggtgatcctggagctccccgtgatcgtcgtccaccacgaccccgacgtctggggcaaggacgcgcacgagttcaggccggagaggttcgccgaggggatctccaaggcgaccaaggaccagcagccggcgttcttcccgttcggctgggggccgaggatctgcatcggccagaacttcgcgctgctcgaggccaagatggccctcagcatgatcctccagcgcttccagttccggctgtccccttcctacacgcatgcgccgtacaccgtccttctgctgcatcctcagcatggcgctccaattattttcgacaggatctgactgcccttgcatgacatcgtcgatcgttgtcagtatgtcacagtgcaaataaactcgtatgaataatattgtgttagggagagtctagttctgtgtatccgattttgaaggtggaaccaaaacataagggtgtaaggctatgtcccggaaaatgagtcgcatgcgagctcgcaaacaccaacagagtccacatgcggatatacatatagaactgtgaagaagaataatgtgctttggaagaaactttacatcaacatgatcttgttattatcacttaaa

SEQ ID NO: 37181 - DNA, 1762 bp, Zea Mays
gttgagagacccgctgaaaagctcaaaccctcctcacttccacgcctctctcctccctttccacacttagctccccatgtcttctggaggaggagaccaccatggcgtctaccaccagcagcacggccacggccacggccatctcgcccgcgctgacggcgccgagtacgcgttccacggcaacgacgacatggagagcttcttcttcaaccatccggcgtcggcgggcctcgacggaggaggcagcaggacgactggcgccgacgagctcctggcgccgtactccagcatcacggactacctgcaggggctcctggacccctccgggctagctcggcacctcgacgccccgctcaagcacgagctgtctgtcgacgcgagccacgacagccagggcaccagcggcgcgcccggcggtgaagcggcggcgatgcacacgccgaactcgtcggtgtctctctcgtcgagcgaccgggacggggagggccagcagcctcgtcggtgcaagaagggcaggaccaacaaggcggaggacgcggagggggatgagaaagatcagcaggatggggagaattccaccaaagcgaacaaatccaagaagaaggctgagaagaggcagaggcagccgcgcgttgccttcctcaccaagagcgaggtggatcaccttgaggacggctatcggtggcgcaaatacggccagaaggcggtcaagaacagtccttacccaaggtctgtatatatacttttcttcgttccccatctttgttcattataattgcatgcatgatatgctagctatcacacatgaaggcatgcagctacctagctgttgtatacatgcaaattaagacaagtatataccctactgcattgtacaacttgtatgtaatctctcaccaagagtatgtgtatgatgcatgtatgtaccttacaataacttgtcatacatatattcaaatccgatctccggccaaacgcatgcatgcaggagctactaccggtgcactacgcccaagtgcggcgtgaagaagcgcgtggagcggtcgtaccaggacccgtcgacggtgatcacgacgtacgaggggcagcacacgcaccacagccccgccagcctgcgcgccggcggcgcgcacctcttcatgtccagcgcgcacgcgctgccgccgcacctgaccatgccgtcgtccagctttcgcccggacctgaacctgatgagcatgatgcaccccgccatggtgggcgcgaaccctaacatgttcctgccaagtatgcctcctcctcctcatatgtcaacgccatctcctgctcctgatcctcctcttcagcagcaccacttcactgactacgccctcttgcaagatctcttcccttccacaatgcccaataacccgtaataactaactgctacgaacagctagctagcctagatcgacatgagagatgctgtcgtcggaatactgcgcgccaaatgtgatcacctgatgacctcgtgcttgtgcgtgtgcttggtctaatggagaggggaacagttattattcattagtctgcttcatcttaaacttctgcctgcacctcttcctcttccatttgtcaactcgatcatatctccgctgcgcgggatggatggggaggtactagagatggaagtactttataactatcactagaacggcaacgcaatttatgtatgcgtatgcctctagacttcttgtacatgcatgtactagtgtatatcatgtgttcctcattgactcatttggag

SEQ ID NO: 37182 - DNA, 1540 bp, Zea Mays
cacagcctaatggactccagaagacattttttacgttttgtactaggttcgcttgcatctcctgacagcagtgatgaaatgtttctttaaaagacctccagagacacaaaaggcattaggagctacattatcagctggtctatctgacacccagcaggatgttcatgacagagcacttttctactacaggcttttgcaatacaatcctaatgtagcagaacgtgtagtaaaccctcccaaacaagctgtctctgtatttgcagatacacagagcagtgaaaccaaagatcggatatttgatgagttcaacagtctatcagttgtatatcagaagccatcttacatgtttacagatagggagcatcgtgagccatttgaatactcagaggatcttacaagcttgactgttggggcagaggatccagaaaatgtaatttctgcccaaagatatcaagaaaacgataatgatcttttgctaagtacttcagataaagaggacaatggtacaagagccagcaatggttcttctacctctgcatacaatgctccttctgatttgattagcccttcattgataagctcccaaacaccagctgaaacttcactagtaaatactggtgggccgacacattcctcacaatcaaacttcagtctcgatgaccttcttggcattggcgttactgaagctcctgctccaacaccaccagcactgacccttaactcgaagcctgtgctagatcctggtacgttccagaggaaatggggccagctagcattggcgctgtctcaggaatgctctttgagtccacaaggagcagcttcattgatgaatccccaatcactcatccgtcatatgcaaagcaattacatccaatgtattgcttcaggtggtcagcctccgaactacaagttctttttctatgctcagaaagatggggctactgctttcttccttgttgaatgtattgtcaacacagcatcagcgaaggcacagctcaaaattaaggctgatgatgggactgctgctgaggcattctcgactttgtttcagtcagccttgtccaaatttgggctttcttgatcctgagtattttgtctgagcgattcactggtccacaatttttttccggcgttcacagttttgcccccactctgccgcggtgccgcctaagcttgtccagtacttgatcaatttgttggagaatcagcgtagaaggtgcgattagagggcaatatattattatcactaaattcagcaagagagcaatggagttttgcggagtaaaatcttatttgtattaattgggtgaactgtgcatttgtacatgactacatgtcatctagataaatagctaggttatttaggattgtgctagtgtgatgccttgacttcttctgaagggccttctttttcttgaaggatgtagaaacaacacacacctccccctttcatgtatgctgtacttacctttctttcttgcacaggtgaccaataaagatgtttcttccattttgattcacattaagggcctgcttgttt

SEQ ID NO: 37183 - DNA, 3072 bp, Zea Mays
gtcttcctcctcaggcgaggccagatccaacctgccgcggccgaccactgccatggctcccaccgtcccttcggcggcgaagtccgcttctccttcccaaccctccgggaagagcgaggtgacggatctgaagcagcagctgcggcagcttgccgggagccgcgctcccgatgcggacgcccagcgtcgtgatgtattcaagagggtgatctcctgcatgacggccggcatcgacgtgtcggccgcgttcggggagatggtcctctgctccgccacctccgacgtcgtaaccaagaagatgtgctatctctatgtaggcgcccacgcgcgcgcgcacccggacctagccctcctcaccattaacttcctccagcgggactgccaagatcaggaccccaccatccgcggcctcgctctccgcagtctctgctccctccgtgtccccaatcttgtcgagtatctcgtcacgccactcacgaccgggctgaaggaccccagcgcctacgtgcggatgattgctgctgttggtgctgccaagttgtatcacatatctgccaccgcctgcattgatgctgaccttcctgcttcgctcaaggcgctcatgctatccgatccagacgcacaggtagttgccaattgcctgcatgcattgcaagagatctgggccctagaagctgctaaatcagaagcagctgcaagagagattgagacattgcatagcaaaccagtggtattttacctgttaaacaagatcaaggagttcagtgaatgggcgcagtgcattgttcttgagttggcatcaaagttccttccatctgataataatgaaatatttgacattatgaatttgctggaggatagacttcagcatgcaaatggagcagttgttttggcaacaattaaagtttttctccatttgacaatgtctatgactgatgttcatcaacaggtgcacatgttactcccagagaggtttatgaacgtattaaagcacccttgcttactctggtgggtgctggcagtcctgaacagtcatactctgtgctatgccatctacatcttctggtgatgcgtgctccaatgttattttcctcagactataaaagcttctactgccaatttagtgatccttcatacgtgaagaagttgaaacttgagatgttgactgctatagcaaatgaaagcaacacatatgagattgtcaccgaactgtgtgaatacgctgggaatgttgatgtaccgattgcaagggagtctatccgcgcagttggaaaaatagcactgcagcagtatgatgttaatgctattgtggacaggcttctacaatttcttgaaatggataaggattatgtgactgctgaaactctagtcttggtaaaagatcttctcagaaaatatcctcaatggagccatgattgtatagctgttgttggaaatatcagcagcaaaaacatccaggagcccaaaggaaaagcagctctcatatggatgttgggagaatattcacaagacatgcatgatgctccatacatccttgaaaatcttgttgaaaactgggatgaagagcactctcctgaggttcgcttgcatctcctgacagcagtgatgaaatgtttctttaaaagacctccagagacacaaaaggcattaggagctacattatcagctggtctatctgacacccagcaggatgttcatgacagagcacttttctactacaggcttttgcaatacaatcctaatgtagcagaacgtgtagtaaaccctcccaaacaagctgtctctgtatttgcagatacacagagcagtgaaaccaaagatcggatatttgatgagttcaacagtctatcagttgtatatcagaagccatcttacatgtttacagatagggagcatcgtgagccatttgaatactcagaggatcttacaagcttgactgttggggcagaggatccagaaaatgtaatttctgcccaaagatatcaagaaaacgataatgatcttttgctaagtacttcagataaagaggacaatggtacaagagccagcaatggttcttctacctctgcatacaatgctccttctgatttgattagcccttcattgataagctcccaaacaccagctgaaacttcactagtaaatactggtgggccgacacattcctcacaatcaaacttcagtctcgatgaccttcttggcattggcgttactgaagctcctgctccaacaccaccagcactgacccttaactcgaagcctgtgctagatcctggtacgttccagaggaaatggggccagctagcattggcgctgtctcaggaatgctctttgagtccacaaggagcagcttcattgatgaatccccaatcactcatccgtcatatgcaaagcaattacatccaatgtattgcttcaggtggtcagcctccgaactacaagttctttttctatgctcagaaagatggggctactgctttcttccttgttgaatgtattgtcaacacagcatcagcgaaggcacagctcaaaattaaggctgatgatgggactgctgctgaggcattctcgactttgtttcagtcagccttgtccaaatttgggctttcttgatcctgagtattttgtctgagcgattcactggtccacaatttttttccggcgttcacagttttgcccccactctgccgcggtgccgcctaagcttgtccagtacttgatcaatttgttggagaatcagcgtagaaggtgcgattagagggcaatatattattatcactaaattcagcaagagagcaatggagttttgcggagtaaaatcttatttgtattaattgggtgaactgtgcatttgtacatgactacatgtcatctagataaatagctaggttatttaggattgtgctagtgtgatgccttgacttcttctgaagggccttctttttcttgaaggatgtagaaacaacacacacctccccctttcatgtatgctgtacttacctttctttcttgcacaggtgaccaataaagatgtttcttccattttgattcacattaagggcctgcttgttt

SEQ ID NO: 37184 - DNA, 2966 bp, Zea Mays
gtcacagtcgtcttcctcctcaggcgaggccagatccaacctgccgcggccgaccactgccatggctcccaccgtcccttcggcggcgaagtccgcttctccttcccaaccctccgggaagagcgaggtgacggatctgaagcagcagctgcggcagcttgccgggagccgcgctcccgatgcggacgcccagcgtcgtgatgtattcaagagggtgatctcctgcatgacggccggcatcgacgtgtcggccgcgttcggggagatggtcctctgctccgccacctccgacgtcgtaaccaagaagatgtgctatctctatgtaggcgcccacgcgcgcgcgcacccggacctagccctcctcaccattaacttcctccagcgggactgccaagatcaggaccccaccatccgcggcctcgctctccgcagtctctgctccctccgtgtccccaatcttgtcgagtatctcgtcacgccactcacgaccgggctgaaggaccccagcgcctacgtgcggatgattgctgctgttggtgctgccaagttgtatcacatatctgccaccgcctgcattgatgctgaccttcctgcttcgctcaaggcgctcatgctatccgatccagacgcacaggtagttgccaattgcctgcatgcattgcaagagatctgggccctagaagctgctaaatcagaagcagctgcaagagagattgagacattgcatagcaaaccagtggtattttacctgttaaacaagatcaaggagttcagtgaatgggcgcagtgcattgttcttgagttggcatcaaagttccttccatctgataataatgaaatatttgacattatgaatttgctggaggatagacttcagcatgcaaatggagcagttgttttggcaacaattaaagtttttctccatttgacaatgtctatgactgatgttcatcaacaggtgcacatgttactcccagagaggtttatgaacgtattaaagcacccttgcttactctggtgggtgctggcagtcctgaacagtcatactctgtgctatgccatctacatcttctggtgatgcgtgctccaatgttattttcctcagactataaaagcttctactgccaatttagtgatccttcatacgtgaagaagttgaaacttgagatgttgactgctatagcaaatgaaagcaacacatatgagattggcttctacaatttcttgaaatggataaggattatgtgactgctgaaactctagtcttggtaaaagatcttctcagaaaatatcctcaatggagccatgattgtatagctgttgttggaaatatcagcagcaaaaacatccaggagcccaaaggaaaagcagctctcatatggatgttgggagaatattcacaagacatgcatgatgctccatacatccttgaaaatcttgttgaaaactgggatgaagagcactctcctgaggttcgcttgcatctcctgacagcagtgatgaaatgtttctttaaaagacctccagagacacaaaaggcattaggagctacattatcagctggtctatctgacacccagcaggatgttcatgacagagcacttttctactacaggcttttgcaatacaatcctaatgtagcagaacgtgtagtaaaccctcccaaacaagctgtctctgtatttgcagatacacagagcagtgaaaccaaagatcggatatttgatgagttcaacagtctatcagttgtatatcagaagccatcttacatgtttacagatagggagcatcgtgagccatttgaatactcagaggatcttacaagcttgactgttggggcagaggatccagaaaatgtaatttctgcccaaagatatcaagaaaacgataatgatcttttgctaagtacttcagataaagaggacaatggtacaagagccagcaatggttcttctacctctgcatacaatgctccttctgatttgattagcccttcattgataagctcccaaacaccagctgaaacttcactagtaaatactggtgggccgacacattcctcacaatcaaacttcagtctcgatgaccttcttggcattggcgttactgaagctcctgctccaacaccaccagcactgacccttaactcgaagcctgtgctagatcctggtacgttccagaggaaatggggccagctagcattggcgctgtctcaggaatgctctttgagtccacaaggagcagcttcattgatgaatccccaatcactcatccgtcatatgcaaagcaattacatccaatgtattgcttcaggtggtcagcctccgaactacaagttctttttctatgctcagaaagatggggctactgctttcttccttgttgaatgtattgtcaacacagcatcagcgaaggcacagctcaaaattaaggctgatgatgggactgctgctgaggcattctcgactttgtttcagtcagccttgtccaaatttgggctttcttgatcctgagtattttgtctgagcgattcactggtccacaatttttttccggcgttcacagttttgcccccactctgccgcggtgccgcctaagcttgtccagtacttgatcaatttgttggagaatcagcgtagaaggtgcgattagagggcaatatattattatcactaaattcagcaagagagcaatggagttttgcggagtaaaatcttatttgtattaattgggtgaactgtgcatttgtacatgactacatgtcatctagataaatagctaggttatttaggattgtgctagtgtgatgccttgacttcttctgaagggccttctttttcttgaaggatgtagaaacaacacacacctccccctttcatgtatgctgtacttacctttctttcttgcacaggtgaccaataaagatgtttcttccattttgattcacattaagggcctgcttgttt

SEQ ID NO: 37185 - DNA, 3062 bp, Zea Mays
ccaccccgaactcccagacaccacggctcgtcacagtcgtcttcctcctcaggcgaggccagatccaacctgccgcggccgaccactgccatggctcccaccgtcccttcggcggcgaagtccgcttctccttcccaaccctccgggaagagcgaggtgacggatctgaagcagcagctgcggcagcttgccgggagccgcgctcccgatgcggacgcccagcgtcgtgatgtattcaagagggtgatctcctgcatgacggccggcatcgacgtgtcggccgcgttcggggagatggtcctctgctccgccacctccgacgtcgtaaccaagaagatgtgctatctctatgtaggcgcccacgcgcgcgcgcacccggacctagccctcctcaccattaacttcctccagcgggactgccaagatcaggaccccaccatccgcggcctcgctctccgcagtctctgctccctccgtgtccccaatcttgtcgagtatctcgtcacgccactcacgaccgggctgaaggaccccagcgcctacgtgcggatgattgctgctgttggtgctgccaagttgtatcacatatctgccaccgcctgcattgatgctgaccttcctgcttcgctcaaggcgctcatgctatccgatccagacgcacaggtagttgccaattgcctgcatgcattgcaagagatctgggccctagaagctgctaaatcagaagcagctgcaagagagattgagacattgcatagcaaaccagtggtattttacctgttaaacaagatcaaggagttcagtgaatgggcgcagtgcattgttcttgagttggcatcaaagttccttccatctgataataatgaaatatttgacattatgaatttgctggaggatagacttcagcatgcaaatggagcagttgttttggcaacaattaaagtttttctccatttgacaatgtctatgactgatgttcatcaacaggtttatgaacgtattaaagcacccttgcttactctggtgggtgctggcagtcctgaacagtcatactctgtgctatgccatctacatcttctggtgatgcgtgctccaatgttattttcctcagactataaaagcttctactgccaatttagtgatccttcatacgtgaagaagttgaaacttgagatgttgactgctatagcaaatgaaagcaacacatatgagattgtcaccgaactgtgtgaatacgctgggaatgttgatgtaccgattgcaagggagtctatccgcgcagttggaaaaatagcactgcagcagtatgatgttaatgctattgtggacaggcttctacaatttcttgaaatggataaggattatgtgactgctgaaactctagtcttggtaaaagatcttctcagaaaatatcctcaatggagccatgattgtatagctgttgttggaaatatcagcagcaaaaacatccaggagcccaaaggaaaagcagctctcatatggatgttgggagaatattcacaagacatgcatgatgctccatacatccttgaaaatcttgttgaaaactgggatgaagagcactctcctgagtgatgaaatgtttctttaaaagacctccagagacacaaaaggcattaggagctacattatcagctggtctatctgacacccagcaggatgttcatgacagagcacttttctactacaggcttttgcaatacaatcctaatgtagcagaacgtgtagtaaaccctcccaaacaagctgtctctgtatttgcagatacacagagcagtgaaaccaaagatcggatatttgatgagttcaacagtctatcagttgtatatcagaagccatcttacatgtttacagatagggagcatcgtgagccatttgaatactcagaggatcttacaagcttgactgttggggcagaggatccagaaaatgtaatttctgcccaaagatatcaagaaaacgataatgatcttttgctaagtacttcagataaagaggacaatggtacaagagccagcaatggttcttctacctctgcatacaatgctccttctgatttgattagcccttcattgataagctcccaaacaccagctgaaacttcactagtaaatactggtgggccgacacattcctcacaatcaaacttcagtctcgatgaccttcttggcattggcgttactgaagctcctgctccaacaccaccagcactgacccttaactcgaagcctgtgctagatcctggtacgttccagaggaaatggggccagctagcattggcgctgtctcaggaatgctctttgagtccacaaggagcagcttcattgatgaatccccaatcactcatccgtcatatgcaaagcaattacatccaatgtattgcttcaggtggtcagcctccgaactacaagttctttttctatgctcagaaagatggggctactgctttcttccttgttgaatgtattgtcaacacagcatcagcgaaggcacagctcaaaattaaggctgatgatgggactgctgctgaggcattctcgactttgtttcagtcagccttgtccaaatttgggctttcttgatcctgagtattttgtctgagcgattcactggtccacaatttttttccggcgttcacagttttgcccccactctgccgcggtgccgcctaagcttgtccagtacttgatcaatttgttggagaatcagcgtagaaggtgcgattagagggcaatatattattatcactaaattcagcaagagagcaatggagttttgcggagtaaaatcttatttgtattaattgggtgaactgtgcatttgtacatgactacatgtcatctagataaatagctaggttatttaggattgtgctagtgtgatgccttgacttcttctgaagggccttctttttcttgaaggatgtagaaacaacacacacctccccctttcatgtatgctgtacttacctttctttcttgcacaggtgaccaataaagatgtttcttccattttgattcacattaagggcctgcttgttt

SEQ ID NO: 37186 - DNA, 3101 bp, Zea Mays
gtcagcctctagtgccaccccgaactcccagacaccacggctcgtcacagtcgtcttcctcctcaggcgaggccagatccaacctgccgcggccgaccactgccatggctcccaccgtcccttcggcggcgaagtccgcttctccttcccaaccctccgggaagagcgaggtgacggatctgaagcagcagctgcggcagcttgccgggagccgcgctcccgatgcggacgcccagcgtcgtgatgtattcaagagggtgatctcctgcatgacggccggcatcgacgtgtcggccgcgttcggggagatggtcctctgctccgccacctccgacgtcgtaaccaagaagatgtgctatctctatgtaggcgcccacgcgcgcgcgcacccggacctagccctcctcaccattaacttcctccagcgggactgccaagatcaggaccccaccatccgcggcctcgctctccgcagtctctgctccctccgtgtccccaatcttgtcgagtatctcgtcacgccactcacgaccgggctgaaggaccccagcgcctacgtgcggatgattgctgctgttggtgctgccaagttgtatcacatatctgccaccgcctgcattgatgctgaccttcctgcttcgctcaaggcgctcatgctatccgatccagacgcacaggtagttgccaattgcctgcatgcattgcaagagatctgggccctagaagctgctaaatcagaagcagctgcaagagagattgagacattgcatagcaaaccagtggtattttacctgttaaacaagatcaaggagttcagtgaatgggcgcagtgcattgttcttgagttggcatcaaagttccttccatctgataataatgaaatatttgacattatgaatttgctggaggatagacttcagcatgcaaatggagcagttgttttggcaacaattaaagtttttctccatttgacaatgtctatgactgatgttcatcaacaggtttatgaacgtattaaagcacccttgcttactctggtgggtgctggcagtcctgaacagtcatactctgtgctatgccatctacatcttctggtgatgcgtgctccaatgttattttcctcagactataaaagcttctactgccaatttagtgatccttcatacgtgaagaagttgaaacttgagatgttgactgctatagcaaatgaaagcaacacatatgagattgtcaccgaactgtgtgaatacgctgggaatgttgatgtaccgattgcaagggagtctatccgcgcagttggaaaaatagcactgcagcagtatgatgttaatgctattgtggacaggcttctacaatttcttgaaatggataaggattatgtgactgctgaaactctagtcttggtaaaagatcttctcagaaaatatcctcaatggagccatgattgtatagctgttgttggaaatatcagcagcaaaaacatccaggagcccaaaggaaaagcagctctcatatggatgttgggagaatattcacaagacatgcatgatgctccatacatccttgaaaatcttgttgaaaactgggatgaagagcactctcctgaggttcgcttgcatctcctgacagcagtgatgaaatgtttctttaaaagacctccagagacacaaaaggcattaggagctacattatcagctggtctatctgacacccagcaggatgttcatgacagagcacttttctactacaggcttttgcaatacaatcctaatgtagcagaacgtgtagtaaaccctcccaaacaagctgtctctgtatttgcagatacacagagcagtgaaaccaaagatcggatatttgatgagttcaacagtctatcagttgtatatcagaagccatcttacatgtttacagatagggagcatcgtgagccatttgaatactcagaggatcttacaagcttgactgttggggcagaggatccagaaaatgtaatttctgcccaaagatatcaagaaaacgataatgatcttttgctaagtacttcagataaagaggacaatggtacaagagccagcaatggttcttctacctctgcatacaatgctccttctgatttgattagcccttcattgataagctcccaaacaccagctgaaacttcactagtaaatactggtgggccgacacattcctcacaatcaaacttcagtctcgatgaccttcttggcattggcgttactgaagctcctgctccaacaccaccagcactgacccttaactcgaagcctgtgctagatcctggtacgttccagaggaaatggggccagctagcattggcgctgtctcaggaatgctctttgagtccacaaggagcagcttcattgatgaatccccaatcactcatccgtcatatgcaaagcaattacatccaatgtattgcttcaggtggtcagcctccgaactacaagttctttttctatgctcagaaagatggggctactgctttcttccttgttgaatgtattgtcaacacagcatcagcgaaggcacagctcaaaattaaggctgatgatgggactgctgctgaggcattctcgactttgtttcagtcagccttgtccaaatttgggctttcttgatcctgagtattttgtctgagcgattcactggtccacaatttttttccggcgttcacagttttgcccccactctgccgcggtgccgcctaagcttgtccagtacttgatcaatttgttggagaatcagcgtagaaggtgcgattagagggcaatatattattatcactaaattcagcaagagagcaatggagttttgcggagtaaaatcttatttgtattaattgggtgaactgtgcatttgtacatgactacatgtcatctagataaatagctaggttatttaggattgtgctagtgtgatgccttgacttcttctgaagggccttctttttcttgaaggatgtagaaacaacacacacctccccctttcatgtatgctgtacttacctttctttcttgcacaggtgaccaataaagatgtttcttccattttgattcacattaagggcctgcttgttt

SEQ ID NO: 37187 - DNA, 3515 bp, Zea Mays
gtcagcctctagtgccaccccgaactcccagacaccacggctcgtcacagtcgtcttcctcctcaggcgaggccagatccaacctgccgcggccgaccactgccatggctcccaccgtcccttcggcggcgaagtccgcttctccttcccaaccctccgggaagagcgaggtgacggatctgaagcagcagctgcggcagcttgccgggagccgcgctcccgatgcggacgcccagcgtcgtgatgtattcaagagggtgatctcctgcatgacggccggcatcgacgtgtcggccgcgttcggggagatggtcctctgctccgccacctccgacgtcgtaaccaagaagatgtgctatctctatgtaggcgcccacgcgcgcgcgcacccggacctagccctcctcaccattaacttcctccagcgggactgccaagatcaggaccccaccatccgcggcctcgctctccgcagtctctgctccctccgtgtccccaatcttgtcgagtatctcgtcacgccactcacgaccgggctgaaggaccccagcgcctacgtgcggatgattgctgctgttggtgctgccaagttgtatcacatatctgccaccgcctgcattgatgctgaccttcctgcttcgctcaaggcgctcatgctatccgatccagacgcacaggtagttgccaattgcctgcatgcattgcaagagatctgggccctagaagctgctaaatcagaagcagctgcaagagagattgagacattgcatagcaaaccagtggtattttacctgttaaacaagatcaaggagttcagtgaatgggcgcagtgcattgttcttgagttggcatcaaagttccttccatctgataataatgaaatatttgacattatgaatttgctggaggatagacttcagcatgcaaatggagcagttgttttggcaacaattaaagtttttctccatttgacaatgtctatgactgatgttcatcaacaggtgcacatgttactcccagagagttggggaaggaaaggttatggtggtgcgggtgttgttgcgggggcggggggtgcgctatgttgggggtcgggaaagcctgagatggggagtgagggaagggaatccggtggattggcgctgggagacaagggcagcggtgggcgatggggcggcggcagcgtgggaggtcgtgggcacaagggcaggggtggtggatggaggcagtgccaggggcagggagggcgccgcagcgggcacgatggggatgcccccatagccgggaaggccgtaggggagttctgcgacacgggcgacgtgctggtggctgctgctgccccggaggttgtcgggatggtggtcgtcaccggggaaaccgaaggctggggagggtcgtccgacatcctaggatcggtttatgaacgtattaaagcacccttgcttactctggtgggtgctggcagtcctgaacagtcatactctgtgctatgccatctacatcttctggtgatgcgtgctccaatgttattttcctcagactataaaagcttctactgccaatttagtgatccttcatacgtgaagaagttgaaacttgagatgttgactgctatagcaaatgaaagcaacacatatgagattgtcaccgaactgtgtgaatacgctgggaatgttgatgtaccgattgcaagggagtctatccgcgcagttggaaaaatagcactgcagcagtatgatgttaatgctattgtggacaggcttctacaatttcttgaaatggataaggattatgtgactgctgaaactctagtcttggtaaaagatcttctcagaaaatatcctcaatggagccatgattgtatagctgttgttggaaatatcagcagcaaaaacatccaggagcccaaaggaaaagcagctctcatatggatgttgggagaatattcacaagacatgcatgatgctccatacatccttgaaaatcttgttgaaaactgggatgaagagcactctcctgaggttcgcttgcatctcctgacagcagtgatgaaatgtttctttaaaagacctccagagacacaaaaggcattaggagctacattatcagctggtctatctgacacccagcaggatgttcatgacagagcacttttctactacaggcttttgcaatacaatcctaatgtagcagaacgtgtagtaaaccctcccaaacaagctgtctctgtatttgcagatacacagagcagtgaaaccaaagatcggatatttgatgagttcaacagtctatcagttgtatatcagaagccatcttacatgtttacagatagggagcatcgtgagccatttgaatactcagaggatcttacaagcttgactgttggggcagaggatccagaaaatgtaatttctgcccaaagatatcaagaaaacgataatgatcttttgctaagtacttcagataaagaggacaatggtacaagagccagcaatggttcttctacctctgcatacaatgctccttctgatttgattagcccttcattgataagctcccaaacaccagctgaaacttcactagtaaatactggtgggccgacacattcctcacaatcaaacttcagtctcgatgaccttcttggcattggcgttactgaagctcctgctccaacaccaccagcactgacccttaactcgaagcctgtgctagatcctggtacgttccagaggaaatggggccagctagcattggcgctgtctcaggaatgctctttgagtccacaaggagcagcttcattgatgaatccccaatcactcatccgtcatatgcaaagcaattacatccaatgtattgcttcaggtggtcagcctccgaactacaagttctttttctatgctcagaaagatggggctactgctttcttccttgttgaatgtattgtcaacacagcatcagcgaaggcacagctcaaaattaaggctgatgatgggactgctgctgaggcattctcgactttgtttcagtcagccttgtccaaatttgggctttcttgatcctgagtattttgtctgagcgattcactggtccacaatttttttccggcgttcacagttttgcccccactctgccgcggtgccgcctaagcttgtccagtacttgatcaatttgttggagaatcagcgtagaaggtgcgattagagggcaatatattattatcactaaattcagcaagagagcaatggagttttgcggagtaaaatcttatttgtattaattgggtgaactgtgcatttgtacatgactacatgtcatctagataaatagctaggttatttaggattgtgctagtgtgatgccttgacttcttctgaagggccttctttttcttgaaggatgtagaaacaacacacacctccccctttcatgtatgctgtacttacctttctttcttgcacaggtgaccaataaagatgtttcttccattttgattcacattaagggcctgcttgttt

SEQ ID NO: 37188 - DNA, 3094 bp, Zea Mays
ctgtcagcctctagtgccaccccgaactcccagacaccacggctcgtcacagtcgtcttcctcctcaggcgaggccagatccaacctgccgcggccgaccactgccatggctcccaccgtcccttcggcggcgaagtccgcttctccttcccaaccctccgggaagagcgaggtgacggatctgaagcagcagctgcggcagcttgccgggagccgcgctcccgatgcggacgcccagcgtcgtgatgtattcaagagggtgatctcctgcatgacggccggcatcgacgtgtcggccgcgttcggggagatggtcctctgctccgccacctccgacgtcgtaaccaagaagatgtgctatctctatgtaggcgcccacgcgcgcgcgcacccggacctagccctcctcaccattaacttcctccagcgggactgccaagatcaggaccccaccatccgcggcctcgctctccgcagtctctgctccctccgtgtccccaatcttgtcgagtatctcgtcacgccactcacgaccgggctgaaggaccccagcgcctacgtgcggatgattgctgctgttggtgctgccaagttgtatcacatatctgccaccgcctgcattgatgctgaccttcctgcttcgctcaaggcgctcatgctatccgatccagacgcacaggtagttgccaattgcctgcatgcattgcaagagatctgggccctagaagctgctaaatcagaagcagctgcaagagagattgagacattgcatagcaaaccagtggtattttacctgttaaacaagatcaaggagttcagtgaatgggcgcagtgcattgttcttgagttggcatcaaagttccttccatctgataataatgaaatatttgacattatgaatttgctggaggatagacttcagcatgcaaatggagcagttgttttggcaacaattaaagtttttctccatttgacaatgtctatgactgatgttcatcaacaggtgcacatgttactcccagagaggtttatgaacgtattaaagcacccttgcttactctggtgggtgctggcagtcctgaacagtcatactctgtgctatgccatctacatcttctggtgatgcgtgctccaatgttattttcctcagactataaaagcttctactgccaatttagtgatccttcatacgtgaagaagttgaaacttgagatgttgactgctatagcaaatgaaagcaacacatatgagattgtcaccgaactgtgtgaatacgctgggaatgttgatgtaccgattgcaagggagtctatccgcgcagttggaaaaatagcactgcagcagtatgatgttaatgctattgtggacaggcttctacaatttcttgaaatggataaggattatgtgactgctgaaactctagtcttggtaaaagatcttctcagaaaatatcctcaatggagccatgattgtatagctgttgttggaaatatcagcagcaaaaacatccaggagcccaaaggaaaagcagctctcatatggatgttgggagaatattcacaagacatgcatgatgctccatacatccttgaaaatcttgttgaaaactgggatgaagagcactctcctgaggttcgcttgcatctcctgacagcagtgatgaaatgtttctttaaaagacctccagagacacaaaaggcattaggagctacattatcagctggtctatctgacacccagcaggcttttgcaatacaatcctaatgtagcagaacgtgtagtaaaccctcccaaacaagctgtctctgtatttgcagatacacagagcagtgaaaccaaagatcggatatttgatgagttcaacagtctatcagttgtatatcagaagccatcttacatgtttacagatagggagcatcgtgagccatttgaatactcagaggatcttacaagcttgactgttggggcagaggatccagaaaatgtaatttctgcccaaagatatcaagaaaacgataatgatcttttgctaagtacttcagataaagaggacaatggtacaagagccagcaatggttcttctacctctgcatacaatgctccttctgatttgattagcccttcattgataagctcccaaacaccagctgaaacttcactagtaaatactggtgggccgacacattcctcacaatcaaacttcagtctcgatgaccttcttggcattggcgttactgaagctcctgctccaacaccaccagcactgacccttaactcgaagcctgtgctagatcctggtacgttccagaggaaatggggccagctagcattggcgctgtctcaggaatgctctttgagtccacaaggagcagcttcattgatgaatccccaatcactcatccgtcatatgcaaagcaattacatccaatgtattgcttcaggtggtcagcctccgaactacaagttctttttctatgctcagaaagatggggctactgctttcttccttgttgaatgtattgtcaacacagcatcagcgaaggcacagctcaaaattaaggctgatgatgggactgctgctgaggcattctcgactttgtttcagtcagccttgtccaaatttgggctttcttgatcctgagtattttgtctgagcgattcactggtccacaatttttttccggcgttcacagttttgcccccactctgccgcggtgccgcctaagcttgtccagtacttgatcaatttgttggagaatcagcgtagaaggtgcgattagagggcaatatattattatcactaaattcagcaagagagcaatggagttttgcggagtaaaatcttatttgtattaattgggtgaactgtgcatttgtacatgactacatgtcatctagataaatagctaggttatttaggattgtgctagtgtgatgccttgacttcttctgaagggccttctttttcttgaaggatgtagaaacaacacacacctccccctttcatgtatgctgtacttacctttctttcttgcacaggtgaccaataaagatgtttcttccattttgattcacattaagggcctgcttgttt

SEQ ID NO: 37189 - DNA, 2693 bp, Zea Mays
acaacagaggtctctctactctagtccacaagagccgctcctccgcctcccgttgtcccctccaccagtcctcttcgggcctcagccttctcccccttacccctctccacacggcgtcgccccctcccatttcgccggcatcgacgatgaacggcggcggcgggcggcggcggtactcctcggagcagctcctcttcgacgttccgtccaatgccggtgccggccggtgggcacagcagtttcaagtaccagggatgtatgatggtgcccaaaagtttggctatggaggaggtctagatgaatctgatatgagattcacagcaaacaagctgatgagcaagtctgctgtttttcctgatggtaactacctgaaggccttcacagagaaagagaaggcagcacctgtcgcgaaaatcaaagtggtggtgcgcaaaagaccacttaacaagaaggaagtatcaaagaaggaagaagatatcatagacattgaacaaagatcaaactctttgactgtacatgagactaaacttaaggttgatcttactgaatatgtcgaaaagcatgagtttgtattcgatgccgtcttagatgaagatgtttcaaatgatgaggtttatcgtgaaacagtggagcctgtggttccttcaatttttaatcgaacaaaggcaacttgttttgcttatgggcaaactggcagtggaaagacatataccatgcgtccccttcctcttaaggcttcccaagatatcttgaggttaatgcaccatgcatatcgaaatcaaggatttcaattgcatgttagcttctttgagatatatggtggcaaattatttgaccttctcaatgataggagcaaactttgcatgagagaggatgcaaagcaaaaggtttgtattgttggtttgcaagagtatagagtgtccgatgtagagactatcaaggagttgattgaaaaaggcagtgctaccagaagtactggcacaaccggtgcaaatgaagagtcctcaaggtctcatgccattcttcagcttgctattaaacgccgtgtggatggcaatgactccaaaccacccagacctgttggcaagctgtcatttattgaccttgctggcagcgagcgtggtgctgatacatctgacaatgataaacaaacaagaattgagggtgctgagatcaataaaagtttgcttgctttaaaggaatgcattagagcacttgataacgatcagactcacattcctttccgaggtagcaaattaactgaagtcctgcgtgactcattcattggagactcacgcactgtcatgatatcatgcatttctcctagttctggctcttgtgagcatactctgaacacattgagatatgcagacaggtgagtacttttctccattgtttctgttgctataactgctcatattcttataatatgcacaagacattctcattttttagagtgaagagtttgtcaaagggaagcaatgccaagaaagatgtgtctttggcagtgcctttaagagagtcgagcccttccccactgccttcagttgtaccctcattctctgcatctgaggtgatgaatgatatcaccgagagaaacaattttggttggcccaagcagcagtatgttaaagaacggcctgctccgacatttgttgaacgaatgcccaaagtgaaggatgccgtggagttcgcaacatcagacggtgcttatttgaagggacaaagaagccagggctgtatggcaccaaatatagctgaaataccggatacaatgtaccagcagagaaggcaaccagcaaggaaggctaaagataccgctttgcggaataatatgagaaattccgttgcttacccaactagaagtgttgagccagacgaagatgatcatctgaataatcttctccaggaagaggaaggcttggttagtgctcatagggagcaggttgaagcgactctggacatcctcaaagaggaaatgaacatattaggcgaagcggatcagcctggcttccaacttgacgactacaacattacgagactaagcagtatactctcgcagaaggcggctgggattgtggacctacaggctcggttggagcagttccagaggcttttggatgagaacaatgtgctgctatatgctcagagcccccggttgtagttccatctgttgccttcatggcaccgtaaaaggtgggcatcggtggcttctaccagcgcctcaggtggcatcatatgcggtatcggcatgtcgctgtggccatgacccatgatgctgcaatttgtttttaacccataggtgccggtgaaacgcaaactagatggctagttcacagcctgttgccatggttctttggcatggccggccccgcaacctattttgtactagagttgctccattcttgtctttccgcgctccatccttaatccaatgtgtatatcttgtatttgtccgtgtcacatgagtgctctgttatttgtagctcaacaaatacatttttttacctttctgatgtatgaagttttccagagtgtacggtatcatccagttacacacatacttttgccaagtactccgtaattacgtctgtttttttatatcaaaggatactacaggggaggtccctacaggaattttttatttgaagagaatatatgtactccttatgtctgttgacgtttattctacg

SEQ ID NO: 37190 - DNA, 2782 bp, Zea Mays
agacaacagaggtctctctactctagtccacaagagccgctcctccgcctcccgttgtcccctccaccagtcctcttcgggcctcagccttctcccccttacccctctccacacggcgtcgccccctcccatttcgccggcatcgacgatgaacggcggcggcgggcggcggcggtactcctcggagcagctcctcttcgacgttccgtccaatgccggtgccggccggtgggcacagcagtccggtggagtgcggcgcggggacggagagatcttcgtgtcggtggagccagcaacgccggcgcggctgcgcggaggggacgccgcggctggggactcgccgggacagaggcagcagctcagtcccgggttgctcgatctccatgctttcgacacggagctaatcccggattttcaagtaccagggatgtatgatggtgcccaaaagtttggctatggaggaggtctagatgaatctgatatgagattcacagcaaacaagctgatgagcaagtctgctgtttttcctgatggtaactacctgaaggccttcacagagaaagagaaggcagcacctgtcgcgaaaatcaaagtggtggtgcgcaaaagaccacttaacaagaaggaagtatcaaagaaggaagaagatatcatagacattgaacaaagatcaaactctttgactgtacatgagactaaacttaaggttgatcttactgaatatgtcgaaaagcatgagtttgtattcgatgccgtcttagatgaagatgtttcaaatgatgaggtttatcgtgaaacagtggagcctgtggttccttcaatttttaatcgaacaaaggcaacttgttttgcttatgggcaaactgtggaaagacatataccatgcgtccccttcctcttaaggcttcccaagatatcttgaggttaatgcaccatgcatatcgaaatcaaggatttcaattgcatgttagcttctttgagatatatggtggcaaattatttgaccttctcaatgataggagcaaactttgcatgagagaggatgcaaagcaaaaggtttgtattgttggtttgcaagagtatagagtgtccgatgtagagactatcaaggagttgattgaaaaaggcagtgctaccagaagtactggcacaaccggtgcaaatgaagagtcctcaaggtctcatgccattcttcagcttgctattaaacgccgtgtggatggcaatgactccaaaccacccagacctgttggcaagctgtcatttattgaccttgctggcagcgagcgtggtgctgatacatctgacaatgataaacaaacaagaattgagggtgctgagatcaataaaagtttgcttgctttaaaggaatgcattagagcacttgataacgatcagactcacattcctttccgaggtagcaaattaactgaagtcctgcgtgactcattcattggagactcacgcactgtcatgatatcatgcatttctcctagttctggctcttgtgagcatactctgaacacattgagatatgcagacagagtgaagagtttgtcaaagggaagcaatgccaagaaagatgtgtctttggcagtgcctttaagagagtcgagcccttccccactgccttcagttgtaccctcattctctgcatctgaggtgatgaatgatatcaccgagagaaacaattttggttggcccaagcagcagtatgttaaagaacggcctgctccgacatttgttgaacgaatgcccaaagtgaaggatgccgtggagttcgcaacatcagacggtgcttatttgaagggacaaagaagccagggctgtatggcaccaaatatagctgaaataccggatacaatgtaccagcagagaaggcaaccagcaaggaaggctaaagataccgctttgcggaataatatgagaaattccgttgcttacccaactagaagtgttgagccagacgaagatgatcatctgaataatcttctccaggaagaggaaggcttggttagtgctcatagggagcaggttgaagcgactctggacatcctcaaagaggaaatgaacatattaggcgaagcggatcagcctggcttccaacttgacgactacaacattacgagactaagcagtatactctcgcagaaggcggctgggattgtggacctacaggctcggttggagcagttccagaggcttttggatgagaacaatgtgctgctatatgctcagagcccccggttgtagttccatctgttgccttcatggcaccgtaaaaggtgggcatcggtggcttctaccagcgcctcaggtggcatcatatgcggtatcggcatgtcgctgtggccatgacccatgatgctgcaatttgtttttaacccataggtgccggtgaaacgcaaactagatggctagttcacagcctgttgccatggttctttggcatggccggccccgcaacctattttgtactagagttgctccattcttgtctttccgcgctccatccttaatccaatgtgtatatcttgtatttgtccgtgtcacatgagtgctctgttatttgtagctcaacaaatacatttttttacctttctgatgtatgaagttttccagagtgtacggtatcatccagttacacacatacttttgccaagtactccgtaattacgtctgtttttttatatcaaaggatactacaggggaggtccctacaggaattttttatttgaagagaatatatgtactccttatgtctgttgacgtttattctacg

SEQ ID NO: 37191 - DNA, 632 bp, Zea Mays
ctcacttatatatgagaaggaagaaaaacttgatggtgatgctgcattgaacaaattcttccgtgacatctacaaggatgctgatgaagatatgcggagggccatgatgaagtcattcgtggaatcaaatggcactgttctctcaaccaattggaaagatgttggagcaaagaaggtagaagggagcccccctgatggtatggagctcaagaagtgggaatactaaagtttggactgcccatcttttgtaaatccaggtcttggaaactatgacctaattccgtccacccatagtgccatgagcttgcttggttaagtctctgcttttgtaagctttctgtatgacagtctagcgtgtgtctgagtgctacttgccgtagcttttgatggacataggtatgctattatgtggtatcgaccgggaaccatctgtggtatcaaagacagcaaactataatgtatggaatgcctattctttttggtctaagatgtttttcttgtcagcgtagtgtgatcttcacaactgaataatagaaactatgcagggacctatgttacagtggtccaccgttggcacagttgcatttgcgtctctttggtggatgaattgaatttatgggaaaattgatttc

SEQ ID NO: 37192 - DNA, 732 bp, Zea Mays
caccttttaagtgctaactctgaattgtggctgaaacagccccaagaccttcatacccatcttcaaaggcgaaaaaagactgggataaactggaagctgaagtcaaaaaggaggagaaggaagaaaaacttgatggtgatgctgcattgaacaaattcttccgtgacatctacaaggatgctgatgaagatatgcggagggccatgatgaagtcattcgtggaatcaaatggcactgttctctcaaccaattggaaagatgttggagcaaagaaggtagaagggagcccccctgatggtatggagctcaagaagtgggaatactaaagtttggactgcccatcttttgtaaatccaggtcttggaaactatgacctaattccgtccacccatagtgccatgagcttgcttggttaagtctctgcttttgtaagctttctgtatgacagtctagcgtgtgtctgagtgctacttgccgtagcttttgatggacataggtatgctattatgtggtatcgaccgggaaccatctgtggtatcaaagacagcaaactataatgtatggaatgcctattctttttggtctaagatgtttttcttgtcagcgtagtgtgatcttcacaactgaataatagaaactatgcagggacctatgttacagtggtccaccgttggcacagttgcatttgcgtctctttggtggatgaattgaatttatgggaaaattgatttc

SEQ ID NO: 37193 - DNA, 1365 bp, Zea Mays
gttccctaactgccatgtcgcgatgtgtgttgtaagaggctgtggcggatgctaacaaagcaattgagcttgatcctatgatgcataaagcttactaccggaaaggtgctgcatgcattaagcttgaagaataccaaactgcaaaggctgctcttgagttgggttcttcttatgcatcaggcgattcaaggtttgctcgtctattgaaggaatgtgatgagcgcatcgctgaggaatctagccaggcaccagtaaagaatgttgaggctactgtggctgctactattgaggacaaggaggatttcacaaatatggagaatacaccaccagtgatagaacccccaagcaaaccaaaatacaggcatgactactacaacagtgccacagaagtggtactgacaatatttgctaagggtgttcctgctgatagtgtagtcattgattttggtgaacagatgttgagtgtatccattgaagttcctggtgaagaaccataccattttcagccccgtctgttttctaagattatccctgagaaatgcaaatatcaagtcttatccaccaaggtcgaaatacgccttgcaaaagctgagcaggtgacatggacaaccctggattatagtggaagaccaaagactgttccccagaagataagcacgccagctgaaacagccccaagaccttcatacccatcttcaaaggcgaaaaaagactgggataaactggaagctgaagtcaaaaaggaggagaaggaagaaaaacttgatggtgatgctgcattgaacaaattcttccgtgacatctacaaggatgctgatgaagatatgcggagggccatgatgaagtcattcgtggaatcaaatggcactgttctctcaaccaattggaaagatgttggagcaaagaaggtagaagggagcccccctgatggtatggagctcaagaagtgggaatactaaagtttggactgcccatcttttgtaaatccaggtcttggaaactatgacctaattccgtccacccatagtgccatgagcttgcttggttaagtctctgcttttgtaagctttctgtatgacagtctagcgtgtgtctgagtgctacttgccgtagcttttgatggacataggtatgctattatgtggtatcgaccgggaaccatctgtggtatcaaagacagcaaactataatgtatggaatgcctattctttttggtctaagatgtttttcttgtcagcgtagtgtgatcttcacaactgaataatagaaactatgcagggacctatgttacagtggtccaccgttggcacagttgcatttgcgtctctttggtggatgaattgaatttatgggaaaattgatttc

SEQ ID NO: 37194 - DNA, 1420 bp, Zea Mays
actttttcgcgaagtttgtgttgtgattgcgccgttacgttacgtgaagaagacggatcttctacaagctgacggaagggcggatcgtgaaattgcgagttgcgacgccgtcattacaaatacgttatctgttcatccgtcaagccgtcagatctcccggcctgaggattcgattattctgttcgctctcgcccaagtcatcgtctggtcgtcgcccgcagaggcgcagacgcccaaaaccggaaggggcgccatggccgcgtcggatctggagagcaaggccaaggaggccttcgtcgacgacgacttcgagctggccaccgagctctacagccaggccatcgacgccgggcccgccaccgccgacctctatgccgaccgcgcccaggcgcacatcaagctcggcaactacactggcatgactactacaacagtgccacagaagtggtactgacaatatttgctaagggtgttcctgctgatagtgtagtcattgattttggtgaacagatgttgagtgtatccattgaagttcctggtgaagaaccataccattttcagccccgtctgttttctaagattatccctgagaaatgcaaatatcaagtcttatccaccaaggtcgaaatacgccttgcaaaagctgagcaggtgacatggacaaccctggattatagtggaagaccaaagactgttccccagaagataagcacgccagctgaaacagccccaagaccttcatacccatcttcaaaggcgaaaaaagactgggataaactggaagctgaagtcaaaaaggaggagaaggaagaaaaacttgatggtgatgctgcattgaacaaattcttccgtgacatctacaaggatgctgatgaagatatgcggagggccatgatgaagtcattcgtggaatcaaatggcactgttctctcaaccaattggaaagatgttggagcaaagaaggtagaagggagcccccctgatggtatggagctcaagaagtgggaatactaaagtttggactgcccatcttttgtaaatccaggtcttggaaactatgacctaattccgtccacccatagtgccatgagcttgcttggttaagtctctgcttttgtaagctttctgtatgacagtctagcgtgtgtctgagtgctacttgccgtagcttttgatggacataggtatgctattatgtggtatcgaccgggaaccatctgtggtatcaaagacagcaaactataatgtatggaatgcctattctttttggtctaagatgtttttcttgtcagcgtagtgtgatcttcacaactgaataatagaaactatgcagggacctatgttacagtggtccaccgttggcacagttgcatttgcgtctctttggtggatgaattgaatttatgggaaaattgatttc

SEQ ID NO: 37195 - DNA, 1721 bp, Zea Mays
actttttcgcgaagtttgtgttgtgattgcgccgttacgttacgtgaagaagacggatcttctacaagctgacggaagggcggatcgtgaaattgcgagttgcgacgccgtcattacaaatacgttatctgttcatccgtcaagccgtcagatctcccggcctgaggattcgattattctgttcgctctcgcccaagtcatcgtctggtcgtcgcccgcagaggcgcagacgcccaaaaccggaaggggcgccatggccgcgtcggatctggagagcaaggccaaggaggccttcgtcgacgacgacttcgagctggccaccgagctctacagccaggccatcgacgccgggcccgccaccgccgacctctatgccgaccgcgcccaggcgcacatcaagctcggcaactacactgcaattgagcttgatcctatgatgcataaagcttactaccggaaaggtgctgcatgcattaagcttgaagaataccaaactgcaaaggctgctcttgagttgggttcttcttatgcatcaggcgattcaaggtttgctcgtctattgaaggaatgtgatgagcgcatcgctgaggaatctagccaggcaccagtaaagaatgttgaggctactgtggctgctactattgaggacaaggaggatttcacaaatatggagaatacaccaccagtgatagaacccccaagcaaaccaaaatacaggcatgactactacaacagtgccacagaagtggtactgacaatatttgctaagggtgttcctgctgatagtgtagtcattgattttggtgaacagatgttgagtgtatccattgaagttcctggtgaagaaccataccattttcagccccgtctgttttctaagattatccctgagaaatgcaaatatcaagtcttatccaccaaggtcgaaatacgccttgcaaaagctgagcaggtgacatggacaaccctggattatagtggaagaccaaagactgttccccagaagataagcacgccagctgaaacagccccaagaccttcatacccatcttcaaaggcgaaaaaagactgggataaactggaagctgaagtcaaaaaggaggagaaggaagaaaaacttgatggtgatgctgcattgaacaaattcttccgtgacatctacaaggatgctgatgaagatatgcggagggccatgatgaagtcattcgtggaatcaaatggcactgttctctcaaccaattggaaagatgttggagcaaagaaggtagaagggagcccccctgatggtatggagctcaagaagtgggaatactaaagtttggactgcccatcttttgtaaatccaggtcttggaaactatgacctaattccgtccacccatagtgccatgagcttgcttggttaagtctctgcttttgtaagctttctgtatgacagtctagcgtgtgtctgagtgctacttgccgtagcttttgatggacataggtatgctattatgtggtatcgaccgggaaccatctgtggtatcaaagacagcaaactataatgtatggaatgcctattctttttggtctaagatgtttttcttgtcagcgtagtgtgatcttcacaactgaataatagaaactatgcagggacctatgttacagtggtccaccgttggcacagttgcatttgcgtctctttggtggatgaattgaatttatgggaaaattgatttc

SEQ ID NO: 37196 - DNA, 411 bp, Zea Mays
atggcggggaatgcgaggatgactaggagcacggcgagcaagacgacccgagacaaacctgccaccgtcgtcgagcaccgtgaggtccacctagtcatcgtcgttcgagccgcatcgtccccggtggctgcacgcccgtcctcctcgtcggtggttgcgcggtcgtccgtgcagccggcagttgcgcgagctctttttctccttctgatgagttgtcgtgtctgcgtccccggtggctgcgcgcccgtcctccttgttggtggtcgcgcggtcgtcttcgtccagccggcagtcacgcgtgctcttctcctccttccgacgagctatcgtgcctgtgtccctagtggctgcgcgtccgtcctactcctcggtggccgcgcggtcgtctccgtccagccggcagccgcgtga

SEQ ID NO: 37197 - DNA, 258 bp, Zea Mays
atgcaaagtaaatatatgacccggtgtcgattctctgacaggtgtgccgtcgaacgcaacgcaacggtgtgcaacctaacgcactgcgaacgcccgagaggtccctgtaaaatgtttgatggacccaatcagtggtttggaggcaccaaaatgcctcaacctataaacgcccgacggggcgtctccaggaacggtccattccagcgtcgcaaagcttctcgggctcagcttcgacggtctcgaccacttgaagcgtag

SEQ ID NO: 37198 - DNA, 1021 bp, Zea Mays
gtccgctcctcctcccctcctcttctaccgagtaactgaggttgcctagattcactggcggatcatgcccctcaagggatctgtcgaatccaatcgatccccgagtctacgaaattgaagacacgggtggtaaagaagagtgtcaatccggaatgggacgacgaactcaccctctctatcgaagaccctgctgttcctattagactggaagtttttgacaaggacactttcgtcgatgatacaatgggtaatgcagaggtggacatccgcccattagtcgagattgtgaagatgaaactccaggacgttgccgacagaaccgtggtaaagaaactggtgcccaacagacagaactgcctagccgaggagagctcgatatatatatcggaggggaaggtgaagcaagacatggttgtacggctgaggaacgtagagagcggggaaatagagctccagcttcagtggatcgacctccctggctctaagggtgtatgagtggggggcggctatgagctctgccttgccctgctgttttcgcggatctccaactctttttctacttgaaaagaagaactagtggtttgcgtgcgctcgctcgcgtagagctgtcagttgtatgtaagaagttatgattgcgttggcgtttagtaaaatatcgtcagggagatgtatgtgcatgaacatctgagaatcaagactataaaaatgtgtacaatgcatgtactaaaggagtgtttggtttctatagattaatttttagtccctacattttattccattttagttccaaaattaccaaatatagtaactaaaactttattttaatttctatatttagcaatttatagactaaaatgaaataaaatgtagggactaaacattagtccctataaactaaacaccccctaagttcgtttcgtagacatgctcctcatccaagttaaattaatttctagggttgtcttaagttgcaaaatattaaattgtccaaaatcttgaaaaaagtaagaatgtttatgat

SEQ ID NO: 37199 - DNA, 1164 bp, Zea Mays
atggctgaagatgacatggaactatggaagtgggtgttgcttccgaggatcaggacagtgacgacgatgttgatgaggatagaaaggaacaaatttctcattgattttttgagttgggaagtggcaaccacacttcaagtggtgggaacacaaaaaaacagatgtacaatcaatcctggtgacagctgtaagcctaaatggtattctcctgttggtaggtcattttactctcccaacttagggagacgtcaaaaacttggtgagggattagaaagttggcgtggtttttaccaaagcataaggccgacacagatgggcctttcactgaatattgatatgtcctctactgcatttatcgagcctctccctgtgattgattttgttgctcagcttcttaacagagatatctcagttagaccattatctgattctgatcgcgtgaagattaaaaaagccctaagaggtgtgaaggttgaggtgactggaaacatgcgcagaaaatatcacatttctggcctcacctcacaagcaacaagagagctatcattccctgttgatgatcgtggtactgtgaagactgtggtgcaatacttcatggagacttatggttttagtatccagcacaccactttaccatgcttgcaagtgggcaatcaacaaagaccaaattatctgcctatggaggtttgcaagatagttgaaggacagcattactcaaagagactcaatgagaaacaaatcactgctctactgaaagtgacctgccagcgccctcaagagcgtgagctggacatcttacagggactccgtagtggacttgtggagttgtgggaggcggcaaactgcaggcggtggctggtgtctgcgcggtccggagggcggtggcagactggcagtaggcaccatggcaggcgtctgcgttggcgggctggcggagtcgcggagatgtggaactgtcggcctgccgctgtgcgcctgtgccggtggtcggtggagcgtggaggagtgggcgacgagccgccgctgacgatggcgagtgcaggcaggcggggcagcaagcagcgacaggcgacagcgacatacggacacttcactggagttctggacagtggcagcctggtagtggtcggaggcgggccggcggccacccgcagccggacgtga

SEQ ID NO: 37200 - DNA, 3896 bp, Zea Mays
ctcagctctgcagcagtgcaccctctgttccttgccgcacccaactcgcccccacccacgcgcttgtgatcaacgcgccgcgctcgttctccatacaatttccacttcagtcgaggccacctcctccccctttcggcacgcagccatgggcaaccgtgcgtcgcgccaccaccgccacgccgccgacgcagacgcagcagtaccagcaggccccgccgccgccgaagccgaagccggcggcggacgcgagggcggtggggcgcgtgctggggcggcccatggaggacgtcaaggcgacctacaccttcggccgcgagctcgggcggggccagttcggggtcacctacctcgtcacgcaccgggagactgggcagcgcttcgcctgcaagtccatagccacgcggaagctcgtccaccgcgacgacatcgaggacgtgcgccgggaggtgcagatcatgcaccacctcaccggccaccggaacatcgtcgagctccggggagcctacgaggacaggcgctcggtcaacctcgctatggagctctgcgagggcggggagctcttcgaccgcatcattgccaggggccactacaccgagcgcgctgccgccgcgctttgccgggagatcgtcgccgtcgtccacagctgccactccatgggggtcttccaccgggacctcaagcccgagaacttcctgttcctcaataacaaggaggactccccgctcaaggccacggacttcggcctctccgtcttcttcaagcccgatgcggatgtggaattgacttgacccgattgcctggctggacggtttcagactcagcattactaaaatgagggtctatatatggaaatggcattattcagatatgtccatccttgctgcgtgttctgtatatatgaggcatccagattaactccaaaatatttgactctaaatttgttccaaaggcgacattgtgatggcgttgtagatttgcatcgtttattctttaggcactgcattgtttttgccattggtccttaattgaaggaagcataacagatcaaacttgtgtcaattgcttggtagacccaatgccacatgctcccatgtgagtaggtctgggaaagagataaactgaagcaagccttcattccacaaatgtggagatgctggtttaaccggtgacttggtcactcagtgagacaactctcaccactgcaccagccaccaggcctaccttctcatgtcaaatgcttgcattgcacaacaacaacaacaacatagcttttttgtcccaagctagtcgaggtaggctagatgaaacccacaataaacaaggataggaaaaaaggacaccgaaagggtaaaagaaagatgatataattaagagtaaatataaaaatatacaaagatcatggtttgggcaatcaaaacatggtttgggcacgttgattgctagtctccaagcgcacctatccttagctaattccttggagatattcactccttaagatctctcttaaccgcctcatcccaagtcaatttaggtcgatccctacctctttttacattatcgactcgctctaaaccccttttacgcatcgacgcctcaggaggtcttctttagacatgttcaaacatctcaaccgatgttgaatcaatttcttctcaattggtgccacctcgaccctatcccaaatatcttcgtttcgaactctatccctttttgtgtgcccacaaaactaatgttacatatgcatctctgctacactcaattgttggacatgtcgcatttttgtcggccaacattcagcactgtataacatcgccgtcctatagaacttacctttaagcttttgtggcaccctcttgtcacagaggacgctagaagcatgacaccatttcaactaaacggctgaaattctatgcataacatcttcatgaatgtcaccaatcaccatccttttgaagcatcgatcctatcgaaaagactccttagccacaagttttccattgagggtaacatctccattctcatgtctagtcgcgctgaaattgtacatcatgttctcgatcttagtcctactaagtctgaaaccttttgactccaacatgtgcttccacaactctagtttcctattaacaccttccctactctcatcaactaacaccacaccaaaggatatccccttgtatgtttcttgtgacctcatccatcaccaaagcaaataaataagggctcaatgctgatctttgatgtagtcctattttaattggaaagtcgctagtgtcgccatcacgtgttcggacaaatgcttgccttgcacaaaataggaaattacgtcgtgattttgtcgcataaaatgggatatttactttgcaaaatgttggtttcgtggtggatttcttgcggggtttagttttttctctatatattatccttttttgttttgaaccttaacaagtgaaatgatttgtttatttgcacactgacatgagcaaactgaatgagaatccataatggatgatgcaggggacacgtttaaggatcttgtgggaagtgcatattatgttgctcccgaggtattgaagcggcactatggggcagaggctgacatatggagtgctggggttattctttacatccttttatctggtgttcctcctttttgggcagatttggttaagaagatgctgcgacaagacccaaaagaacgcctgactgctgctgaaattttgaaccacccatggattagagaggatggagaggccccagataagccacttgacattacggtcatcagtagaatgaaacagttcagggcaatgaacaagctcaagaaagttgcattgaaggttgtggcagagaacttatcagatgaagagattatgggcctaaaagaaatgttcagatccctggatactgataacagtgggacaattactcttgaagagctaagatctggtttaccaaaacttggtactaaaatttctgaatcagaaatcaaacagttgatggaggcggctgatgttgatggaaatggtaccattgattacgcggagttcatatcagccacaatgcatttgaatagattggagaaggaagaccgtatactcaaagcttttgaatattttgataaggaccatagcgggtacataacagtagatgagttggaagaagctctgaagaagtatgatatgggagatgataaaacaataaaagagatcattgctgaagtagatacagatcatgatggaagaattaattaccaggagtttgttgccatgatgaggaacaatacccctgagattgttccaaaccggagacgcatgttctaactgtcatgtacaattttattgaatactttcaagaccaatatgcacccttagacataatcctggccccattttcttttgggaacaactgtaaggactcaatatttttttagatcaatttctctgcagccgggacatatttgtaccaaaataggtggtgttatagtgactcgtacttcgatgtttggagcatcatggactcatgggtggcaatgtttattcccattgtactcggagctctgctttttcagagtgttgccacttgtgaattgttctaatgtgttgtggtcttcgaaatcgttcatcgatcagatcaggcaatgccatattactcctgaataaatattagcagtatcgtggttctggattggccttggtgaaatgccgatccatccacgtagttcttttttgggtgaaaatgattagatgaccacccaaagaatcatgtctaggcacctattgtatcctctgcaaaaggttcgtatgtgtaattttgacttgggtttatttcttggagcatattttgacctttagattgtgcttgtcttggatggttccgtcgaacttttttctctt

SEQ ID NO: 37201 - DNA, 4035 bp, Zea Mays
ctcagctctgcagcagtgcaccctctgttccttgccgcacccaactcgcccccacccacgcgcttgtgatcaacgcgccgcgctcgttctccatacaatttccacttcagtcgaggccacctcctccccctttcggcacgcagccatgggcaaccgtgcgtcgcgccaccaccgccacgccaccgagcagcagccagagacgccgacccttcccaagccccagatccagccgccgccgccgccgacgcagacgcagcagtaccagcaggccccgccgccgccgaagccgaagccggcggcggacgcgagggcggtggggcgcgtgctggggcggcccatggaggacgtcaaggcgacctacaccttcggccgcgagctcgggcggggccagttcggggtcacctacctcgtcacgcaccgggagactgggcagcgcttcgcctgcaagtccatagccacgcggaagctcgtccaccgcgacgacatcgaggacgtgcgccgggaggtgcagatcatgcaccacctcaccggccaccggaacatcgtcgagctccggggagcctacgaggacaggcgctcggtcaacctcgctatggagctctgcgagggcggggagctcttcgaccgcatcattgccaggggccactacaccgagcgcgctgccgccgcgctttgccgggagatcgtcgccgtcgtccacagctgccactccatgggggtcttccaccgggacctcaagcccgagaacttcctgttcctcaataacaaggaggactccccgctcaaggccacggacttcggcctctccgtcttcttcaagcccgatgcggatgtggaattgacttgacccgattgcctggctggacggtttcagactcagcattactaaaatgagggtctatatatggaaatggcattattcagatatgtccatccttgctgcgtgttctgtatatatgaggcatccagattaactccaaaatatttgactctaaatttgttccaaaggcgacattgtgatggcgttgtagatttgcatcgtttattctttaggcactgcattgtttttgccattggtccttaattgaaggaagcataacagatcaaacttgtgtcaattgcttggtagacccaatgccacatgctcccatgtgagtaggtctgggaaagagataaactgaagcaagccttcattccacaaatgtggagatgctggtttaaccggtgacttggtcactcagtgagacaactctcaccactgcaccagccaccaggcctaccttctcatgtcaaatgcttgcattgcacaacaacaacaacaacatagcttttttgtcccaagctagtcgaggtaggctagatgaaacccacaataaacaaggataggaaaaaaggacaccgaaagggtaaaagaaagatgatataattaagagtaaatataaaaatatacaaagatcatggtttgggcaatcaaaacatggtttgggcacgttgattgctagtctccaagcgcacctatccttagctaattccttggagatattcactccttaagatctctcttaaccgcctcatcccaagtcaatttaggtcgatccctacctctttttacattatcgactcgctctaaaccccttttacgcatcgacgcctcaggaggtcttctttagacatgttcaaacatctcaaccgatgttgaatcaatttcttctcaattggtgccacctcgaccctatcccaaatatcttcgtttcgaactctatccctttttgtgtgcccacaaaactaatgttacatatgcatctctgctacactcaattgttggacatgtcgcatttttgtcggccaacattcagcactgtataacatcgccgtcctatagaacttacctttaagcttttgtggcaccctcttgtcacagaggacgctagaagcatgacaccatttcaactaaacggctgaaattctatgcataacatcttcatgaatgtcaccaatcaccatccttttgaagcatcgatcctatcgaaaagactccttagccacaagttttccattgagggtaacatctccattctcatgtctagtcgcgctgaaattgtacatcatgttctcgatcttagtcctactaagtctgaaaccttttgactccaacatgtgcttccacaactctagtttcctattaacaccttccctactctcatcaactaacaccacaccaaaggatatccccttgtatgtttcttgtgacctcatccatcaccaaagcaaataaataagggctcaatgctgatctttgatgtagtcctattttaattggaaagtcgctagtgtcgccatcacgtgttcggacaaatgcttgccttgcacaaaataggaaattacgtcgtgattttgtcgcataaaatgggatatttactttgcaaaatgttggtttcgtggtggatttcttgcggggtttagttttttctctatatattatccttttttgttttgaaccttaacaagtgaaatgatttgtttatttgcacactgacatgagcaaactgaatgagaatccataatggatgatgcaggggacacgtttaaggatcttgtgggaagtgcatattatgttgctcccgaggtattgaagcggcactatggggcagaggctgacatatggagtgctggggttattctttacatccttttatctggtgttcctcctttttgggcagagaatgaggatggcatatttgatgctgtcttgcacagtcacattgatttctcttctgatccttggccttcaatatctaatggtgcaaaagatttggttaagaagatgctgcgacaagacccaaaagaacgcctgactgctgctgaaattttgaaccacccatggattagagaggatggagaggccccagataagccacttgacattacggtcatcagtagaatgaaacagttcagggcaatgaacaagctcaagaaagttgcattgaagagaacttatcagatgaagagattatgggcctaaaagaaatgttcagatccctggatactgataacagtgggacaattactcttgaagagctaagatctggtttaccaaaacttggtactaaaatttctgaatcagaaatcaaacagttgatggaggcggctgatgttgatggaaatggtaccattgattacgcggagttcatatcagccacaatgcatttgaatagattggagaaggaagaccgtatactcaaagcttttgaatattttgataaggaccatagcgggtacataacagtagatgagttggaagaagctctgaagaagtatgatatgggagatgataaaacaataaaagagatcattgctgaagtagatacagatcatgatggaagaattaattaccaggagtttgttgccatgatgaggaacaatacccctgagattgttccaaaccggagacgcatgttctaactgtcatgtacaattttattgaatactttcaagaccaatatgcacccttagacataatcctggccccattttcttttgggaacaactgtaaggactcaatatttttttagatcaatttctctgcagccgggacatatttgtaccaaaataggtggtgttatagtgactcgtacttcgatgtttggagcatcatggactcatgggtggcaatgtttattcccattgtactcggagctctgctttttcagagtgttgccacttgtgaattgttctaatgtgttgtggtcttcgaaatcgttcatcgatcagatcaggcaatgccatattactcctgaataaatattagcagtatcgtggttctggattggccttggtgaaatgccgatccatccacgtagttcttttttgggtgaaaatgattagatgaccacccaaagaatcatgtctaggcacctattgtatcctctgcaaaaggttcgtatgtgtaattttgacttgggtttatttcttggagcatattttgacctttagattgtgcttgtcttggatggttccgtcgaacttttttctctt

SEQ ID NO: 37202 - DNA, 4050 bp, Zea Mays
ctcatttcatcgaaaccaattctgccatgtttcataatatcaataatctcccgacacacgtcctctcagctctgcagcagtgcaccctctgttccttgccgcacccaactcgcccccacccacgcgcttgtgatcaacgcgccgcgctcgttctccatacaatttccacttcagtcgaggccacctcctccccctttcggcacgcagccatgggcaaccgtgcgtcgcgccaccaccgccacgccgccgacgcagacgcagcagtaccagcaggccccgccgccgccgaagccgaagccggcggcggacgcgagggcggtggggcgcgtgctggggcggcccatggaggacgtcaaggcgacctacaccttcggccgcgagctcgggcggggccagttcggggtcacctacctcgtcacgcaccgggagactgggcagcgcttcgcctgcaagtccatagccacgcggaagctcgtccaccgcgacgacatcgaggacgtgcgccgggaggtgcagatcatgcaccacctcaccggccaccggaacatcgtcgagctccggggagcctacgaggacaggcgctcggtcaacctcgctatggagctctgcgagggcggggagctcttcgaccgcatcattgccaggggccactacaccgagcgcgctgccgccgcgctttgccgggagatcgtcgccgtcgtccacagctgccactccatgggggtcttccaccgggacctcaagcccgagaacttcctgttcctcaataacaaggaggactccccgctcaaggccacggacttcggcctctccgtcttcttcaagcccgatgcggatgtggaattgacttgacccgattgcctggctggacggtttcagactcagcattactaaaatgagggtctatatatggaaatggcattattcagatatgtccatccttgctgcgtgttctgtatatatgaggcatccagattaactccaaaatatttgactctaaatttgttccaaaggcgacattgtgatggcgttgtagatttgcatcgtttattctttaggcactgcattgtttttgccattggtccttaattgaaggaagcataacagatcaaacttgtgtcaattgcttggtagacccaatgccacatgctcccatgtgagtaggtctgggaaagagataaactgaagcaagccttcattccacaaatgtggagatgctggtttaaccggtgacttggtcactcagtgagacaactctcaccactgcaccagccaccaggcctaccttctcatgtcaaatgcttgcattgcacaacaacaacaacaacatagcttttttgtcccaagctagtcgaggtaggctagatgaaacccacaataaacaaggataggaaaaaaggacaccgaaagggtaaaagaaagatgatataattaagagtaaatataaaaatatacaaagatcatggtttgggcaatcaaaacatggtttgggcacgttgattgctagtctccaagcgcacctatccttagctaattccttggagatattcactccttaagatctctcttaaccgcctcatcccaagtcaatttaggtcgatccctacctctttttacattatcgactcgctctaaaccccttttacgcatcgacgcctcaggaggtcttctttagacatgttcaaacatctcaaccgatgttgaatcaatttcttctcaattggtgccacctcgaccctatcccaaatatcttcgtttcgaactctatccctttttgtgtgcccacaaaactaatgttacatatgcatctctgctacactcaattgttggacatgtcgcatttttgtcggccaacattcagcactgtataacatcgccgtcctatagaacttacctttaagcttttgtggcaccctcttgtcacagaggacgctagaagcatgacaccatttcaactaaacggctgaaattctatgcataacatcttcatgaatgtcaccaatcaccatccttttgaagcatcgatcctatcgaaaagactccttagccacaagttttccattgagggtaacatctccattctcatgtctagtcgcgctgaaattgtacatcatgttctcgatcttagtcctactaagtctgaaaccttttgactccaacatgtgcttccacaactctagtttcctattaacaccttccctactctcatcaactaacaccacaccaaaggatatccccttgtatgtttcttgtgacctcatccatcaccaaagcaaataaataagggctcaatgctgatctttgatgtagtcctattttaattggaaagtcgctagtgtcgccatcacgtgttcggacaaatgcttgccttgcacaaaataggaaattacgtcgtgattttgtcgcataaaatgggatatttactttgcaaaatgttggtttcgtggtggatttcttgcggggtttagttttttctctatatattatccttttttgttttgaaccttaacaagtgaaatgatttgtttatttgcacactgacatgagcaaactgaatgagaatccataatggatgatgcaggggacacgtttaaggatcttgtgggaagtgcatattatgttgctcccgaggtattgaagcggcactatggggcagaggctgacatatggagtgctggggttattctttacatccttttatctggtgttcctcctttttgggcagagaatgaggatggcatatttgatgctgtcttgcacagtcacattgatttctcttctgatccttggccttcaatatctaatggtgcaaaagatttggttaagaagatgctgcgacaagacccaaaagaacgcctgactgctgctgaaattttgaaccacccatggattagagaggatggagaggccccagataagccacttgacattacggtcatcagtagaatgaaacagttcagggcaatgaacaagctcaagaaagttgcattgaaggttgtggcagagaacttatcagatgaagagattatgggcctaaaagaaatgttcagatccctggatactgataacagtgggacaattactcttgaagagctaagatctggtttaccaaaacttggtactaaaatttctgaatcagaaatcaaacagttgatggaggcggctgatgttgatggaaatggtaccattgattacgcggagttcatatcagccacaatgcatttgaatagattggagaaggaagaccgtatactcaaagcttttgaatattttgataaggaccatagcgggtacataacagtagatgagttggaagaagctctgaagaagtatgatatgggagatgataaaacaataaaagagatcattgctgaagtagatacagatcatgatggaagaattaattaccaggagtttgttgccatgatgaggaacaatacccctgagattgttccaaaccggagacgcatgttctaactgtcatgtacaattttattgaatactttcaagaccaatatgcacccttagacataatcctggccccattttcttttgggaacaactgtaaggactcaatatttttttagatcaatttctctgcagccgggacatatttgtaccaaaataggtggtgttatagtgactcgtacttcgatgtttggagcatcatggactcatgggtggcaatgtttattcccattgtactcggagctctgctttttcagagtgttgccacttgtgaattgttctaatgtgttgtggtcttcgaaatcgttcatcgatcagatcaggcaatgccatattactcctgaataaatattagcagtatcgtggttctggattggccttggtgaaatgccgatccatccacgtagttcttttttgggtgaaaatgattagatgaccacccaaagaatcatgtctaggcacctattgtatcctctgcaaaaggttcgtatgtgtaattttgacttgggtttatttcttggagcatattttgacctttagattgtgcttgtcttggatggttccgtcgaacttttttctctt

SEQ ID NO: 37203 - DNA, 315 bp, Zea Mays
atggcaagccgcggcttccgtaccccgagcctccttacgggcgtcccgagctccgccaagctcttggcctcctccctccgctccctcgcccatttctccctcagcctggccggctcgaactcgaacgccgcgcccgcctcccaccggacgaggccgctgcggtcctcaaccccgcctccgacgcgtccctctcccgcgcggctcgaggggagcgtcagcctgggccgctcgatgacgcccgaccccgggaggaacgcgacaaagacgatggcgacgaagaagaaggcagcggcggcggctatccactggagatag

SEQ ID NO: 37204 - DNA, 2742 bp, Zea Mays
ctctgcgtgcgtgcgtgcgtgcgtgcatagctcgtttcgtttgggatcctttcttccggttcttgtttgattcgtggaattactttcgctcgccgtctgttcctcgccgcaagggcgaggtgagccttttgttttcagccttttcatcgtgtgatctgtgatggacgaactcgtacaactcttcttggttcgattggccatacaataaaaaggacattgttgataacttgatactggattttcttccttctcgaacctgtagagggctctgctttatttgattagaccttatatggtttgagtgccacaactgaaactttgcacctaaaacccgaggccaagttcactactttattatatccttccatacacagaaagtggagagacatggatcgtgatgatatagctggtttcgtcagtggaggttgctatgagtcctgaatttctaacccagtatatataacagagttatgatatccagaaggcagacaattgtttcttttcgttttctagttggtttgcatttgatgtttcataattggaatggatacaactactcaaggccttgagtttggtggtggtatcaactctccgaagccatattgctattggagcacaactcaagacactactgtgcacaaagatagtacaccagaggcatattccaccttttctatttccaactcaaaagcgtcaaaaaggaagcaaggtgccatgtctggagcaaaaggtggaaaccctttactcactttgggtctaggctgctcaccaagttcatcttataacagcaagctaagttctggcactgcttgcataacatcatcatctttattaaaggagattgatgaagagtcttcaatagatcttggccttaaccttgggttgtatattggaaatgatattggacactgccaacagaaatcccatgctggttttgaaaatgtgctctcgacaaactctcctaaactggatcttcagttgagtttgtctaccagttcgcctgaatcagttgtcattgatgcaaataggtcaccagatggcttggcgatgccgatggccaattcaccactcgccattgtagaagaaggatcagtaccacatagttgggttttcgagcattcaattgtttcatcatcacatgcttctaaggcaacgcatggctttccattatcaaagaaaaccaatggaggcaatgcctctgtgccttctcatgtcatgtcatcaactatgtttacaagtgtgaaaggtccagttgcctctgcttctgagacaactaactcccaacaacgcaacagtaacgctaaaagctgtcagtttccaggatgtgtgaaaggagcaagaggggcatcagggcgttgcatagcacatggcggcggtaggcgttgccagaaacctggttgtgagaagggcgctgaagggaggacaatctattgcaaggcccatggtggaggcaggagatgtcaatttctcgggtgtacaaagagtgctgaagggcgcacagaccactgcatagctcatggtggtggccgccgctgcagccatgaaggttgctcccgagctgctcgtggaaaatctggcctgtgtatcaagcatggtggtggcaaaaggtgtcagaaggagaactgtaccaaaagtgcagaaggccattctggactctgcattgcccatggtggtggaaggcggtgccagtttccagactgcacaaagggtgctcagggaagcacaaagttctgcaaggcacatggtggaggaaagcgctgcacattcgtcggatgcaccagaggggctgaaggcagcacttcattttgtaagggccatggtggaggcaagcgctgtgcctttcagggcggtggcgtgtgcccaaagagcgtgcatggtggcactcagtattgtgttgcacatggtggtgggaaaaggtgtgctagctttggttgcactaagagtgctagagggcgcacagagtattgtgtgcgccatggaggtggcaagaggtgcaagttcgagagctgcaccaagagtgcgcaggggagcactgatttctgtaaggctcatgggggaggtacacgatgcctgtggggccaggcggacacaagctttggtgctggtgcacagcaatgcgataaatttgttcggagcaagaccggtctctgctcagctcatagtgctttgatccaggaccactgtgttcatggcggtggtacattaggttccgctatctaccagtctgtgcatgtcaaaccgactgagatgatcaatggtgataaaactttactggatccggctatccctgttacaaacagtggtgttcatcctcctgtcctagctcagtctatgatcgatccgctgccagagggcagagttcatggtggtggcctgttggctttactttcgcggggcggaagcagaacaagcgctggtggctcagaattgtgcttcgggcaagatcgtgtggatctgaggctatcaggatctccatgaaactgatgactgcctgcagttttgatccaaattgtgttgctcatgctcgggttccataggatctacccggacgtgtactgtgaatctacccagacgtgtactatgaaaataagagggtagctcctagagcagatgtgttgttttattttagttaattgtttcagtgcatgtaatcacttactttaatgctcatgtttggacttgattaactctcagcaacttaaggttgaaatataatgtgcattttgctgcttattctgctga

SEQ ID NO: 37205 - DNA, 2760 bp, Zea Mays
gtggcctcagcgattttgctgccccccatctcctttttttagcacatcgcttgcgttctctctctggtttcctcctctgctctgcgctccgcttcccaccgctcctcccctgccgtctctcctaccacaaagccgtggcccgtgggcgctgttcgcggcggcgacgggtctctcatctcctctaccctctctcgcgcgcaacggcctaaaaaaaccctagcgactcggtcggcgctcgacttggatcgtgccggggggctaggggcaggggcagctctcttctctcgtcgtcgtccagattagaccttatatggtttgagtgccacaactgaaactttgcacctaaaacccgaggccaagttcactactttattatatccttccatacacagaaagtggagagacatggatcgtgatgatatagctggtttcgtcagtggaggttgctatgagtcctgaatttctaacccagtatatataacagagttatgatatccagaaggcagacaattgtttcttttcgttttctagttggtttgcatttgatgtttcataattggaatggatacaactactcaaggccttgagtttggtggtggtatcaactctccgaagccatattgctattggagcacaactcaagacactactgtgcacaaagatagtacaccagaggcatattccaccttttctatttccaactcaaaagcgtcaaaaaggaagcaaggtgccatgtctggagcaaaaggtggaaaccctttactcactttgggtctaggctgctcaccaagttcatcttataacagcaagctaagttctggcactgcttgcataacatcatcatctttattaaaggagattgatgaagagtcttcaatagatcttggccttaaccttgggttgtatattggaaatgatattggacactgccaacagaaatcccatgctggttttgaaaatgtgctctcgacaaactctcctaaactggatcttcagttgagtttgtctaccagttcgcctgaatcagttgtcattgatgcaaataggtcaccagatggcttggcgatgccgatggccaattcaccactcgccattgtagaagaaggatcagtaccacatagttgggttttcgagcattcaattgtttcatcatcacatgcttctaaggcaacgcatggctttccattatcaaagaaaaccaatggaggcaatgcctctgtgccttctcatgtcatgtcatcaactatgtttacaagtgtgaaaggtccagttgcctctgcttctgagacaactaactcccaacaacgcaacagtaacgctaaaagctgtcagtttccaggatgtgtgaaaggagcaagaggggcatcagggcgttgcatagcacatggcggcggtaggcgttgccagaaacctggttgtgagaagggcgctgaagggaggacaatctattgcaaggcccatggtggaggcaggagatgtcaatttctcgggtgtacaaagagtgctgaagggcgcacagaccactgcatagctcatggtggtggccgccgctgcagccatgaaggttgctcccgagctgctcgtggaaaatctggcctgtgtatcaagcatggtggtggcaaaaggtgtcagaaggagaactgtaccaaaagtgcagaaggccattctggactctgcattgcccatggtggtggaaggcggtgccagtttccagactgcacaaagggtgctcagggaagcacaaagttctgcaaggcacatggtggaggaaagcgctgcacattcgtcggatgcaccagaggggctgaaggcagcacttcattttgtaagggccatggtggaggcaagcgctgtgcctttcagggcggtggcgtgtgcccaaagagcgtgcatggtggcactcagtattgtgttgcacatggtggtgggaaaaggtgtgctagctttggttgcactaagagtgctagagggcgcacagagtattgtgtgcgccatggaggtggcaagaggtgcaagttcgagagctgcaccaagagtgcgcaggggagcactgatttctgtaaggctcatgggggaggtacacgatgcctgtggggccaggcggacacaagctttggtgctggtgcacagcaatgcgataaatttgttcggagcaagaccggtctctgctcagctcatagtgctttgatccaggaccactgtgttcatggcggtggtacattaggttccgctatctaccagtctgtgcatgtcaaaccgactgagatgatcaatggtgataaaactttactggatccggctatccctgttacaaacagtggtgttcatcctcctgtcctagctcagtctatgatcgatccgctgccagagggcagagttcatggtggtggcctgttggctttactttcgcggggcggaagcagaacaagcgctggtggctcagaattgtgcttcgggcaagatcgtgtggatctgaggctatcaggatctccatgaaactgatgactgcctgcagttttgatccaaattgtgttgctcatgctcgggttccataggatctacccggacgtgtactgtgaatctacccagacgtgtactatgaaaataagagggtagctcctagagcagatgtgttgttttattttagttaattgtttcagtgcatgtaatcacttactttaatgctcatgtttggacttgattaactctcagcaacttaaggttgaaatataatgtgcattttgctgcttattctgctga

SEQ ID NO: 37206 - DNA, 2887 bp, Zea Mays
gtggcctcagcgattttgctgccccccatctcctttttttagcacatcgcttgcgttctctctctggtttcctcctctgctctgcgctccgcttcccaccgctcctcccctgccgtctctcctaccacaaagccgtggcccgtgggcgctgttcgcggcggcgacgggtctctcatctcctctaccctctctcgcgcgcaacggcctaaaaaaaccctagcgactcggtcggcgctcgacttggatcgtgccggggggctaggggcaggggcagctctcttctctcgtcgtcgtccagcacagtgacaatactatcggccggtactcctgctggccaggcctagattggataacaacgacattgttgataacttgatactggattttcttccttctcgaacctgtagagggctctgctttatttgattagaccttatatggtttgagtgccacaactgaaactttgcacctaaaacccgaggccaagttcactactttattatatccttccatacacagaaagtggagagacatggatcgtgatgatatagctggtttcgtcagtggaggttgctatgagtcctgaatttctaacccagtatatataacagagttatgatatccagaaggcagacaattgtttcttttcgttttctagttggtttgcatttgatgtttcataattggaatggatacaactactcaaggccttgagtttggtggtggtatcaactctccgaagccatattgctattggagcacaactcaagacactactgtgcacaaagatagtacaccagaggcatattccaccttttctatttccaactcaaaagcgtcaaaaaggaagcaaggtgccatgtctggagcaaaaggtggaaaccctttactcactttgggtctaggctgctcaccaagttcatcttataacagcaagctaagttctggcactgcttgcataacatcatcatctttattaaaggagattgatgaagagtcttcaatagatcttggccttaaccttgggttgtatattggaaatgatattggacactgccaacagaaatcccatgctggttttgaaaatgtgctctcgacaaactctcctaaactggatcttcagttgagtttgtctaccagttcgcctgaatcagttgtcattgatgcaaataggtcaccagatggcttggcgatgccgatggccaattcaccactcgccattgtagaagaaggatcagtaccacatagttgggttttcgagcattcaattgtttcatcatcacatgcttctaaggcaacgcatggctttccattatcaaagaaaaccaatggaggcaatgcctctgtgccttctcatgtcatgtcatcaactatgtttacaagtgtgaaaggtccagttgcctctgcttctgagacaactaactcccaacaacgcaacagtaacgctaaaagctgtcagtttccaggatgtgtgaaaggagcaagaggggcatcagggcgttgcatagcacatggcggcggtaggcgttgccagaaacctggttgtgagaagggcgctgaagggaggacaatctattgcaaggcccatggtggaggcaggagatgtcaatttctcgggtgtacaaagagtgctgaagggcgcacagaccactgcatagctcatggtggtggccgccgctgcagccatgaaggttgctcccgagctgctcgtggaaaatctggcctgtgtatcaagcatggtggtggcaaaaggtgtcagaaggagaactgtaccaaaagtgcagaaggccattctggactctgcattgcccatggtggtggaaggcggtgccagtttccagactgcacaaagggtgctcagggaagcacaaagttctgcaaggcacatggtggaggaaagcgctgcacattcgtcggatgcaccagaggggctgaaggcagcacttcattttgtaagggccatggtggaggcaagcgctgtgcctttcagggcggtggcgtgtgcccaaagagcgtgcatggtggcactcagtattgtgttgcacatggtggtgggaaaaggtgtgctagctttggttgcactaagagtgctagagggcgcacagagtattgtgtgcgccatggaggtggcaagaggtgcaagttcgagagctgcaccaagagtgcgcaggggagcactgatttctgtaaggctcatgggggaggtacacgatgcctgtggggccaggcggacacaagctttggtgctggtgcacagcaatgcgataaatttgttcggagcaagaccggtctctgctcagctcatagtgctttgatccaggaccactgtgttcatggcggtggtacattaggttccgctatctaccagtctgtgcatgtcaaaccgactgagatgatcaatggtgataaaactttactggatccggctatccctgttacaaacagtggtgttcatcctcctgtcctagctcagtctatgatcgatccgctgccagagggcagagttcatggtggtggcctgttggctttactttcgcggggcggaagcagaacaagcgctggtggctcagaattgtgcttcgggcaagatcgtgtggatctgaggctatcaggatctccatgaaactgatgactgcctgcagttttgatccaaattgtgttgctcatgctcgggttccataggatctacccggacgtgtactgtgaatctacccagacgtgtactatgaaaataagagggtagctcctagagcagatgtgttgttttattttagttaattgtttcagtgcatgtaatcacttactttaatgctcatgtttggacttgattaactctcagcaacttaaggttgaaatataatgtgcattttgctgcttattctgctga

SEQ ID NO: 37207 - DNA, 2890 bp, Zea Mays
gtgtggtggtggcctcagcgattttgctgccccccatctcctttttttagcacatcgcttgcgttctctctctggtttcctcctctgctctgcgctccgcttcccaccgctcctcccctgccgtctctcctaccacaaagccgtggcccgtgggcgctgttcgcggcggcgacgggtctctcatctcctctaccctctctcgcgcgcaacggcctaaaaaaaccctagcgactcggtcggcgctcgacttggatcgtgccggggggctaggggcaggggcagctctcttctctcgtcgtcgtccagtgacaatactatcggccggtactcctgctggccaggcctagattggataacaacgacattgttgataacttgatactggattttcttccttctcgaacctgtagagggctctgctttatttgattagaccttatatggtttgagtgccacaactgaaactttgcacctaaaacccgaggccaagttcactactttattatatccttccatacacagaaagtggagagacatggatcgtgatgatatagctggtttcgtcagtggaggttgctatgagtcctgaatttctaacccagtatatataacagagttatgatatccagaaggcagacaattgtttcttttcgttttctagttggtttgcatttgatgtttcataattggaatggatacaactactcaaggccttgagtttggtggtggtatcaactctccgaagccatattgctattggagcacaactcaagacactactgtgcacaaagatagtacaccagaggcatattccaccttttctatttccaactcaaaagcgtcaaaaaggaagcaaggtgccatgtctggagcaaaaggtggaaaccctttactcactttgggtctaggctgctcaccaagttcatcttataacagcaagctaagttctggcactgcttgcataacatcatcatctttattaaaggagattgatgaagagtcttcaatagatcttggccttaaccttgggttgtatattggaaatgatattggacactgccaacagaaatcccatgctggttttgaaaatgtgctctcgacaaactctcctaaactggatcttcagttgagtttgtctaccagttcgcctgaatcagttgtcattgatgcaaataggtcaccagatggcttggcgatgccgatggccaattcaccactcgccattgtagaagaaggatcagtaccacatagttgggttttcgagcattcaattgtttcatcatcacatgcttctaaggcaacgcatggctttccattatcaaagaaaaccaatggaggcaatgcctctgtgccttctcatgtcatgtcatcaactatgtttacaagtgtgaaaggtccagttgcctctgcttctgagacaactaactcccaacaacgcaacagtaacgctaaaagctgtcagtttccaggatgtgtgaaaggagcaagaggggcatcagggcgttgcatagcacatggcggcggtaggcgttgccagaaacctggttgtgagaagggcgctgaagggaggacaatctattgcaaggcccatggtggaggcaggagatgtcaatttctcgggtgtacaaagagtgctgaagggcgcacagaccactgcatagctcatggtggtggccgccgctgcagccatgaaggttgctcccgagctgctcgtggaaaatctggcctgtgtatcaagcatggtggtggcaaaaggtgtcagaaggagaactgtaccaaaagtgcagaaggccattctggactctgcattgcccatggtggtggaaggcggtgccagtttccagactgcacaaagggtgctcagggaagcacaaagttctgcaaggcacatggtggaggaaagcgctgcacattcgtcggatgcaccagaggggctgaaggcagcacttcattttgtaagggccatggtggaggcaagcgctgtgcctttcagggcggtggcgtgtgcccaaagagcgtgcatggtggcactcagtattgtgttgcacatggtggtgggaaaaggtgtgctagctttggttgcactaagagtgctagagggcgcacagagtattgtgtgcgccatggaggtggcaagaggtgcaagttcgagagctgcaccaagagtgcgcaggggagcactgatttctgtaaggctcatgggggaggtacacgatgcctgtggggccaggcggacacaagctttggtgctggtgcacagcaatgcgataaatttgttcggagcaagaccggtctctgctcagctcatagtgctttgatccaggaccactgtgttcatggcggtggtacattaggttccgctatctaccagtctgtgcatgtcaaaccgactgagatgatcaatggtgataaaactttactggatccggctatccctgttacaaacagtggtgttcatcctcctgtcctagctcagtctatgatcgatccgctgccagagggcagagttcatggtggtggcctgttggctttactttcgcggggcggaagcagaacaagcgctggtggctcagaattgtgcttcgggcaagatcgtgtggatctgaggctatcaggatctccatgaaactgatgactgcctgcagttttgatccaaattgtgttgctcatgctcgggttccataggatctacccggacgtgtactgtgaatctacccagacgtgtactatgaaaataagagggtagctcctagagcagatgtgttgttttattttagttaattgtttcagtgcatgtaatcacttactttaatgctcatgtttggacttgattaactctcagcaacttaaggttgaaatataatgtgcattttgctgcttattctgctga

SEQ ID NO: 37208 - DNA, 357 bp, Zea Mays
atttgaacaacccctgcatctccctcgccccgctcccctctctctagcgcctccctgccctcgggcacgaccaaccctttccggcggcgcagctccgcccttggctctcctgcgcgcagctcggcgtggcgtggcccggctccggcgagcggtcgaagaaaccccgacgccaagcaccttccccaccggagcttcgctgacctgctgtccatgttttccctcgccgttcttcatcgtgatggtctggtgagactgtgatccgtttccgagcttcgagggatcgatgatcaagcttggcgaccaagtgatcgaactcttcgagttctacgaggatgaagaccctgagcatctgtttgg

SEQ ID NO: 37209 - DNA, 376 bp, Zea Mays
atttgaacaacccctgcatctccctcgccccgctcccctctctctagcgcctccctgccctcgggcacgaccaacccttttcggcggcgcagctccgcccttggctctcctgcgcgcagctcggcgtggcgtggcccggctccggcgagcggtcgaagaaacccggacgccaagcaccttccccaccggagcttcgctgacctgctgtccatgttttccctcgccgttcttcatcgtgatggtctggtgaggttgtctgcattgcaaccactgctcaggagaagatgaagccgtagaaggagacttccaggagttctaatattacgacgagatttaggcgtgggttagcggcaacccccagtcggctgcctgtgaa

SEQ ID NO: 37210 - DNA, 1815 bp, Zea Mays
ggaacgagatcctctgacgtggggaggagccactgacgcgtgggccccgcgtgtgacagggcccacgtgcagtggcccaactgctctctgcagtacgtcagaggccgaaggtcgaggagctgaagaggcactacgggttgcggttcgtgacgtcgtctctggagaagaaggcggaggccggcatcataagcgccaagctggacgcggactccacgcggccgcgcaccgcgccggcgtacgaggtggcttccggcccacagccgcgccggcccatccggtcgtcgcacctggcctacgaggtggcggcgtcggccgcgtcctacgtccacgcgcgcgcgcgcggcctgctctcgttcggcgcgccgacgcggcagcagcagcaggcagcgggtcagggcaggctgtacaactcgggcgtggccgcgtacatggccgcgtcgacggtgacggcggtggtggccgccgaggacgaggcgcggcaggaggcggcccgcgacctgcggtcgccgctgtcgtcgccgtgcgagtggttcgtgtgcgacgaggcggacgcgcggacgcggtgcctcgtcatccagggctccgactcgctggcgtcgtggcaggccaacctcctgttcgagcccaccgagttcgagggcaccggcgtgctggtgcaccggggcatctacgaggcggccaagggcatctacgagcaggtcatgccggagatcgaggcgcacctgcgggcgcacgcggggcgcgcgccgccgcggctgcggctcacgggccactcgctcggcggcagcctcgcggtgctggtcagcctcatgctgctggcgcgcggcgtggtgacgcccgacgcgctgcacccggtggtcacgttcggggcgccgtccgtgttctgcggcgggaaccgcgtcctggaggccctgggcgtcggcgaggcgcacgtccggtccgtggccatgcaccgcgacatcgtgcccagggccttctcgtgccgctacccgggccacgccatcgcgctgctcaagcgcctcaacggcgtgctccgcacccacccgtgcctcaacacgcacaaggcgctgtacacgcccatgggctccacgtacatcctgcagcccgacagcagcgtgtcgccgcggcacccgtttctccccgagggcgcggcgctgttccggctcgactcggacgacgccggcctccgtggcggcgcggagcgcccgccgagggctctggtggccagcgcgctgcgcgcgttcctcaactcgccgcacccgctcgagacactgagcgacctgtctgcctacggcgcggggggcgccatactccgggaccacgagtccagcaactacttcagggcgctcagcgcgctggccagggcgccgccgcggcgccggaagcaaccggaggtcgtgtggcagctgcccggcgtcgagcggctgcagcagtattggtggccggggatcgccagcaccgtcatccccgcaccgttggccgtcagcaaaaaggagctggtgtccgaggcatagaatttgtacgcttcgttcctttggtgtgctcgcttgagcagtgtacattctttgattctggttccgcacgaggtacataaaaatgcacaacttgttcttttggcgtttaggttcgtgtaaaaattgtaatcatgcatagcataggagcgtgtctggtttggtgtcctggtggccagcaaagatccgcggctgcttaataagacaatgagctttgtcttgggttttatgcgaaggagctcacgagttcaacatgtaaacttgtttcaatgacgccttaaaattccatgaactttgagcaagt

SEQ ID NO: 37211 - DNA, 2651 bp, Zea Mays
cgacgagctcggcaaaggcgatgaacgccgaagatttacaatggagaaccaccactccaccagccgacgcgcgtacagttgcgtcgggcagaggtacaggcgtacagccgtcggatgtcacaatgctgatgtcgagcttagctgattcaatttgggtggagaagggaaggagaaagagaacacaggtcccacatgtaatagcttgaggtccacatgtacgacggacggaaagttaccgtgatgccaattctgagttgaagtggatgtaggaggaaactgagcaatcaatttgggcagcggagcaaagtgaccagactcagggtgcgcttgtaaaaaacccaaaaataaaacactgtgaatacccctattctccatttctccttccgccgccgcacttgtcccctgaccctaggtcaaagtatcgccgacttcgccagccggatcatgtcgaccagcgccaacccgaaactgaagcggcggcgggggggcttgcggaagcagggtcctgggtaccccacggtggccaccacgggggcaatgtttgcccatgaggtgggcgccgaagggccacggagggacacgaggcaaggacccgcgttgcctagggtggttgccacctcgaccaggggaggaggtgccattgagcagggcgctgacggaatggaaggttcggcgtcgaaaactgataggagcgttcacgaggcagttggcgtcgatggcacgtacctcaccgagacacggtttgatcaatgtgccatttctccactgtcactgaaagccatcaaagatgctggatatgagaggatgactcgggtgcaggaggctactctgccaataattcttcaaggaaaggatgttcttgcaaaagcgaagacaggaacagggaaaacagttgcctttttggtactccttgcctaaagcccaactgatcaatttgactgtcgtagcagttttctcagcgatataactactggattaacccatgtgactgagttctaatttcttttagcttccagccatcgaagttctctctgcattacctcgttcaacttctataaatttgctggtgatgtgccctaccagggagcttgcaaaccaattggctgctgaggccaggaagcttctcaagtatcatcgctcactgggtgtgcaggttgtaataggtggcacacggttacctcaagagcaacggagcatgcaagctaacccatgtcagattcttgttgctactcctggaaggctaaaggatcatcttgagaacacgcctggattctccacccgaattagaggtgtcaaggttcttgttctagatgaggctgaccgcctgttggatatgggatttagaagagacattgagaaaataattactttcatccctaaagataggcaaacactgctgttttctgctactgtttcagaagagatccaccaaatttctcacctcgcaatgagaaaggattatgatttcattaacgctgttcaagagggtgatgaggagacacatgcccaggttatagtattctgtactactgcaatggttacaagacttgttgctgaggtactctcccagctaaaactgaatataagagagattcattccagaaagacacaatctgcaagaactaaggtctcagatgaattcaggaagtcaaagggtctcatattagtcagctccgacgtatctgcccgtggtgtagattatcctgatgtcacccttgtcatgcaagttggtctgccagctgatagagaacagtatatacatagactcggaaggactggacggaaaggcaaggaagggcaaggcatcttactactggctccctgggaaatgcattttcttagtacagttaacgatttgtcaatatcagaggctgcaacaccttcggttgattcaagcattcaggcagcagtcaaagacgcagtcagaagagtggagatgaagagcaaggaatcagcctaccaggcatggctggggtactacaactcgcacaaggctaccaaccgtgacaaggccagactcgtgatgctggctgaagagttcagtcagagcattgggctcgcagtcccgccagccattcccaaacaaattctacggaagatgggcctcagcaacgttcctgggctccggtcttcgtaactaaccgtggtgatccagatccagcagaacttgaccagtgcttgtaccagcttgctaaacgctggctcttccaccaccatcgctgcacgtaagtagtttcttacgaagaaccagattctgtagtcatgtcttcaagcatgacggccgcattttatctgagaccgtatcttgacctgttcagtgtccacaacggacaggttcaaacaggccctacgattagtattcaactatgtcatgttttcattcaaaagggcacgggctcgtatcaatcagttccggggaggaaaagaaaatgtatgtatttgctggcactggcagcaccacatgtgagacatgccagttgatatattcattgtgatagtagacttgtcctgctacatttatttccgaagttattggcattgcaattctcgcatgcgtgcatcattcatccatatccatggcaagctgtaggcaaccgttctggcgtcggtttctgtagctacactgttcatgagaaccgtccattatgaac

SEQ ID NO: 37212 - DNA, 2570 bp, Zea Mays
gagctgtgcaggcggcggggcacgctctagctggggaacgacgagctcggcaaaggcgatgaacgccgaagatttacaatggagaaccaccactccaccagccgacgcgcgtacagttgcgtcgggcagaggtacaggcgtacagccgtcggatgtcacaatgctgatgtcgagcttagctgattcaatttgggtggagaagggaaggagaaagagaacacaggtcccacatgtaatagcttgaggtccacatgtacgacggacggaaagttaccgtgatgccaattctgagttgaagtggatgtaggaggaaactgagcaatcaatttgggcagcggagcaaagtgaccagactcagggtgcgcttgtaaaaaacccaaaaataaaacactgtgaatacccctattctccatttctccttccgccgccgcacttgtcccctgaccctaggtcaaagtatcgccgacttcgccagccggatcatgtcgaccagcgccaacccgaaactgaagcggcggcgggggggcttgcggaagcagggtcctgggtaccccacggtggccaccacgggggcaatgtttgcccatgaggtgggcgccgaagggccacggagggacacgaggcaaggacccgcgttgcctagggtggttgccacctcgaccaggggaggaggtgccattgagcagggcgctgacggaatggaaggttcggcgtcgaaaactgataggagcgttcacgaggcagttggcgtcgatggcacgtacctcaccgagacacggtttgatcaatgtgccatttctccactgtcactgaaagccatcaaagatgctggatatgagaggatgactcgggtgcaggaggctactctgccaataattcttcaaggaaaggatgttcttgcaaaagcgaagacaggaacagggaaaacagttgcctttttgcttccagccatcgaagttctctctgcattacctcgttcaacttctataaatttgctggtgatgtgccctaccagggagcttgcaaaccaattggctgctgaggccaggaagcttctcaagtatcatcgctcactgggtgtgcaggttgtaataggtggcacacggttacctcaagagcaacggagcatgcaagctaacccatgtcagattcttgttgctactcctggaaggctaaaggatcatcttgagaacacgcctggattctccacccgaattagaggtgtcaaggttcttgttctagatgaggctgaccgcctgttggatatgggatttagaagagacattgagaaaataattactttcatccctaaagataggcaaacactgctgttttctgctactgtttcagaagagatccaccaaatttctcacctcgcaatgagaaaggattatgatttcattaacgctgttcaagagggtgatgaggagacacatgcccaggtaaaccaaacgtacatggttgcacctctaggtctgcacctccccatattgtatgatgtgttgaagaagcatgttgcagaagatgcagaatacaaagttatagtattctgtactactgcaatggttacaagacttgttgctgaggtactctcccagctaaaactgaatataagagagattcattccagaaagacacaatctgcaagaactaaggtctcagatgaattcaggaagtcaaagggtctcatattagtcagctccgacgtatctgcccgtggtgtagattatcctgatgtcacccttgtcatgcaagttggtctgccagctgatagagaacagtatatacatagactcggaaggactggacggaaaggcaaggaagggcaaggcatcttactactggctccctgggaaatgcattttcttagtacagttaacgatttgtcaatatcagaggctgcaacaccttcggttgattcaagcattcaggcagcagtcaaagacgcagtcagaagagtggagatgaagagcaaggaatcagcctaccaggcatggctggggtactacaactcgcacaaggctaccaaccgtgacaaggccagactcgtgatgctggctgaagagttcagtcagagcattgggctcgcagtcccgccagccattcccaaacaaattctacggaagatgggcctcagcaacgttcctgggctccggtcttcgtaactaaccgtggtgatccagatccagcagaacttgaccagtgcttgtaccagcttgctaaacgctggctcttccaccaccatcgctgcacgttcaaacaggccctacgattagtattcaactatgtcatgttttcattcaaaagggcacgggctcgtatcaatcagttccggggaggaaaagaaaatgtatgtatttgctggcactggcagcaccacatgtgagacatgccagttgatatattcattgtgatagtagacttgtcctgctacatttatttccgaagttattggcattgcaattctcgcatgcgtgcatcattcatccatatccatggcaagctgtaggcaaccgttctggcgtcggtttctgtagctacactgttcatgagaaccgtccattatgaac

SEQ ID NO: 37213 - DNA, 2410 bp, Zea Mays
gagctgtgcaggcggcggggcacgctctagctggggaacgacgagctcggcaaaggcgatgaacgccgaagatttacaatggagaaccaccactccaccagccgacgcgcgtacagttgcgtcgggcagaggtacaggcgtacagccgtcggatgtcacaatgctgatgtcgagcttagctgattcaatttgggtggagaagggaaggagaaagagaacacaggtcccacatgtaatagcttgaggtccacatgtacgacggacggaaagttaccgtgatgccaattctgagttgaagtggatgtaggaggaaactgagcaatcaatttgggcagcggagcaaagtgaccagactcagggtgcgcttgtaaaaaacccaaaaataaaacactgtgaatacccctattctccatttctccttccgccgccgcacttgtcccctgaccctaggtcaaagtatcgccgacttcgccagccggatcatgtcgaccagcgccaacccgaaactgaagcggcggcgggggggcttgcggaagcagggtcctgggtaccccacggtggccaccacgggggcaatgtttgcccatgaggtgggcgccgaagggccacggagggacacgaggcaaggacccgcgttgcctagggtggttgccacctcgaccaggggaggaggtgccattgagcagggcgctgacggaatggaaggttcggcgtcgaaaactgataggagcgttcacgaggcagttggcgtcgatggcacgtacctcaccgagacacggtttgatcaatgtgccatttctccactgtcactgaaagccatcaaagatgctggatatgagaggatgactcgggtgcaggaggctactctgccaataattcttcaaggaaaggatgttcttgcaaaagcgaagacaggaacagggaaaacagttgcctttttgggagcttgcaaaccaattggctgctgaggccaggaagcttctcaagtatcatcgctcactgggtgtgcaggttgtaataggtggcacacggttacctcaagagcaacggagcatgcaagctaacccatgtcagattcttgttgctactcctggaaggctaaaggatcatcttgagaacacgcctggattctccacccgaattagaggtgtcaaggttcttgttctagatgaggctgaccgcctgttggatatgggatttagaagagacattgagaaaataattactttcatccctaaagataggcaaacactgctgttttctgctactgtttcagaagagatccaccaaatttctcacctcgcaatgagaaaggattatgatttcattaacgctgttcaagagggtgatgaggagacacatgcccaggtaaaccaaacgtacatggttgcacctctaggtctgcacctccccatattgtatgatgtgttgaagaagcatgttgcagaagatgcagaatacaaagttatagtattctgtactactgcaatggttacaagacttgttgctgaggaagtcaaagggtctcatattagtcagctccgacgtatctgcccgtggtgtagattatcctgatgtcacccttgtcatgcaagttggtctgccagctgatagagaacagtatatacatagactcggaaggactggacggaaaggcaaggaagggcaaggcatcttactactggctccctgggaaatgcattttcttagtacagttaacgatttgtcaatatcagaggctgcaacaccttcggttgattcaagcattcaggcagcagtcaaagacgcagtcagaagagtggagatgaagagcaaggaatcagcctaccaggcatggctggggtactacaactcgcacaaggctaccaaccgtgacaaggccagactcgtgatgctggctgaagagttcagtcagagcattgggctcgcagtcccgccagccattcccaaacaaattctacggaagatgggcctcagcaacgttcctgggctccggtcttcgtaactaaccgtggtgatccagatccagcagaacttgaccagtgcttgtaccagcttgctaaacgctggctcttccaccaccatcgctgcacgttcaaacaggccctacgattagtattcaactatgtcatgttttcattcaaaagggcacgggctcgtatcaatcagttccggggaggaaaagaaaatgtatgtatttgctggcactggcagcaccacatgtgagacatgccagttgatatattcattgtgatagtagacttgtcctgctacatttatttccgaagttattggcattgcaattctcgcatgcgtgcatcattcatccatatccatggcaagctgtaggcaaccgttctggcgtcggtttctgtagctacactgttcatgagaaccgtccattatgaac

SEQ ID NO: 37214 - DNA, 2315 bp, Zea Mays
gacgccgcgcgccacgacgcagcacgcccaagaaaccccgtgtcctcacaaaaaccctgcctgccggagatggccagcggcgaccttctcctccgcgcccacgccggcgccccggtcctagcgagggccttctcctgccgcctcctagtcccggcgaggcgccgcagcggactaatctcacctctggccgcttccaaggtcggcatcgccgacgtcgttgggcgggtcaggtcgggcggcgccgaccagaagaggcgacgcagggatgcgaaggagggatttgggttctccggggtggccacgaggagagaacttatcgacgacgagaaggtggagcaggacgaggaagatgaagctctcaagttgggagtggagaagaatggtggcgagacgggaggtgtggatggctcgtacctcagtgagacacggtttgatcaatgtgctatttcccctttatcgatgaaagccgtcaaagatgctggatatgaaaggatgactgaggtgcaggaggcaactctgcccataattcttcaaggcaaggatgttcttgcaaaggcaaagacaggaactgggaaaacagttgcctttttgcttccagcgattgaggttctctccactctacctcatcagcggggtcagttacggccacctataaatttgctggtgatgtgccctactagggagcttgcaaaccaagtggctgttgaggccaggaagcttctcaggtatcatcgcacgttgggtgtgcaggttgtaattggtggcacaagattaactcaagagcaacgaagcatgcaagctaacccatgtcagattcttgttgctacaccaggaaggcttaaggatcatcttgagaacacacctgggttttctaccaggctcaagggtgtgaaggttcttgttcttgatgaagctgaccgcctgttggatatgggatttagaagagatattgagaaaataattgcttcaattcctagagaacggcaaacactgttattttctgctactgttccagaagaggtccgccaaatttctcatgtggcaatgaagaaagattataggttcattaacactgttaaagagggtgatgaggagacacatgcacaggtgagccagatgtacatggttgcaccactagacttgcatttttctatcctatatgatgtattgaagaaacatgtcgcagaagatgcagactacaaaaaagtcgcagtctgcaagaactaaggtctcagacgaattcaggaaatcaaaaggtttgatactggtcagttcagacgtatctgcccggggcgttgactatcctgatgtcactcttgtaatacaggttggagttcctgcagatagagagcagtacatacatagactaggccggaccggacggaaaggcaaggaagggcaaggactcctactattggcaccttgggaaaaatattttcttggtgctgttaaggatttgtcaatagcagagtctgctgtaccaccagttgattcaagtgttgagacagaagtcagaaatgcggtcagaaaagtagagatgaagagcaaagaatgtgcctatcaagcatggttagggtactacaactcgaacaagaccattggtcgagataagtccagacttgttcaccttgcagaagagttcagccaaagcatgggtcttgcagttcctccagccataccgagaaacattcttcgcaagatgggccttaacaatgtccctgggcttcgttcatcataatctcgatgtcacgatatcaagcagaagacgtgtgctacagcacagtacatgcatttgaccagccataatgctgttaacttcgtaaacaacacttgttgctggacttaagtaccgcagttaacataagcagattggtttgctgatgacctgaagtttctacaagcatcctcatttccaacccgtacacaagtcctcgggtgtagccagaatatgcattcattttgaagccaaattttgttcggtcgagacatcaacacttcacagagaatgctcaaacagacaaggtgattctacgtatacaaggatttgtcaaaagcatagtgatgtgtatgaagtattaaaagttcgggaagaaaaatgcgctttcctgatttatcgtcatataggggaatgcatgtgttcagtttcaaattctgacgttgtttgtacgcgaatgaaaagaaaggtatagggttgtgtaggggcaacaactactatacaaacaaccgttagatataaacatgcaagcaggtcactcggtctgttagatctagatccaatcatatgttatactaggtgagtgcccgtgcgttgcaac

SEQ ID NO: 37215 - DNA, 2405 bp, Zea Mays
ctcgacgccgcgcgccacgacgcagcacgcccaagaaaccccgtgtcctcacaaaaaccctgcctgccggagatggccagcggcgaccttctcctccgcgcccacgccggcgccccggtcctagcgagggccttctcctgccgcctcctagtcccggcgaggcgccgcagcggactaatctcacctctggccgcttccaaggtcggcatcgccgacgtcgttgggcgggtcaggtcgggcggcgccgaccagaagaggcgacgcagggatgcgaaggagggatttgggttctccggggtggccacgaggagagaacttatcgacgacgagaaggtggagcaggacgaggaagatgaagctctcaagttgggagtggagaagaatggtggcgagacgggaggtgtggatggctcgtacctcagtgagacacggtttgatcaatgtgctatttcccctttatcgatgaaagccgtcaaagatgctggatatgaaaggatgactgaggtgcaggaggcaactctgcccataattcttcaaggcaaggatgttcttgcaaaggcaaagacaggaactgggaaaacagttgcctttttgcttccagcgattgaggttctctccactctacctcatcagcggggtcagttacggccacctataaatttgctggtgatgtgccctactagggagcttgcaaaccaagtggctgttgaggccaggaagcttctcaggtatcatcgcacgttgggtgtgcaggttgtaattggtggcacaagattaactcaagagcaacgaagcatgcaagctaacccatgtcagattcttgttgctacaccaggaaggcttaaggatcatcttgagaacacacctgggttttctaccaggctcaagggtgtgaaggttcttgttcttgatgaagctgaccgcctgttggatatgggatttagaagagatattgagaaaataattgcttcaattcctagagaacggcaaacactgttattttctgctactgttccagaagaggtccgccaaatttctcatgtggcaatgaagaaagattataggttcattaacactgttaaagagggtgatgaggagacacatgcacaggtgagccagatgtacatggttgcaccactagacttgcatttttctatcctatatgatgtattgaagaaacatgtcgcagaagatgcagactacaaagttattatattctgtactactgcaatggtcaccaaacttgtggctgaagttctctcccagctgaaactgaatataagagagattcattccagaaagtcgcagtctgcaagaactaaggtctcagacgaattcaggaaatcaaaaggtttgatactggtcagttcagacgtatctgcccggggcgttgactatcctgatgtcactcttgtaatacaggttggagttcctgcagatagagagcagtacatacatagactaggccggaccggacggaaaggcaaggaagggcaaggactcctactattggcaccttgggaaaaatattttcttggtgctgttaaggatttgtcaatagcagagtctgctgtaccaccagttgattcaagtgttgagacagaaaaatgcggtcagaaaagtagagatgaagagcaaagaatgtgcctatcaagcatggttagggtactacaactcgaacaagaccattggtcgagataagtccagacttgttcaccttgcagaagagttcagccaaagcatgggtcttgcagttcctccagccataccgagaaacattcttcgcaagatgggccttaacaatgtccctgggcttcgttcatcataatctcgatgtcacgatatcaagcagaagacgtgtgctacagcacagtacatgcatttgaccagccataatgctgttaacttcgtaaacaacacttgttgctggacttaagtaccgcagttaacataagcagattggtttgctgatgacctgaagtttctacaagcatcctcatttccaacccgtacacaagtcctcgggtgtagccagaatatgcattcattttgaagccaaattttgttcggtcgagacatcaacacttcacagagaatgctcaaacagacaaggtgattctacgtatacaaggatttgtcaaaagcatagtgatgtgtatgaagtattaaaagttcgggaagaaaaatgcgctttcctgatttatcgtcatataggggaatgcatgtgttcagtttcaaattctgacgttgtttgtacgcgaatgaaaagaaaggtatagggttgtgtaggggcaacaactactatacaaacaaccgttagatataaacatgcaagcaggtcactcggtctgttagatctagatccaatcatatgttatactaggtgagtgcccgtgcgttgcaac

SEQ ID NO: 37216 - DNA, 896 bp, Zea Mays
gttctctttccccttcccttgtccacccaaatttaggccttgttcgtatcggtgggattgggttgttcctggtcttttccgggcgaaatagattgggccggattgaaatttggttggagccgctggaaccgttcgtttgggcctggactggatgtaaacctgacccagttcagattttctcctccttccacggcctggaacaaacactggcacaatcacctccggatcggatcctggctgtagggcacgacgcagcactggcgccgcaggaggtgaagagacggcggcgccgcacaactccgacgatccctacaacaccaattatagttggggaaggtgaacctcctccctcttgggatccggtaccaactccaaaaggttttcccagccgccattctgcgatcacgcctgttctgttttttcctgctgcgatctgcgcttgtgcgatcggccgtcaggttacggcacacaacgacgccggcgtctgtcgtcgtccgcttgatcggcaactgggtagcgtcgcagcgaacgagcgatcttgtcgcctgatccattgatccaactgtgttggaagaacggcgtcgtctgcaaacagcgaggcagagaagcttcgggcgcggcaaagcagcggcgtcttgcgcatagctacggcgggcgtggacagaacagcggcagggcggggagaaaagacaaggtttgatgtgttgtgtttttgtcaataaggttctatgtgcgtttgaattttatttcatatatgcatgtgtttgatgtggttttcaattttgttcaatgtaatcatagttatggagttaatgcaagttttaatttattgtcaaaatagatggatagaagatgggtttatgggaaacaattcacacctgcatatgtgaaaggag

SEQ ID NO: 37217 - DNA, 1517 bp, Zea Mays
cttcaatctctgctggcccctgcttcaatctccccttgtatccaacaaaggctttagctccatttatgctcgaggattatcggaaagtaacgatgggtcagagaggtgaggaaaagcaatatagctacgaagatattcttaggtgtatgaagaaagtcacaccaatggacttgaagcagactgttcaagtagataaagaccttgtgatccgtgcctattatgctggacatgttataggggctgccatgatttatgcaaaagttggggatgctgctatggtatacactggggattacaatatgacaccagatagacatcttggggccgcacagattgatcgtctgaagttggatgtattgataacagagtccacatatgctaaatctatacgtgactcaaagcctgcccgagagagggagtttttaaaagcggtacataaatgtgtttctggtggaggtaaagttctaattccaacgtttgctctgggaagagctcaggaactatgtatgttactggatgactattgggagaggatgggcttgaaagttcctatttatttttcagctggtttaaccattcaagctaatgtgtactacaaaatgttgattgggtggactagtcaaaagatcaaggacagccatacagtgcataatccatttgacttcaagcatgtttgccactttgaacgttccttcattaacaaccctggtccctgtgtactttttgcaacacctggtatgattactgggggattttcccttgaggcgtttaaaaaatgggcaccatcagagaagaatctggttacacttccaggatattgtgtttctggaaccattggtcataagttgatgtgtgggaaacctacaagggttgattacgaggacactcatattgatgtcagatgtcagggaataatgaatccgtctccattccgacaacccagaaccttaaaatgagtgctacagaaaggttcattacaggctgtgctgtggagcaaggtaaacgtagcctgcacaagcggaacctgatttatggtacaggtttgtcagaagagattggcagtgatgaggcggcgggggagggcgttcttctgatgcagaaacacaagtctccgaaaattctttgtgaggatgagctccttgaggtgctgggcatgggtcggcatcttgtccagtttgaaccaatggtctccagaattgtagctgctgttgaatccgagttgcagcgggctaaggcagcggatttagataacgatgggaaatgaatggaacaatataaatgtacattgccataattttggctgattactgtttcacctttctttcccaaaaatgcgagtaatgtcctacaccacttcagcactattactgacaagtctctttaaggtccttgggagttaccaagttatacaatatctagagagctactatcgcataaaatagggatttgttattctgtttgtatagtgaaatttgaaataaaagaagagataggccagctgtcagagacagcctcaa

SEQ ID NO: 37218 - DNA, 2338 bp, Zea Mays
tgatcttggttggggaaaaaaaccccggcctgccaccctacttcatcctcgagtcgacttgtgcgccgccattctccgtcgccgcggtctcgcgggcccgccgccgtcctagccgccctgtccccgccctctccgtctcgcgccccacgcggcccttgtccatcttttccgtcgccggctcgtgcggtccgacgcctgccaccggttcctcctctcgagaaaggcggcggcgcccgagagagcttctttgagggaggataaggcggcgcggagcgtctctgagcggctcaggcccctccggcgctgagctttcctccggcgttgtgtgtgcctgagttgttgactcccaattgaagcgtggtcaaattacctcggctccggtatgggttggagctctttatgggttgctaaagcgtttagagtgtggctctaggcgtggattttcaccaatggcaatcgagtgcctcgtgctaggggcggggcaggaggtgggtaagagctgcgtggtggtgaccatcggcgggaagcgcgtcatgttcgactgcggcatgcacatgggctaccacgacgaccgccactacccggactttgcgcgcgcgctcgctgcctggggggcgcccgacttcaccaccgctatctcctgcgtggtcatcacgcatttccacatggatcatatcggggcactgccctacttcaccgaggtttgcggctaccacggccccatctacatgacgtatccaacaaaggctttagctccatttatgctcgaggattatcggaaagtaacgatgggtcagagaggtgaggaaaagcaatatagctacgaagatattcttaggtgtatgaagaaagtcacaccaatggacttgaagcagactgttcaagtagataaagaccttgtgatccgtgcctattatgctggacatgttataggggctgccatgatttatgcaaaagttggggatgctgctatggtatacactggggattacaatatgacaccagatagacatcttggggccgcacagattgatcgtctgaagttggatgtattgataacagagtccacatatgctaaatctatacgtgactcaaagcctgcccgagagagggagtttttaaaagcggtacataaatgtgtttctggtggaggaactatgtatgttactggatgactattgggagaggatgggcttgaaagttcctatttatttttcagctggtttaaccattcaagctaatgtgtactacaaaatgttgattgggtggactagtcaaaagatcaaggacagccatacagtgcataatccatttgacttcaagcatgtttgccactttgaacgttccttcattaacaaccctggtccctgtgtactttttgcaacacctggtatgattactgggggattttcccttgaggcgtttaaaaaatgggcaccatcagagaagaatctggttacacttccaggatattgtgtttctggaaccattggtcataagttgatgtgtgggaaacctacaagggttgattacgaggacactcatattgatgtcagatgtcagatccatcagctagcattcagtcctcatacagactccaaagggattatggatctgacagaattcctgtcacccaaaaatgtaattctcgttcatggtgaaaagcctcagatggcttttcttaaggagaggatcgaatctgaattggggatgccttgctactacccagggaataatgaatccgtctccattccgacaacccagaaccttaaaatgagtgctacagaaaggttcattacaggctgtgctgtggagcaaggtaaacgtagcctgcacaagcggaacctgatttatggtacaggtttgtcagaagagattggcagtgatgaggcggcgggggagggcgttcttctgatgcagaaacacaagtctccgaaaattctttgtgaggatgagctccttgaggtgctgggcatgggtcggcatcttgtccagtttgaaccaatggtctccagaattgtagctgctgttgaatccgagttgcagcgggctaaggcagcggatttagataacgatgggaaatgaatggaacaatataaatgtacattgccataattttggctgattactgtttcacctttctttcccaaaaatgcgagtaatgtcctacaccacttcagcactattactgacaagtctctttaaggtccttgggagttaccaagttatacaatatctagagagctactatcgcataaaatagggatttgttattctgtttgtatagtgaaatttgaaataaaagaagagataggccagctgtcagagacagcctcaa

SEQ ID NO: 37219 - DNA, 1130 bp, Zea Mays
cttcaatcccccgtatccaacaaaggctttagctccatttatgctcgaggattatcggaaagtaacgatgggtcagagaggtgaggaaaagcaatatagctacgaagatattcttaggtgtatgaagaaagtcacaccaatggacttgaagcagactgttcaagtagataaagaccttgtgatccgtgcctattatgctggacatgttataggggctgccatgatttatgcaaaagttggggatgctgctatggtatacactggggattacaatatgacaccagatagacatcttggggccgcacagattgatcgtctgaagttggatgtattgataacagagtccacatatgctaaatctatacgtgactcaaagcctgcccgagagagggagtttttaaaagcggtacataaatgtgtttctggtggaggtaaagttctaattccaacgtttgctctgggaagagctcaggaactatgtatgttactggatgactattgggagaggatgggcttgaaagttcctatttatttttcagctggtttaaccattcaagctaatgtgtactacaaaatgttgattgggtggactagtcaaaagatcaaggacagccatacagtgcataatccatttgacttcaagcatgtttgccactttgaacgttccttcattaacaaccctggtccctgtgtactttttgcaacacctggtatgattactgggggattttcccttgaggcgtttaaaaaatgggcaccatcagagaagaatctggttacacttccaggatattgtgtttctggaaccattggtcataagttgatgtgtgggaaacctacaagggttgattacgaggacactcatattgatgtcagatgtcaggggtgtgtttgattgcgggacaacttggacagccatgtctcccggcatcccctctctctgtctagttctgacaggcagctgaggacgacggcattgggatggttctatttcaaccctgaccttgaatcaaacaaccttatataagggatcgtcctatcccatcattgcaacaaaacacaccctagatttactccaaccattgcacttttcatttttgatattttttgccccctcatactgagttttt

SEQ ID NO: 37220 - DNA, 1207 bp, Zea Mays
caacaaatggtggccggcgcaggcacggcaacaggcacccggagtgggcgcgtcaccaatcaccattgcgagcgtggtcctgccttcgagtatccaacaaaggctttagctccatttatgctcgaggattatcggaaagtaacgatgggtcagagaggtgaggaaaagcaatatagctacgaagatattcttaggtgtatgaagaaagtcacaccaatggacttgaagcagactgttcaagtagataaagaccttgtgatccgtgcctattatgctggacatgttataggggctgccatgatttatgcaaaagttggggatgctgctatggtatacactggggattacaatatgacaccagatagacatcttggggccgcacagattgatcgtctgaagttggatgtattgataacagagtccacatatgctaaatctatacgtgactcaaagcctgcccgagagagggagtttttaaaagcggtacataaatgtgtttctggtggaggtaaagttctaattccaacgtttgctctgggaagagctcaggaactatgtatgttactggatgactattgggagaggatgggcttgaaagttcctatttatttttcagctggtttaaccattcaagctaatgtgtactacaaaatgttgattgggtggactagtcaaaagatcaaggacagccatacagtgcataatccatttgacttcaagcatgtttgccactttgaacgttccttcattaacaaccctggtccctgtgtactttttgcaacacctggtatgattactgggggattttcccttgaggcgtttaaaaaatgggcaccatcagagaagaatctggttacacttccaggatattgtgtttctggaaccattggtcataagttgatgtgtgggaaacctacaagggttgattacgaggacactcatattgatgtcagatgtcaggggtgtgtttgattgcgggacaacttggacagccatgtctcccggcatcccctctctctgtctagttctgacaggcagctgaggacgacggcattgggatggttctatttcaaccctgaccttgaatcaaacaaccttatataagggatcgtcctatcccatcattgcaacaaaacacaccctagatttactccaaccattgcacttttcatttttgatattttttgccccctcatactgagttttt

SEQ ID NO: 37221 - DNA, 1854 bp, Zea Mays
tcttgatcttggttggggaaaaaaaccccggcctgccaccctacttcatcctcgagtcgacttgtgcgccgccattctccgtcgccgcggtctcgcgggcccgccgccgtcctagccgccctgtccccgccctctccgtctcgcgccccacgcggcccttgtccatcttttccgtcgccggctcgtgcggtccgacgcctgccaccggttcctcctctcgagaaaggcggcggcgcccgagagagcttctttgagggaggataaggcggcgcggagcgtctctgagcggctcaggcccctccggcgctgagctttcctccggcgttgtgtgtgcctgagttgttgactcccaattgaagcgtggtcaaattacctcggctccggtatgggttggagctctttatgggttgctaaagcgtttagagtgtggctctaggcgtggattttcaccaatggcaatcgagtgcctcgtgctaggggcggggcaggaggtgggtaagagctgcgtggtggtgaccatcggcgggaagcgcgtcatgttcgactgcggcatgcacatgggctaccacgacgaccgccactacccggactttgcgcgcgcgctcgctgcctggggggcgcccgacttcaccaccgctatctcctgcgtggtcatcacgcatttccacatggatcatatcggggcactgccctacttcaccgaggtttgcggctaccacggccccatctacatgacgtatccaacaaaggctttagctccatttatgctcgaggattatcggaaagtaacgatgggtcagagaggtgaggaaaagcaatatagctacgaagatattcttaggtgtatgaagaaagtcacaccaatggacttgaagcagactgttcaagtagataaagaccttgtgatccgtgcctattatgctggacatgttataggggctgccatgatttatgcaaaagttggggatgctgctatggtatacactggggattacaatatgacaccagatagacatcttggggccgcacagattgatcgtctgaagttggatgtattgataacagagtccacatatgctaaatctatacgtgactcaaagcctgcccgagagagggagtttttaaaagcggtacataaatgtgtttctggtggaggtaaagttctaattccaacgtttgctctgggaagagctcaggaactatgtatgttactggatgactattgggagaggatgggcttgaaagttcctatttatttttcagctggtttaaccattcaagctaatgtgtactacaaaatgttgattgggtggactagtcaaaagatcaaggacagccatacagtgcataatccatttgacttcaagcatgtttgccactttgaacgttccttcattaacaaccctggtccctgtgtactttttgcaacacctggtatgattactgggggattttcccttgaggcgtttaaaaaatgggcaccatcagagaagaatctggttacacttccaggatattgtgtttctggaaccattggtcataagttgatgtgtgggaaacctacaagggttgattacgaggacactcatattgatgtcagatgtcaggggtgtgtttgattgcgggacaacttggacagccatgtctcccggcatcccctctctctgtctagttctgacaggcagctgaggacgacggcattgggatggttctatttcaaccctgaccttgaatcaaacaaccttatataagggatcgtcctatcccatcattgcaacaaaacacaccctagatttactccaaccattgcacttttcatttttgatattttttgccccctcatactgagttttt

SEQ ID NO: 37222 - DNA, 4388 bp, Zea Mays
tgaacagggagatcttttgctctcacgcagaaaaaatgtttggatagaactttctgcttctccgtccttaagcccaagtggaagaaggaggagggggctttgacgccggcgagccatggcgggggctctgctctcctctccccattatctctggagccccacttctcagccctcgcttcgccccaggagcaggggaccgctcggcactggggcagtgcgtgttctgccgccgaggaggagggcccgtgtgctcgcttcgtgctctcgcgagcctgccgccatgaaccgcggtttggaggtggagaggaggcgccttctcatgtccgggctcgtgtcttctttcacaatcgtgctcccgatttcaggagcatatgctgttatggagactaatgaagacgtaaaaatgaacacacaagttgatgagatcaatgcatactcttttctttacccggtcgaactgccaggaaagaaattttccttcaaatgggtagagtccagaaaaccagagcgatattcctcagcagcaccactatcacctgatgcacggcaacgaattgtatcggagcgagttgacatgatacataatgttgtcatctcagtctcgaaggtgacgactggccagcgcatgacagagagttctgtccttgatgcacatgctacagaggttgacggagaaccatactggtattatgagtatcttgttcggaaatcaccaacaaaatctgcatcagaaccaaatttgtttcgacacaatgtaacgtgcactgctgagcgtgatgggtacctgtactcactgaatgcttccactcttagcaaacagtgggaatctatggggccctttctgcaacagactgttgcatcatttcgccttctcccacctacagaaaactatgttcctccctacaaggatccttggagattttggtgaatggagatccttttttgtagttaccatttttttcctcttcagattcaggttttagaccatatgtttttcacaccatatgtttagtgagtgttgtcctttcaacttgacagataaaattcagagacccattttggttacaccaatcctgtccgttctgattaattaacagtcatattcaccttaagagttactctctttgtcccaaaataaattaacttcttgaatcaccctaagtcaaactaccttgagtttgaccaactttatagtaaaaataacaaaaaaaatatgacattaaataagtagattataaaaaactcgatctgtgcatgtaggtaaggccgccgtcaggcattgtattaagaagtaaattttgtctaagacttgtgcttttggcgtgagatagatgatatattttttctataaaaaacttaggacataaggagtgctacttagatcataaaaccaacttagttagagactgttttgcgaataaacagattataaaagtatacttttcggtatgtcctgcaatactactttaatgtcacaagtattaataattttttctatagtttagttaacttaaaataatttgacttaggttaactttagaagttgatttgtcttaggaaggagtaggtatgtaaatggttggggaaaaatcatgttcgtttctaccgatttttatatttactctgcttgaatttgtattttcggacaaatgtgaaaacaatacgaaaacgagatggaaaatgaaaacagaacaaaaatggtttaggccatatttcgaccccgtttatcttgtattaatacaggattatgccgtattcaaatatagtatatctcgtttacattgtagtcagcccactaccgtgactataaggtgtatcttgtatttctatatgcaaaactatatatcatatttctatatataaaagtatagtatgataagaacatagatgggaaggactcggagcatgatgatttttagcttgagttactgaaagtcgtctagagggggtggatagatagaatctgaaatttacaactttaaccacacactacaagccgaggttggcgttagaatgaatattaagtccggaagatagagggaaaacaaatcaaccaagaaataaggcggatgaacacggtgatttgttttatcgaggttctgttcttaagaacctagtccccgttgaggtggtcacaaagaccgggtctctttcaaccctttccctctctcaaatggtcacttagaccgagtgagccttttccttaatcttctgggtcacttagaccccgcaaggaccactacacacttaggtgtctcttgcttcgattacaaatcacttgagaaaagaaatgagaaaggaagaaggtaatccaagaggcaagagctcaaaagaacacaaaatctctctctcacaagtcactaaatgtttgagatgaattggggacttggagaggctttgatcttttgaattgtgtttaggagtgaatgctagagctcttgtaataaatgtgatactcagaaatcttggatgcttggagtggtggtggttggggggtatttatagccctcaaccaccatatagtcgttgggagtggctgctgtcgatggacgcaccggacagtccggtgcgccagccacgtcacccaaccgttagggttcgggcgctgtcgaccgttggagctttatcttctagtggactcaacccactgccactgtatctcccaaacataccactcgtttgtacatagatgtatcagatgaagtagactcaattctcatgtttgatggtgtaacttctctttgtggggcttaactaaattattgatgagctgaaatccacactttaacttttgttgcatcacttgtgtttgcctggttgtatcctcgaattcacatctaaaaatcaaaatcatcctagtcatattttctagtgctctattaaaaataatcattgcataccacaagttaaattaaaaattttcttaaaaggtataaccaacctcatcataaccaaccgtatgaccgcataatgacatattctagcctctaaaaaactaggtcgtagtaggcttcaacaccatatttgcagagtactagaggctacaatatgttccttctctttctcttgctttggatccgtccaatgagatttaggtctatatacccactcattgtaatgacatttcccatattcgtgctacagactacgacaaattattaattttgtgctgacaaatacaaggttaaaaagaaacaaagatgaactcacttcattcttgttagcatactcaaactcaagcaaactcataggtgcaagcacaactagatctcctcagtcacaaagagaaggattctcaagtcgttcattggtgactttgttctacccatccatgattggtggagggttggagggagataaaaaccatcacttaaagttctcatgtggccatctccctctccaccggtcgttaaaaaggtaccttggattgacttgttaggatcatcgatctactaaaaggaaaggcacctctcatggtcctaaataagttgatgccaccaatttataagtagctcaataacatatatcaaggaacttgaaattaaatatttgcacataattacttacattaaaataaccaagcaatgtgcaattatgtatggatgctcgattgaaacatgtggtctggcttatcacagttagttagacatcagtggctcagggggacaagtgcatccttgaaggcgcatgagcaactttgtctggatgccttgattgtggtctggctcatcacagtcatagttaggcaccaatagctcaaaaggtataggttcatcctcgcaagattcattcaggtataaatcagatggccctgttttcgccacttctcccaccacatgtcctccatctatctaaatataagattataaaaaacaagtttctttgtctttatacaacaatctaagtattttaaattaatgtacatgtagacatataacctatactcacaaactaaatacactaaaattaagcctaagcattataactatcaaactaaaatataaatatgttgaccaaatgtaacctaaacttaaacacaccaactcaaatttatagctaattgacttaaacatatagcacatgcaactacattcggacgcattcaatcgaagtttcataatgcattcgatctacctaaaatactttacatctctagccaaatatacttttccttcgaacgctagcaatcaaggctaatctttaaatccaccatagaaacaagaaataagaagaatattactttcctcttaggcgagaggagcatggggaaccaacaacttgagctggtggtcgatgtggcaggaaagaccaatgtcgttggttggggaggaagaagaaaaagaggaagaaagaaaaaagatagagagggcgagaaccgagcaggggct

SEQ ID NO: 37223 - DNA, 715 bp, Zea Mays
agtggagacaaggaggaaaccggcgctgcgggtagagaagctgctgggagggaagccgcagccacggaggtggtcgccgtggtgcaagagaccggcaacgagggatttgcatggagctattggcatcaaagcatactctcctggccaagatggcaagagatcattgaaagtgaaatctttcgtgcctgaacagtattcagatcttgttgctaaatctgcaaggtactgaagccaagattttccaaagaggatcacgccttgtgacctgttgctttgtcacctcactatgggatgttgacatgtattggtagaactgcagtactgcacaacgaaatgcatgttaacttaggcaggtatcaaatggatgagtatctatctagtttggatgcgctactacccattcggctactcgatacgtggagtctagggtgtcaattgacattggtacttgatagtaagacagttttaggttcagactcttgaaaattgattttgtttgtcttctcgttttcagatttaagatgcgataccacagataaaaatcttgggtaattggaggtaaaaaaaaggatagcacacctaaatatcataatgatgttatgatttttttattcagtgttatggctcatgccgtcaaggtatcatgtggtgtgatagtatcttgatgttaagatctgtggcgtcgatgccaatatttatagcaccaagctttaat

SEQ ID NO: 37224 - DNA, 2706 bp, Zea Mays
cttccccatcctcactctcccccagcgttccactcactccggcatcgcttcgaatctccgcgcggcggcgggaccgcgtgaccgacgcgcggcgctgccccttcagaaagccgcatggacgccgccgaccccctctgcgccatctcctcgactgcgcgactccttccgcggacccttggccccgccattgggccttccccctcgaacccccgcgacgcgctcctcgaggccatcgcactcgcccggtctctgaaagggtctgaggagctggttaagcaggctacaatggtgccgaaggagcacggggacatccaggctctctaccatgatgatggagtgaaaggctggcctcctgcaaatggcagcaaagagcaacagggaagaaggccagcactggatcgtaaacgggctcggtttgctatgaaggacactggaagcaaaccggtgcctgttgtggaccaatctaagttatcaaatatttcagatccaatcacattcttcatgaccttggatcggcttgaagaagccgaggaggagatcaaacggctaaatggagaggcagaaaaacgcacattgaattttgatcctgtagatgaacccattagacagcctggtttacgtgggagaaaatcagtccgcagtttcaaggtaattgaggatgttggtactcaagatcccaatgaggcaccggcttcccaaacagcaactatgacaggatctcagttgtcacaggatgttatgcatgctgttgcgggcaaaaatggacgatctgtttcctcaagatctagtgaagctatttcagagaaagaagtttcattagctgagaaggatggccgtgacgatttgacttatatactgacctcaatccaagatttagatgaatctgaagaggaagagtttatccggaagaccttagggattaaagaaacaaggaaagaaagagttagtcttcgtaactccattcttggagttaggtccctaagaagcaatactgaacaaaaaggttcaatgaaggtccaccctccagaaagtcatttgcctcagactcgccaagatcgaatttcagagttagagaaacatttgtttcctggaggtgcagcaaatgctaaatgcacagatgatgaatctgaagggtcaccagatattgtgatgggtgaaccatcattggtgcattattcttctgatgttctgatgactgatgagaactttactgcaagtgacgttgacagggagaccccaaatctgggtgccagagcagcagaccctgttcttgatcctgaaccaaacttgcctgatcatgcatatgaaaggcaacctggaggttcctcacttggtttgtacagagacacagaagttggagttgccaaagaaaatgagacatgtaacaggagcaatatatctgtggaggaagatgatgtgccaatagactatataactattggcaggtctactaatgaaacagaagtttcttcttctcatcctttggagggcagctcgacagaagaattggtcactaaaccaggtagacatgcggctccagatggtatctgtaggacttcacatgcagctgaggatagcattcaacatctagaagcggtcaaagagggtggtgtcctacaagataagtcaagccagttgttggagatgcctcaggaagatattaatccactgaatcaggctcagatgcatggtggaagcactaagaaatcggcacctgatctatccccgaccaaacagaagaagcaacaggcagttcaagaaaggaaaaggaagcaacagtcaaagaggggcaagaaagtggctggtgaatccctggaaataccccaaacaaattttgaatcggagaatcaacctcataatgacgatgtcaacattgagaaacagacaattacgagtagcacactctcaccaaatggtgccaaggggcaaaagggagctcaaaggagaaaccagaccaaaaaaaggaatcaaagaaaaatccttggagatgctgaccttgcatgccagcctggagtgagaaaaagctcaagaacacgctcaaggcctttggagtattggcttggtgaaagattactatatgggcctatacatgacaatttgcatggagctattggcatcaaagcatactctcctggccaagatggcaagagatcattgaaagtgaaatctttcgtgcctgaacagtattcagatcttgttgctaaatctgcaaggtactgaagccaagattttccaaagaggatcacgccttgtgacctgttgctttgtcacctcactatgggatgttgacatgtattggtagaactgcagtactgcacaacgaaatgcatgttaacttaggcaggtatcaaatggatgagtatctatctagtttggatgcgctactacccattcggctactcgatacgtggagtctagggtgtcaattgacattggtacttgatagtaagacagttttaggttcagactcttgaaaattgattttgtttgtcttctcgttttcagatttaagatgcgataccacagataaaaatcttgggtaattggaggtaaaaaaaaggatagcacacctaaatatcataatgatgttatgatttttttattcagtgttatggctcatgccgtcaaggtatcatgtggtgtgatagtatcttgatgttaagatctgtggcgtcgatgccaatatttatagcaccaagctttaat

SEQ ID NO: 37225 - DNA, 2337 bp, Zea Mays
cttccccatcctcactctcccccagcgttccactcactccggcatcgcttcgaatctccgcgcggcggcgggaccgcgtgaccgacgcgcggcgctgccccttcagaaagccgcatggacgccgccgaccccctctgcgccatctcctcgactgcgcgactccttccgcggacccttggccccgccattgggccttccccctcgaacccccgcgacgcgctcctcgaggccatcgcactcgcccggtctctgggtctgaggagctggttaagcaggctacaatggtgccgaaggagcacggggacatccaggctctctaccatgatgatggagtgaaaggctggcctcctgcaaatggcagcaaagagcaacagggaagaaggccagcactggatcgtaaacgggctcggtttgctatgaaggacactggaagcaaaccggtgcctgttgtggaccaatctaagttatcaaatatttcagatccaatcacattcttcatgaccttggatcggcttgaagaagccgaggaggagatcaaacggctaaatggagaggcagaaaaacgcacattgaattttgatcctgtagatgaacccattagacagcctggtttacgtgggagaaaatcagtccgcagtttcaaggtaattgaggatgttggtactcaagatcccaatgaggcaccggcttcccaaacagcaactatgacaggatctcagttgtcacaggatgttatgcatgctgttgcgggcaaaaatggacgatctgtttcctcaagatctagtgaagctatttcagagaaagaagtttcattagctgagaaggatggccgtgacgatttgacttatatactgacctcaatccaagatttagatgaatctgaagaggaagagtttatccggaagaccttagggattaaagaaacaaggaaagaaagagttagtcttcgtaactccattcttggagttaggtccctaagaagcaatactgaacaaaaaggttcaatgaaggtccaccctccagaaagtcatttgcctcagactcgccaagatcgaatttcagagttagagaaacatttgtttcctggaggtgcagcaaatgctaaatgcacagatgatgaatctgaagggtcaccagatattgtgatgggtgaaccatcattggtgcattattcttctgatgttctgatgactgatgagaactttactgcaagtgacgttgacagggagaccccaaatctgggtgccagagcagcagaccctgttcttgatcctgaaccaaacttgcctgatcatgcatatgaaaggcaacctggaggttcctcacttggtttgtacagagacacagaagttggagttgccaaagaaaatgagacatgtaacaggagcaatatatctgtggaggaagatgatgtgccaatagactatataactattggcaggtctactaatgaaacagaagtttcttcttctcatcctttggagggcagctcgacagaagaattggtcactaaaccaggtagacatgcggctccagatggtatctgtaggacttcacatgcagctgaggatagcattcaacatctagaagcggtcaaagagggtggtgtcctacaagataagtcaagccagttgttggagatgcctcaggaagatattaatccactgaatcaggctcagatgcatggtggaagcactaagaaatcggcacctgatctatccccgaccaaacagaagaagcaacaggcagttcaagaaaggaaaaggaagcaacagtcaaagaggggcaagaaagtggctggtgaatccctggaaataccccaaacaaattttgaatcggagaatcaacctcataatgacgatgtcaacattgagaaacagacaattacgagtagcacactctcaccaaatggtgccaaggggcaaaagggagctcaaaggagaaaccagaccaaaaaaaggaatcaaagaaaaatccttggagatgctgaccttgcatgccagcctggagtgagaaaaagctcaagaacacgctcaaggcctttggagtattggcttggtgaaagattactatatgggcctatacatgacagtacgtacactgatctagcacttgtgtcagctatgcacattttttttttatgaccaagacttgtatcagaatttatggtcaaatatattacagcaaattcatcataccaacttggaaaatgccatctgactgtcattttaatacagctagtagctttgtgcatctagatttcttgatactcaataaattgaaacctgctctgtacttgtagacaaaaaacagtggtggaaacaaacaataaaatcc

SEQ ID NO: 37226 - DNA, 456 bp, Zea Mays
ataaaagacactgaatcaaaaccagcaggtggacaggttatgcaatatggacatcatctccaaggtccaacaggtgatctgcttcgcgttccatgacagcaagctgctgatggaaacatgccaggaggccaagaaccttcggaagatcgtgacactcttctacttggattagctccttcgacagggatctattctcctttttttttgttcgtggcgtaggctaatgttggggggataaaaagcaagctggacggtttagttagtttcgaaatatactggataggtggtgggatgaccttccattggaggagaaagtcattttgtttcgcccattgttttgatttttgtcacaaagaaaccaataatcttgtcgatatgcctagtcgaagggattataatctggctttatttgttgttgatctcaggcttataattagttcgtgctccagtttttcc

SEQ ID NO: 37227 - DNA, 872 bp, Zea Mays
atttattttgtggtcatgcaggagctgctggctattcagcagcaaggacctcgtgcaataggtttctttggaacccgcaacatgggatttatgcatcaacagcttattgagatcctcagctatgctatggtcataacactgttatcaggggtgctctaagagctgaaaaaccagagctgcttactgtaattttacctcaaagcctaaagaagcagcctcctgaaagccaagaactgttgtctaaagtacaaaacttgatcgagaaaccacagcatgatcatttgccactaattgaggctagcaggtctgtgagctaccttttcaaactgctcatagttttcctatcccctctatttttgtcaccagtggtgttgcagtgtggatatatacctatttggtccatgcggtgtatcgtttagtagcacctcttctcagagagcgcacaagtgcaggttatgcaatatggacatcatctccaaggtccaacaggtgatctgcttcgcgttccatgacagcaagctgctgatggaaacatgccaggaggccaagaaccttcggaagatcgtgacactcttctacttggattagctccttcgacagggatctattctcctttttttttgttcgtggcgtaggctaatgttggggggataaaaagcaagctggacggtttagttagtttcgaaatatactggataggtggtgggatgaccttccattggaggagaaagtcattttgtttcgcccattgttttgatttttgtcacaaagaaaccaataatcttgtcgatatgcctagtcgaagggattataatctggctttatttgttgttgatctcaggcttataattagttcgtgctccagtttttcc

SEQ ID NO: 37228 - DNA, 833 bp, Zea Mays
ctttattggaacttctgccctgttggtctaaattacagaaccagagcagaacaaacaaggttgtgacagttggaaagtttcaaggaggtggagccttcaatgtgatccctgattcggtaactataggtggcaccttccgagcctttctgaaagagagttttaatcaattgaagcagcggattgaagaggtgattgtgtctcaagctagcgtgcagcgctgcagcgctgccgtggacttcctcagcaaggaccgtcctttcttcccgccgaccatcaacagccccgagctccacgacttcttcgtgaacgtggccggcgagatggtcggctcgaggaacgtgagggacaggcagccgctgatgggcgccgaggacttcgcgttctacgccgaggcggtcccttccacctactactacttcgtgggcatgtacaacgagacgcgcgggccgcaggcgccccaccactccccctacttcaccatcaacgaagacgcccttccctacggcgcggccgggcaggcggcgctggcagctcgctacctactcgagcgtcagcagcctgctgccgccaccgctgataaggcagaaacccatgatgagctgtagatagtacatgatgtttgcgtccctgtccctgtgttgatggaattagattgagcaataatttcttcgccaagtttattcagcggctgtacatatcctggtatctccatgctttggtaatgatcggttgggatcagtcagcaaatagtctgagaaacatgctttagtctgagaaacatgattccatcccttgatcaacgtcgcagtaactatcttctgctgattccaaat

SEQ ID NO: 37229 - DNA, 2173 bp, Zea Mays
aaattatcatcataaatataaaaaaacaatggtcaaaagtcaggagtatgttttatttctgaattacgatgaagtccatttctgccaaccaaaggggctgtaggagttggtaatcccgtcgaatcggattcgcgggccccaggggccactcagccagtactcaatgactaaagtgccctcccaagttccgcaattcacgcgcgaagtcattctcgtaatctcgtccaaaatgtcgcacaagcactgtttcgtccttcgtattgcccttcctatagccgcacgcatggcgaaccgaagcgaagccaaaacgcccattccccttcgccctcttcgaccctagcaagaagacggcggcggagatggtgtactacgcgcttttggtgggcgcagagctggacggcctcaccaacctgcagcccagcggcggctgcgacgaccccagcttcccctactacctcaagctcaagtgcgagaactgcggggaggtcaccgccaagtccacctacgtcactctcagcgagcaagtcgacctgcccaagggacatggcaccgctcacctcgtccagaagtgcaagctttgtgggagagatggaacaattgtgatgattcctggtcaggggacgccacttactattgagcagagccagaaagaagagaagacttgtttgatggtgtttgactgcagaggctatgaacctgttgagttttcttttggagctggctggaaggctgagtctgtgcatgggactccttttgaaattgactgctctgaagatgaattttctgagtatgatgagaagggagaatgcccggttgagctaagcaagctgcagtcaacattcaaagtggtgaagaagcatgagaagggtggtaagacaagatttgtctagatccagtgacttggagtctgtcgggtattggaatcggaggtgtataaatggtacatttgggctaaaaggaaagtgtggagtgggaacacaagagcaaagtccctgggaagatgcatggatgtggacatgatgcacatgttgctatgctgttgggatctgctaagattcttcaggagcatcgtgatgagttgaagggtacagtagttcttgtcttccaaccagctgaggaaggtggcggtggggccaagaaaatgatagaagacagagctgtggaaaacatagatgccatttttgggcttcatatagctgactctgtgcctattggtgtgctggcatccaggccagggcctattatggctgggagtggattctttgaggccgtaataagtggaaagggaggacatgctgcacttcctcatcacactatagatccgatattggctgcctcaaatgttattgtgagccttcagcaacttgtttctcgagaagctgatcccttggactcacaggttgtgacagttggaaagtttcaaggaggtggagccttcaatgtgatccctgattcggtaactataggtggcaccttccgagcctttctgaaagagagttttaatcaattgaagcagcggattgaagaggtgattgtgtctcaagctagcgtgcagcgctgcagcgctgccgtggacttcctcagcaaggaccgtcctttcttcccgccgaccatcaacagccccgagctccacgacttcttcgtgaacgtggccggcgagatggtcggctcgaggaacgtgagggacaggcagccgctgatgggcgccgaggacttcgcgttctacgccgaggcggtcccttccacctactactacttcgtgggcatgtacaacgagacgcgcgggccgcaggcgccccaccactccccctacttcaccatcaacgaagacgcccttccctacggcgcggccgggcaggcggcgctggcagctcgctacctactcgagcgtcagcagcctgctgccgccaccgctgataaggcagaaacccatgatgagctgtagatagtacatgatgtttgcgtccctgtccctgtgttgatggaattagattgagcaataatttcttcgccaagtttattcagcggctgtacatatcctggtatctccatgctttggtaatgatcggttgggatcagtcagcaaatagtctgagaaacatgctttagtctgagaaacatgattccatcccttgatcaacgtcgcagtaactatcttctgctgattccaaat

SEQ ID NO: 37230 - DNA, 1248 bp, Zea Mays
cggtcgactattccatcagtacaaccagcagtcgtagatagacgccttgaaacaaaagactacccgagagggccagacaatgaaaagcagaaacgatcgcgcacgcacggcagcaggatcggcacacgaaaaacgcagttgcatcgtggcatgcatttggaaatatcgtaatcaaaataaaccagccgccgccctcgtgcgggcctgcgcttgccttggcctcgtcaaaagcaaggccgccccactctaggctcacctgattccttccgccttgtcagcgcagcgatccagacccacccgagccaacaacccatggccgccgcgacgccgcgtctcctgctcgcggtcgcgggcctcaccctcgccgtcctcgccgccggtgctgcaggacccggcggagctcctgcgccttgccaaggagccggccttcgcggactggatggtcggggtgcggcggcggatccacgagaacccggagctgggatacgaggagttccagaccagcgagctcgtgcgccgggagctccacgccatggggatcccctacaggcaccccttcgccgtcaccggcgtggtagcaacagtcggcaccggcggtccgcccttcgttgctctgcgggcggacatggacgcgctgcccttgcaggaaagtgtggagtgggaacacaagagcaaagtccctgggaagatgcatggatgtggacatgatgcacatgttgctatgctgttgggatctgctaagattcttcaggagcatcgtgatgagttgaagggtacagtagttcttgtcttccaaccagctgaggaaggtggcggtggggccaagaaaatgatagaagacagagctgtggaaaacatagatgccatttttgggcttcatatagctgactctgtgcctattggtgtgctggcatccaggccagggcctattatggctgggagtggattctttgaggccgtaataagtggaaagggaggacatgctgcacttcctcatcacactatagatccgatattggctgcctcaaatgttattgtgagccttcagcaacttgtttctcgagaagctgatcccttggactcacaggttgtgacagttggaaagtttcaaggaggtggagccttcaatgtgatccctgattcggtaactataggtggcaccttccgagcctttctgaaagagagttttaatcaattgaagcagcggattgaagagtttcagtgtggactgtcgtgcagaggagactg

SEQ ID NO: 37231 - DNA, 1803 bp, Zea Mays
tatttgttgcagccgcctgccgccctcgtcccgtgcgtccccttcttaaaccttggcagtgcaagcccaggcagcctcatcccctcagtcctcagtccctcacacactcactatacactgctctgctgcagcaagaaggaagaagctagcgcctccctagctctcgttgtcagcaatggccaccaccgccgcgtccagcctcctcaagtcctccttcgcgggctcccggctcccttcggccacgcgcaccaccaccccgtcgtccgtggccgtggccaccccgcgcgccggcggcggccccatccgcgcgtccatctcctcctcccccaccccgccctacgacctgacgtccttccggttcagccccatcaaggagtccatcgtgtcccgcgagatgacccggcgctacatgacggacatgatcacccacgccgacaccgacgtggtgatcgtgggcgccgggtccgcgggcctgtcctgcgcgtacgagctgtccaaggaccccaccgtgagcgtggccatcgtggagcagtccgtgtccccgggcggcggcgcgtggctgggcgggcagctgttctcggccatggtggtgcgcaggccggcgcacctgttcctggacgagctgggcgtgggctacgacgaggccgaggactacgtggtggtcaagcacgcggcgctgttcacgtccaccgtgatgagccggctcctggcgcggcccaacgtgaagctgttcaacgccgtggcggtggaggacctgatcgtgcggcgggggcgcgtcggcggcgtggtcaccaactgggcgctcgtgtccatgaaccacgacacgcagtcgtgcatggaccccaacgtgatggaggcgctcgacatgaacgccgccgaggacgagatcgtgcgcctcacgcgcgaggtcgtgcccggcatgatcgtcaccgggatggaggtcgccgagatcgacggcgccccgaggatgggcccgacgttcggcgccatgatgatctccggccagaaggcggcgcacctggcgctgaaggcactgggcaggcccaacgccgtggacgggaccatccccgaggtgtcgccggcgctgcgcgaggagttcgtgattgcgtccaaggacgacgaggtcgtggacgcctgagcgagcatccacgcgccagcatgcaagcagcgtcttatctgggccggcgccatcacggggtttcttcttttaatctgggactttgttgttgttggacgaatgaattcccttcgatcggttagctttaatctgtctcgttagtgtgtcgtgttcgtgtagcaccatgccacagctacgccatgccgtgtgctctgtcacgtgggggccactcgtggggtctcctgctgctgtcagaacgaataagagaagatggaattgtggtgaaacaataaaaatgcatggtttaaattgtcttgttggtgttgcttctctgttctgttcggcccagtaaccgtaatcgctttcaaaccgtgactcgcagatagaagggcgcccagtgcgccaacgtttcgcttcggcgtagagttgttggatcgacaagaacaaggaccgcagcaaggattgctacagcccattacaagtcttggcaagttatacaatccagacaaataccgtacgatgctttggcgcacccgtttgtcgtttggtttgatacatatggctagctgggccctatatgtccgatcacgacaactcgctgcgtaaacactgtagcaatagaaagcagccaacggcatttggcttttttgaacatgtttctattttttagaaattacaaactgaac

SEQ ID NO: 37232 - DNA, 1497 bp, Zea Mays
tatttgttgcagccgcctgccgccctcgtcccgtgcgtccccttcttaaaccttggcagtgcaagcccaggcagcctcatcccctcagtcctcagtccctcacacactcactatacactgctctgctgcagcaagaaggaagaagctagcgcctccctagctctcgttgtcagcaatggccaccaccgccgcgtccagcctcctcaagtcctccttcgcgggctcccggctcccttcggccacgcgcaccaccaccccgtcgtccgtggccgtggccaccccgcgcgccggcggcggccccatccgcgcgtccatctcctcctcccccaccccgccctacgacctgacgtccttccggttcagccccatcaaggagtccatcgtgtcccgcgagatgacccggcgctacatgacggacatgatcacccacgccgacaccgacgtggtgatcgtgggcgccgggtccgcgggcctgtcctgcgcgtacgagctgtccaaggaccccaccgtgagcgtggccatcgtggagcacgccgtgcccgggatgaaggcgctcgacatgaacgccgccgaggacgagatcgtgcgcctcacgcgcgaggtcgtgcccggcatgatcgtcaccgggatggaggtcgccgagatcgacggcgccccgaggatgggcccgacgttcggcgccatgatgatctccggccagaaggcggcgcacctggcgctgaaggcactgggcaggcccaacgccgtggacgggaccatccccgaggtgtcgccggcgctgcgcgaggagttcgtgattgcgtccaaggacgacgaggtcgtggacgcctgagcgagcatccacgcgccagcatgcaagcagcgtcttatctgggccggcgccatcacggggtttcttcttttaatctgggactttgttgttgttggacgaatgaattcccttcgatcggttagctttaatctgtctcgttagtgtgtcgtgttcgtgtagcaccatgccacagctacgccatgccgtgtgctctgtcacgtgggggccactcgtggggtctcctgctgctgtcagaacgaataagagaagatggaattgtggtgaaacaataaaaatgcatggtttaaattgtcttgttggtgttgcttctctgttctgttcggcccagtaaccgtaatcgctttcaaaccgtgactcgcagatagaagggcgcccagtgcgccaacgtttcgcttcggcgtagagttgttggatcgacaagaacaaggaccgcagcaaggattgctacagcccattacaagtcttggcaagttatacaatccagacaaataccgtacgatgctttggcgcacccgtttgtcgtttggtttgatacatatggctagctgggccctatatgtccgatcacgacaactcgctgcgtaaacactgtagcaatagaaagcagccaacggcatttggcttttttgaacatgtttctattttttagaaattacaaactgaac

SEQ ID NO: 37233 - DNA, 2618 bp, Zea Mays
tgagaaatagtgtttgcccattaggcagattgccaaaggtaagcaacaaggattgaacggcaagatcaggacaacagaaatagaaagatgcatatgcaagcacatgcaaaaaaaaaatatgaagcataaacaagactcgcagggatttatcatagccctgagcattgcaagttgtgtagataaacttctataacagttcacaatccgatagtcacttgctatccattgaaatcactctacaaggttcctctctgatagtcacttgctatccattgaaatggctctataaggctcctctcttggtggcctctgttttcttggttatggtagtaccaacctagttggaggtgcggtacagcttcccaaaaacatggagcatagcgacaacagcgatgaacccaatgctcatgatcagaacggtgtttggtgacattttgcggcccgcagcctcatcggtgtaaaactggagcatcgagctggcaccacctccgccagcagcagcaccgcttgtggtcctacgcctgcgcaggcttgcagctgccgccgcactccctctagcagaaacagaagtgcaggcaaatacagttgcattgtgaggagcattgcaaaatcaacatgcatgttgtcatgttgacatacacagggatgatataacaattacacacaaatcaagcccgaagcaaacaacaaggcccaccaggaccaaccaaggattaggttatataaccagaatgtatctgatctatgtttgcattttggttgtatttgcaagccataatgatcaactttagttgttcttggtcaattcatccagatcgtacggccagaaaattgtagttttgtttaagtgttgatttattatctattgagcagtttaagtagaaatggtgcaagccatcatgttatcaaacacatgcagcatgctactttgtcatgcaggatgcagcatgttacttctgtgtacatgtgttcaaacgaacatgaaattgcagctgcaagaccaaacagccagcaaaggcaagggctgaattgtgttagtaaatggagtctctggatttaggaggtgtttcgtatgaggtctacctcatagcagctctgctctaaaactccagaatggagtagctctagagttttttagatttcaaagcagcaaacgagatactcaaaaaaacttgaactgcaactcccaaaacttcaaaaagtttgtaactctagagttagagtgtttggttggctctagtcagctctcttttggagttttgttctagagccatatcagacacccccttagttagggtcatgactggagtaggattttattcacacagatcctgcattcgtcagtgatgataaaatgtgtatgtttactggcaggaggagaaaagaaaggtgatccaatttgcattgaatgaggagcaacccagtaagttgcatccgtgagaagtagaggatctcaaatatcttttaaagattgtgatgccagttgacagcatgtgaactgcaaggatcccttgcattctccaggctgacaaatatttatctccaaaacatttatgcaaaatatagtctcgttactgatgaatgcagtgcaataactgtggttgttagtatgtttgtgttcatgagaaaagaattatgtgttggtgaaccttagttgtgttctgtttttcagtttgtgatcttacactaatggcaaagcattgttgttttttgtagtttgtggacttttgttcaaaggttgctgccttgcacagcatcaggttcttgctggttaggctttgacaatccatggaactgcggcatagccaagaaaatatgtattcgtcggttcaattctcaattcgcttgttctacttgtgtggttaaaaaccataaagcatttgtataaacaatcgttcaaggtactgcaggaagacaacgagctcttagaaatctataaagacaaatatgtgggcaaattgcttcatccaatcaacaatggacccaggccggcagatggcttcgatcggagcatgtagcgccacaccgctagctcatcatccaatcgacccacccgatccattggagcactgggtcgaagcaggattacatgtatggacagaccggtgcttctggactctggagtattcatttggttctatgggtccatccggtttgctccacggagcaactaaccccatatttagccacgatccattacgggtcctaaacgtatctgatctacgttatggagctcaggcacaattacagggccggcataagcatgaatcagcagcgcacaagtaaaacaaggcaaccatatgtaggggtcagatctggacgaaacatgtaccctaaacgcaggaattcaaacaggcgagatatgcagaatggaattcgaataggcgaaacatgtccaatcgacagaagagcaatacgcagagtgatctaaccaaaacaaacctcgcaaccaccggcagaagagcgggtggagggaaccgccggcagaagaagagcgggtgaagggtggcagatggatgtatgcgcacgcacctgacctgacgcctggcggtgatgaatccgctgttctcttctccctctcgtccttgtacagtcccgatggccgagcgagatccgtg

SEQ ID NO: 37234 - DNA, 4266 bp, Zea Mays
ctttagggtgccatctgcgaccaagcttttggattgagagcgctcactcgtgcgtaggttccacagctcagcgttctagctattttgctaattgtgttgcgtgtgacaaaacttggtaggaagtttctagtacataagtagaaactagaaaggagcacaagctaagaggagatgatcaagaatcggttcgaagaagctagaggcccagtgcatgacaattgacacatttatttgcaggttcatttgttatgatcttcagcgtgtatgttgtaaagacgagcaactatccaatgctctgcgagtttgtaggataggaaaactattctagaatacaaacgtgtgaggatcacccacaggaaatcaattactctgcaaaatggaggtaggtataccgtatgcaaaagcagaataaatggccggggcctggggcacaaacaaaaggaaactgtggttgcttgatgtcttaacacttgtcagtatccctgctctcccccttctgggggccaagcaccgagcaatgtgttcattaggtactctaatatttggttccccattccaggatcaaattcttggtttgaggaattaagaattgatatgtgcgcccctgtcaccatgttatttgccgctctgttaatcctcattgcaatttgggcaagttgtgtgtagctgcatacttgcgcttacctttaaggtggtgtgattttaggagttagactactggtactgggaccatgagaggtaacataacaaatgaaaataacagtgacgcagaccacttcagataaacaagtgattcaattgggtgtttagggaaagaaaccaaatctgacaggtatctgtactgaaatttcctagttttgctggtggtatccaagtttgtaatatgctttgcacgacttcctcagtgatcttctgtctgtggctgaaatgttgaccctccctcttatagttgtgttacagtttaggctccaaattttgctgcttggaaagtactccttatatgaagcttaagtacctttttgtaagcacacatgctctattttaaaaaccacagtgatctgtgtgtccagtgtccacaagggaataccatctccctaggggtttgttttaagttatgttcttatggctatcctaatttaattagtggaatttgcagcgaagctcttggactgaggccctcacttaggttctgtttcaggccgcctttggaatgcaggaatttcataggaatcatacaagaatttcacaggaatcagttcattttcacagaaaaaacacaggaaacaggaaaaaatcccgcattccaaagtggggctcaaccatcttgctattataaccatttgtgatgttgtttgggactaaacataatgtgtgtgtgtgtggggggggggggggttgcctgctgagagtttactttgtagtacatatggaaaggttcataagcaaaaataaaaggaaatgattaacaataagtgggaaaggctaaaatttatttgcaggttcatttgttatgacctttatatgtatcctggctgtaatgatatgcttgggggggggaggtccagaggacaaccatgtaacaataaccagcaagaaatcagttactttgcaaatacggtgatagaaaggtagctacttgagaagaaatccaggggctgcccgcactcatgattctctgtccttattctctcaccattttgcggggtaaagcagtgagcaaagaaagaattgagattttgacccttaggtttatggttatgacaggacgctgttccagcccttcgacgtgccttcaaatgagcctcctcgttcatctgaaaagttcaaaggaaacactatcaacgggcagtctaatagtacaagaagagaacctttgaggatgtcctcacagaccaagaacaaggacgtctgtgcttcaaaatcaattgccaagtgcacctcacagcatagagtgggcaacaccatcatgtcttctggaaagaaagtggtcagtgatgatgaatttatggttccttccatctgttatcctagattttatcgacagtctactcaagatcatgcagataaatcaaaaccccaatctactacaaacccacacaaaagtcctgcaatgtccaaatcatctgtagagtgctatagtactgtgaacaagcacttggacaaaatcaatgaagctgataggaggttaatgaactctccaaaggttaaggagaaagaagcagtgcaaggatcaaaagctgtggaagttaaagaaaagagttcatcatttcaggcatcagaaaagttcaaagacaaatatgctaagctatgtcaaatgaggaataaggaagtctaatttactggaaagaagcccacgggaagttggtgctaagagaaaaagaggacatcacaatggagagcaaaatgatgatttatctgactcctcagtggaatgcatacctgggggggagatctctccagatgaaattgttgctgctattggtccaaagcatttctggaaagcaagaagagctattcagaatcagcagagggtttttgctgtccaagtgttcgagctgcataagctgataaaagtgcagaaattaatcgcggcatctccacatctgcttattgaaggtgatcctgtccttggcaatgcattaacaggaaaaaggaacaaacttcctaaaggaaattcgaaagttcagaccctgtcaatcacaaacaaagatgatatccagccaaccctagagcaaccagagttatcaaaacaagacacagaaggaaacttattggcccattctcatgatgatggacttggtgacaaccatcataatcaagctgcaacaaatgaaacctttacaagcaaccctccagctatgcatgttgctcctgacaacaaacagaataactggtgcatgaatccaccgcagaatcaatggcttgtcccagttatgtcgccttctgaaggtcttgtctataagccttttgccggcccttgtcccccagttggaaatctgctgacaccattttacgccaactgtgctccgtcaaggctgccttctacaccatatggcgttcctattcctcaccagccacagcacatggtccctcctggtgcccctgccatgcatatgaactacttcccgcctttcagtatgccagtgatgaatccaggaacaccagcatctgcagtggagcaagggagccatgctgctgcgccacagcctcatgggcacatggaccagcagtcgctgatctcatgtaacatgtcacacccgagtggcgtttggaggtttcttgcatcaagggacagcgagccacaggccagcagcgccaccagccctttcgacaggctccaagtccaaggtgatggaagtgctccgttgtcattctttcccacggcttcagctccgaatgtccagcctccgccctcatctggaggccgggaccgggaccagcagaaccatgtaatcagggttgttccgcgtaacgcacagactgcttcagtcccgaaagcccaacctcagccgtcatccggaggccgggaccaaaagaaccatgtaatcagggttgttccgcataacgcgcagactgcttcggagtcagcagcgtggatcttccggtcaatacaaatggagaggaaccaaaatgattcgtagctggttaccatatactttcgtgtcatccgatggcagcttagtgcagcattgcagtttacagggctacccgagctgcagattatggtggctcctgtattctgaccactgattgcgctttacccgatcgtcatagatattggatgatatgatcttgtgttctatgcagagttgtaagccaaagttgtgcccctgaagactgaagtgacagccctgaagttgggagtccttcctgattgtgctatgactggaattggtatatatataggttacttgaacggtttcactgtgttgagctcaccacacggccgcgcttctgtaacatacaatacaatagactatgagtggtacagtaggaagcagcagtcagaaaatgactgctggtaccatgctacggggtcgctatagattgatgtgtaccggtactctggttctggtagtatatgctgctgtataattcagtgtttaattatctatatattgtacattagctgtcaagcctgtaaggcattgtattgtgggcaatgaatttggttgcaaatgttcgtgtactgggaaccatcttttgattgtttgtgtttttgaacattgctttgcgcctttgcttgtggaccgccgtcgaaggctg

SEQ ID NO: 37235 - DNA, 3138 bp, Zea Mays
ccaaaaaaacctgcttgcacatactcaaccgccagcgtctccactctccggtctccctctcatggtggagcccacctccgcctttgtggatcagagcgagcattcctttcccttcccttccctggcatcagaatcaaacgtgtccccgcagacgctcccaatcccatgcgcccctctgctctcacggtttgatttccctttcagttgggccgccatggccgcggtagcagctgtgcgcctgcaccccggcctcccccatcgccggccctgacactgggtaaacgtggtggctgaagctgctgctgaggattcgggatcttcttgctgccgccacgagctgcctgcgtgatattgacacggcgcgctcccctggctcctgggcatgacgaggggaggcggtggacaaggaggcaaggaggagccggggaaggtgatgggtccgctgttcccgcggctccacgtcagcgacgcaggcaagggcggcggcccgcgggctccgccaaggaacaagatggcgctctacgagcagttcaccgtgccgtccaaccgcttcagctcccccgcggcctccgcccgcgccgcgggggccagcctcgtgccctccacggcggctgcccaggtttatggttatgacaggacgctgttccagcccttcgacgtgccttcaaatgagcctcctcgttcatctgaaaagttcaaaggaaacactatcaacgggcagtctaatagtacaagaagagaacctttgaggatgtcctcacagaccaagaacaaggacgtctgtgcttcaaaatcaattgccaagtgcacctcacagcatagagtgggcaacaccatcatgtcttctggaaagaaagtggtcagtgatgatgaatttatggttccttccatctgttatcctagattttatcgacagtctactcaagatcatgcagataaatcaaaaccccaatctactacaaacccacacaaaagtcctgcaatgtccaaatcatctgtagagtgctatagtactgtgaacaagcacttggacaaaatcaatgaagctgataggaggttaatgaactctccaaaggttaaggagaaagaagcagtgcaaggatcaaaagctgtggaagttaaagaaaagagttcatcatttcaggcatcagaaaagttcaaagacaaatatgctaagctatgtcaaatgaggaataaggaagtctaatttactggaaagaagcccacgggaagttggtgctaagagaaaaagaggacatcacaatggagagcaaaatgatgatttatctgactcctcagtggaatgcatacctgggggggagatctctccagatgaaattgttgctgctattggtccaaagcatttctggaaagcaagaagagctattcagaatcagcagagggtttttgctgtccaagtgttcgagctgcataagctgataaaagtgcagaaattaatcgcggcatctccacatctgcttattgaaggtgatcctgtccttggcaatgcattaacaggaaaaaggaacaaacttcctaaaggaaattcgaaagttcagaccctgtcaatcacaaacaaagatgatatccagccaaccctagagcaaccagagttatcaaaacaagacacagaaggaaacttattggcccattctcatgatgatggacttggtgacaaccatcataatcaagctgcaacaaatgaaacctttacaagcaaccctccagctatgcatgttgctcctgacaacaaacagaataactggtgcatgaatccaccgcagaatcaatggcttgtcccagttatgtcgccttctgaaggtcttgtctataagccttttgccggcccttgtcccccagttggaaatctgctgacaccattttacgccaactgtgctccgtcaaggctgccttctacaccatatggcgttcctattcctcaccagccacagcacatggtccctcctggtgcccctgccatgcatatgaactacttcccgcctttcagtatgccagtgatgaatccaggaacaccagcatctgcagtggagcaagggagccatgctgctgcgccacagcctcatgggcacatggaccagcagtcgctgatctcatgtaacatgtcacacccgagtggcgtttggaggtttcttgcatcaagggacagcgagccacaggccagcagcgccaccagccctttcgacaggctccaagtccaaggtgatggaagtgctccgttgtcattctttcccacggcttcagctccgaatgtccagcctccgccctcatctggaggccgggaccgggaccagcagaaccatgtaatcagggttgttccgcgtaacgcacagactgcttcagtcccgaaagcccaacctcagccgtcatccggaggccgggaccaaaagaaccatgtaatcagggttgttccgcataacgcgcagactgcttcggagtcagcagcgtggatcttccggtcaatacaaatggagaggaaccaaaatgattcgtagctggttaccatatactttcgtgtcatccgatggcagcttagtgcagcattgcagtttacagggctacccgagctgcagattatggtggctcctgtattctgaccactgattgcgctttacccgatcgtcatagatattggatgatatgatcttgtgttctatgcagagttgtaagccaaagttgtgcccctgaagactgaagtgacagccctgaagttgggagtccttcctgattgtgctatgactggaattggtatatatataggttacttgaacggtttcactgtgttgagctcaccacacggccgcgcttctgtaacatacaatacaatagactatgagtggtacagtaggaagcagcagtcagaaaatgactgctggtaccatgctacggggtcgctatagattgatgtgtaccggtactctggttctggtagtatatgctgctgtataattcagtgtttaattatctatatattgtacattagctgtcaagcctgtaaggcattgtattgtgggcaatgaatttggttgcaaatgttcgtgtactgggaaccatcttttgattgtttgtgtttttgaacattgctttgcgcctttgcttgtggaccgccgtcgaaggctg

SEQ ID NO: 37236 - DNA, 3672 bp, Zea Mays
ccaaaaaaacctgcttgcacatactcaaccgccagcgtctccactctccggtctccctctcatggtggagcccacctccgcctttgtggatcagagcgagcattcctttcccttcccttccctggcatcagaatcaaacgtgtccccgcagacgctcccaatcccatgcgcccctctgctctcacggtttgatttccctttcagttgggccgccatggccgcggtagcagctgtgcgcctgcaccccggcctcccccatcgccggccctgacactgggtaaacgtggtggctgaagctgctgctgaggattcgggatcttcttgctgccgccacgagctgcctgcgtgatattgacacggcgcgctcccctggctcctgggcatgacgaggggaggcggtggacaaggaggcaaggaggagccggggaaggtgatgggtccgctgttcccgcggctccacgtcagcgacgcaggcaagggcggcggcccgcgggctccgccaaggaacaagatggcgctctacgagcagttcaccgtgccgtccaaccgcttcagctcccccgcggcctccgcccgcgccgcgggggccagcctcgtgccctccacggcggctgcccaggtttatggttatgacaggacgctgttccagcccttcgacgtgccttcaaatgagcctcctcgttcatctgaaaagttcaaaggaaacactatcaacgggcagtctaatagtacaagaagagaacctttgaggatgtcctcacagaccaagaacaaggacgtctgtgcttcaaaatcaattgccaagtgcacctcacagcatagagtgggcaacaccatcatgtcttctggaaagaaagtggtcagtgatgatgaatttatggttccttccatctgttatcctagattttatcgacagtctactcaagatcatgcagataaatcaaaaccccaatctactacaaacccacacaaaagtcctgcaatgtccaaatcatctgtagagtgctatagtactgtgaacaagcacttggacaaaatcaatgaagctgataggaggttaatgaactctccaaaggttaaggagaaagaagcagtgcaaggatcaaaagctgtggaagttaaagaaaagagttcatcatttcaggcatcagaaaagttcaaagacaaatatgctaagctatgtcaaatgaggaataaggcaagtaatataaatcattgtgacaacaacggttgccaacctgcaagcgtgaatggaaatttcacagaagcaaagaaccctacagcagctagaaatacatcttcctgtaaaccatgtactgatgtagatagctctaacaggaagtctaatttactggaaagaagcccacgggaagttggtgctaagagaaaaagaggacatcacaatggagagcaaaatgatgatttatctgactcctcagtggaatgcatacctgggggggagatctctccagatgaaattgttgctgctattggtccaaagcatttctggaaagcaagaagagctattcagaagtaagtatatggtgcttgagtagctgttttgtagttttgtaccaagtatttgtagcattctttagacaatactattcatatgtttcactctgcttatttcctttttcttttagttttcagttaattgtcatatggaagacaaaagtatgaagatgataagtctgttgtttggttttcagtacctaactattctgttgtactattaaatataaactgtggataataatgaatgccttcaattttgattcttttaagtagaaaacatggtagtttcatccaaaagaatagtatgttgcttgtaagactgatattgtgaatatttctttcttgctttctggattgctgcataatgcctttttttatgttttacactctgtcctgttaaaatctacagtcagcagagggtttttgctgtccaagtgttcgagctgcataagctgataaaagtgcagaaattaatcgcggcatctccacatctgcttattgaaggtgatcctgtccttggcaatgcattaacaggaaaaaggaacaaacttcctaaaggaaattcgaaagttcagaccctgtcaatcacaaacaaagatgatatccagccaaccctagagcaaccagagttatcaaaacaagacacagaaggaaacttattggcccattctcatgatgatggacttggtgacaaccatcataatcaagctgcaacaaatgaaacctttacaagcaaccctccagctatgcatgttgctcctgacaacaaacagaataactggtgcatgaatccaccgcagaatcaatggcttgtcccagttatgtcgccttctgaaggtcttgtctataagccttttgccggcccttgtcccccagttggaaatctgctgacaccattttacgccaactgtgctccgtcaaggctgccttctacaccatatggcgttcctattcctcaccagccacagcacatggtccctcctggtgcccctgccatgcatatgaactacttcccgcctttcagtatgccagtgatgaatccaggaacaccagcatctgcagtggagcaagggagccatgctgctgcgccacagcctcatgggcacatggaccagcagtcgctgatctcatgtaacatgtcacacccgagtggcgtttggaggtttcttgcatcaagggacagcgagccacaggccagcagcgccaccagccctttcgacaggctccaagtccaaggtgatggaagtgctccgttgtcattctttcccacggcttcagctccgaatgtccagcctccgccctcatctggaggccgggaccgggaccagcagaaccatgtaatcagggttgttccgcgtaacgcacagactgcttcagtcccgaaagcccaacctcagccgtcatccggaggccgggaccaaaagaaccatgtaatcagggttgttccgcataacgcgcagactgcttcggagtcagcagcgtggatcttccggtcaatacaaatggagaggaaccaaaatgattcgtagctggttaccatatactttcgtgtcatccgatggcagcttagtgcagcattgcagtttacagggctacccgagctgcagattatggtggctcctgtattctgaccactgattgcgctttacccgatcgtcatagatattggatgatatgatcttgtgttctatgcagagttgtaagccaaagttgtgcccctgaagactgaagtgacagccctgaagttgggagtccttcctgattgtgctatgactggaattggtatatatataggttacttgaacggtttcactgtgttgagctcaccacacggccgcgcttctgtaacatacaatacaatagactatgagtggtacagtaggaagcagcagtcagaaaatgactgctggtaccatgctacggggtcgctatagattgatgtgtaccggtactctggttctggtagtatatgctgctgtataattcagtgtttaattatctatatattgtacattagctgtcaagcctgtaaggcattgtattgtgggcaatgaatttggttgcaaatgttcgtgtactgggaaccatcttttgattgtttgtgtttttgaacattgctttgcgcctttgcttgtggaccgccgtcgaaggctg

SEQ ID NO: 37237 - DNA, 843 bp, Zea Mays
attccatttgatggatactcagatacaggggctacctggttcattttttgatgatgtgcaacttcaaactggtatgcccctctcctagatccatctaaatcgccgatggcgaccaccagcagcagtcccacccccaccccgctccttgcctcggtgtctttcccctcctcgacgtgctctacctcccatggtcggtactgctgattgtgctctctctgacctcgctctcctaggggaggagccgggagcgagagggggatctccactcatcatcatgacactcgctccaaacactcagtgccggattctccatgctcctgcaccaccctgccctcggcagcgttcctcctccgcccgcccagtggaatgcaaagagatccacccgagagtcggtggatttgtttctccctctattggtaagtcattcctggtcggcctttgattggacggattagttttggttcctttgtcgccaggcgaaccgaatcttgctcctcggactttcaagcactatatcctgcacgtgctgctctatttaagtaccttaagatgaccacaatatttttatggaatactgagcccattctctgcttttaagaattggttgtcttcatgtgtcattagtggttttgagtccaaccttgaagtaactgtcgcttcaaaatatccatctagcattttgtgaaagcactcactctgttcaacaagcatcaaattggaaaacgggcgcgtcatattacagcagtaatttcagtatttgatacaaggatctccctcaaatttgctgatatagctaagaagataatgctggtaggtaatagtttcttttattttaagtatttc

SEQ ID NO: 37238 - DNA, 1660 bp, Zea Mays
gtgttatggtatgcatgccatatgcatatatattatgtgcaagttcttcgcgtcatccgtttaatgcatggcgtctcgatccatgggtctgattcttccaagttaaagatggatcataacctgagcgacatgacgatcctgagcgagcacgcatggggcgacgaggccggcgccgtcttgctgtcgccaccggaggtgggcagcgtcatcgaaggcggcgggggcatgacggtgctggagaggctggtgctcgacgaggcgctggcagccgcgatcctggagctgcaggccatccagcaggccgcccccgggcccgcctcctgcgccggcaagcagcagctggcggccggtggcggtggtggtgtggttggggcggaggccgctgtcgccttcccctcgatgatggcgatggcgatggcggcgccaacgcccgcctacgcggacgcggacgtggacgcgggtgtcctgcagcgacagcagcatcaccatcgccctcacgccgcgatggggatgcctagtcccgactacgacctcgcaccagcagcagcagcaacacccgcggtcgcggtaactgctgccgcgccgcccgccttcaccacaaacacaaacgccgcggttgacagcggatgcagcggcctcgtagtccttggacgctcgccgccgccgccggtcttctccgccagcaacgagaccgcagcaacggcgagcctggactgtgaacatggcggcggaggccgtggtggtggccgaaggcaacgccggcccaacaggaagaggaaggccgccgccgaggccgagcggtcgcgacctgtgcgtgtggcggcggcagcggcacaggaagagagcaccttgtgcagcctcctggcgtccaccgccccgaccaccgcgggcggcatccagatcgcgttcagcacggcggccgtgcatcagcagcagcatgctgccggtggggccggcggcgccaagacatcagcgaagccgtcgtctctgagtctgagcagcagcggctcgtcgagcaacatcagcttcgacggccggaaccccgcgcgcaacgtgcgcatctcgtccgacccgcagacggtggcggcgcggcagcggcgggagcgcatcagcgaccgcctccgcgtgctgcagaagctcgtcccgggcggcgccaagatggacaccgcctccatgctggacgaggccgccagctacctccgcttcctcaagtcccaggtccgggacctgcaaaccctagaccgccgcaactacggtgcagcttcttcgaatgacgccgccgccaccatggctgccgttgtcgggtcgtcactcagctacaaccgtggcaccggtgccatgcccgcattcaccttcccggcagcaggcgaaaccctacgaggagcaggatgatgatagatttgtaacacacccacgcagcatgcatgttgttgttaaccctttttttatgttcgtctaatgtgcatgagaccatctttatgatgtatttcatcattattaatgttagatcaaagactaggtagacgatgatgatcatatcatcatatcgatgatggaaccaatccaatatgcaatcaaatgcaagggcgttgcaagatatcttaatgttaattactacaagttcttctccgtatgcaagttttcccttttgtaagcacaa

SEQ ID NO: 37239 - DNA, 2218 bp, Zea Mays
gagaagtccacgtctgagtgtgacaaaatagcaaattttccgccatagtagcctcccttagatgcttgctatgggttgcgatgcacacacacaaatctatctatgtaccgtaccctagctactccttggttgccctctttataagagcatgctagcttttcctccctgcagccttttgctatactgctgcatacacacacacacacacacaggatagtgagagatgattaagtcgctcccacatagcaaagccaaaagtttagcagctcaccgcaggcatcttcttgtcctcttgctctttccttgatccatccatggaccatgcatggtgcttttgcaggccgccggctcccctctcaagctatagcggttactagtactactagactactagctagtgcacgaatgcccccttctgcacctcgcttgccatagcttgcatcatcatcagctgctagcctgctagcagctcggtccacgcgcgactactagtctactagtagatgagcagtccagcagtgaaagtgtagtggcagtggcagcggcagccatatccccaccacactgctcgatcatcaccacgcctccgtcgtcagacctgcacctagctttgcatcgcgcattaatcaggaatcggaggaggggtctgattcttccaagttaaagatggatcataacctgagcgacatgacgatcctgagcgagcacgcatggggcgacgaggccggcgccgtcttgctgtcgccaccggaggtgggcagcgtcatcgaaggcggcgggggcatgacggtgctggagaggctggtgctcgacgaggcgctggcagccgcgatcctggagctgcaggccatccagcaggccgcccccgggcccgcctcctgcgccggcaagcagcagctggcggccggtggcggtggtggtgtggttggggcggaggccgctgtcgccttcccctcgatgatggcgatggcgatggcggcgccaacgcccgcctacgcggacgcggacgtggacgcgggtgtcctgcagcgacagcagcatcaccatcgccctcacgccgcgatggggatgcctagtcccgactacgacctcgcaccagcagcagcagcaacacccgcggtcgcggtaactgctgccgcgccgcccgccttcaccacaaacacaaacgccgcggttgacagcggatgcagcggcctcgtagtccttggacgctcgccgccgccgccggtcttctccgccagcaacgagaccgcagcaacggcgagcctggactgtgaacatggcggcggaggccgtggtggtggccgaaggcaacgccggcccaacaggaagaggaaggccgccgccgaggccgagcggtcgcgacctgtgcgtgtggcggcggcagcggcacaggaagagagcaccttgtgcagcctcctggcgtccaccgccccgaccaccgcgggcggcatccagatcgcgttcagcacggcggccgtgcatcagcagcagcatgctgccggtggggccggcggcgccaagacatcagcgaagccgtcgtctctgagtctgagcagcagcggctcgtcgagcaacatcagcttcgacggccggaaccccgcgcgcaacgtgcgcatctcgtccgacccgcagacggtggcggcgcggcagcggcgggagcgcatcagcgaccgcctccgcgtgctgcagaagctcgtcccgggcggcgccaagatggacaccgcctccatgctggacgaggccgccagctacctccgcttcctcaagtcccaggtccgggacctgcaaaccctagaccgccgcaactacggtgcagcttcttcgaatgacgccgccgccaccatggctgccgttgtcgggtcgtcactcagctacaaccgtggcaccggtgccatgcccgcattcaccttcccggcagcaggcgaaaccctacgaggagcaggatgatgatagatttgtaacacacccacgcagcatgcatgttgttgttaaccctttttttatgttcgtctaatgtgcatgagaccatctttatgatgtatttcatcattattaatgttagatcaaagactaggtagacgatgatgatcatatcatcatatcgatgatggaaccaatccaatatgcaatcaaatgcaagggcgttgcaagatatcttaatgttaattactacaagttcttctccgtatgcaagttttcccttttgtaagcacaa

SEQ ID NO: 37240 - DNA, 1829 bp, Zea Mays
gcgcatccctcgtcctcgtgtctctttttgtccttgttcttctccgtcgccggtgcgctcgcctcctgcctccctccccctttgcgagcgatcgtgaggggatcgagatggcctcagcctcacaccaatccgagcccctcgactccgctgccaccagcgacaccgacgccccctcagataacatcccagaattaccatgccccccctgtcatatcgttaccaaacctggtcaactcccagtcgagtttcttgaaccctcagctgcccagaagttggtaattggatttgactgtgaaggtgttgatctctgtcgcaatggtgctctctgtattatgcagcttgcattccctgacgctgtttacctagttgatgctattgagggtggaaaagaacttattcaagcttgtaagcccgcacttgagtctgatcatatcaccaaagttattcatgattgtaaaagggacagcgaggctttgtattttcagtttggcatcaaactgcacaatgtgatggatacacagatcgcttattctctgatacaagagcaggagcagaaaggaaaaaagaagacatctgatgattacaattacatatcttttgtcagtcttcttgctgataaacgatactgtggcataccatatcctgaaaaggaagaagttcgtatccttctaaggcaggaccctaacttttggacaattaggccattgtctgatatgatggttcgagctgccacagacgatgtccgcttccttctcaatatctacgagaaaatgatggaaaagttaaacaaagtatctttatggcgtctggcagttcgcagtgagctgtactgtaggtgcttttgcttaaatgacaaccagtttgcagattggtcacctcttcctcctgttcctgatggcattgaagctgatgtttatgttcctgaagttgatatcctatcagtcttagatgttcctcatgggaaaatgggacgagttattggcagaaaggggtcaacgataatggttgtgaaagaatcttgcaatgttgaaatccatattggtggtgctaaggggcctccagacagggttttcatcattggatcagtgaatgaagtcaggaaagccgaggccatcttcagaggccgaatgctggagttctagagatgttaccctttgcgccccatgtttcgactgctttatatcttttgaacgcaaaaagggggaaatacacaaaaggcgtatgcggtgccgtggatctcttgcccatccgtgaatcatgtgaagaaagtataaatgatttcaacttggcctatgtcagtgttgcgcttcctgtctcaactactcgccatctggttatacactctcgtttctggcctgtttcaggatgcggaagctggtcctctcctccggctgctaaaggagggtgaccaccgaaaagagagagagaaggaactggagccggacccggctgtcctaccaccaccgttaggtcagttgcggaagattgggtcggagatcttgctttgaatgcgcgatggcaacgcgagggctgggaacaaaactagctatagccatgctttgcctggatatccggctaatggtcattaaagccccacccccacgggagagaggagacgggagatccatcaagtcagctggacgccgaagccaaaatttaggactcggcaacaaacctgatggaccaggcaccgggcgcaccggcacggaggatgatgggtacgtgacgtctaggaggaccacctcctgtttcactgttcctcgtgcgatattattgtcaatcgttaagtcagctcccggctgctctccaactcttgtttttgccatcat

SEQ ID NO: 37241 - DNA, 1006 bp, Zea Mays
agcttgtaagcccgcacttgagtctgatcatatcaccaaagttattcatgattgtaaaagggacagcgaggctttgtattttcagtttggcatcaaactgcacaatgtgatggatacacagatcgcttattctctgatacaagagcaggagcagaaaggaaaaaagaagacatctgatgattacaattacatatcttttgtcagtcttcttgctgataaacgatactgtggcataccatatcctgaaaaggaagaagttcgtatccttctaaggcaggaccctaacttttggacaattaggccattgtctgatatgatggttcgagctgccacagacgatgtccgcttccttctcaatatctacgagaaaatgatggaaaagttaaacaaagtatctttatggcgtctggcagttcgcagtgagctgtactgtaggtgcttttgcttaaatgacaaccagtttgcagattggtcacctcttcctcctgttcctgatggcattgaagctgatgtttatgttcctgaagttgatatcctatcagtcttagatgttcctcatgggaaaatgggacgagttattggcagaaaggggtcaacgataatggttgtgaaagaatcttgcaatgttgaaatccatattggtggtgctaaggggcctccagacagggttttcatcattggatcagtgaatgaagtcaggaaagccgaggccatcttcagaggccgaatgctggagttctagagatgttaccctttgcgccccatgtttcgactgctttatatcttttgaacgcaaaaagggggaaatacacaaaaggcgtatgcggtgccgtggatctcttgcccatccgtgaatcatgtgaagaaagtataaatgatttcaacttggcctatgtcagtgttgcgcttcctgtctcaactactcgccatctggttatacactctcgtttctggcctgtttcaggatgcggaagtatgctttagatttcactctcttaagcctcta

SEQ ID NO: 37242 - DNA, 1341 bp, Zea Mays
gcgcatccctcgtcctcgtgtctctttttgtccttgttcttctccgtcgccggtgcgctcgcctcctgcctccctccccctttgcgagcgatcgtgaggggatcgagatggcctcagcctcacaccaatccgagcccctcgactccgctgccaccagcgacaccgacgccccctcagataacatcccagaattaccatgccccccctgtcatatcgttaccaaacctggtcaactcccagtcgagtttcttgaaccctcagctgcccagaagttggtaattggatttgactgtgaaggtgttgatctctgtcgcaatggtgctctctgtattatgcagcttgcattccctgacgctgtttacctagttgatgctattgagggtggaaaagaacttattcaagcttgctttgtattttcagtttggcatcaaactgcacaatgtgatggatacacagatcgcttattctctgatacaagagcaggagcagaaaggaaaaaagaagacatctgatgattacaattacatatcttttgtcagtcttcttgctgataaacgatactgtggcataccatatcctgaaaaggaagaagttcgtatccttctaaggcaggaccctaacttttggacaattaggccattgtctgatatgatggttcgagctgccacagacgatgtccgcttccttctcaatatctacgagaaaatgatggaaaagttaaacaaagtatctttatggcgtctggcagttcgcagtgagctgtactgtaggtgcttttgcttaaatgacaaccagtttgcagattggtcacctcttcctcctgttcctgatggcattgaagctgatgtttatgttcctgaagttgatatcctatcagtcttagatgttcctcatgggaaaatgggacgagttattggcagaaaggggtcaacgataatggttgtgaaagaatcttgcaatgttgaaatccatattggtggtgctaaggggcctccagacagggttttcatcattggatcagtgaatgaagtcaggaaagccgaggccatcttcagaggccgaatgctggagttctagagatgttaccctttgcgccccatgtttcgactgctttatatcttttgaacgcaaaaagggggaaatacacaaaaggcgtatgcggtgccgtggatctcttgcccatccgtgaatcatgtgaagaaagtataaatgatttcaacttggcctatgtcagtgttgcgcttcctgtctcaactactcgccatctggttatacactctcgtttctggcctgtttcaggatgcggaagtatgctttagatttcactctcttaagcctcta

SEQ ID NO: 37243 - DNA, 1371 bp, Zea Mays
gcgaggcgggggcgcagagagcgcgggcgttgatggcgggatcaaaatttccttccttggagcagccgcgcgggcgacggagtggagcggcggggattgcgggatcagcgaggcgggggcgcagagagcacgagcgcgagagggagcggactgcaggcagaactgtgcaccaaaaaagtgtgtacgtctatactatggtcttatatagtagtagagattcgtggggctggtgtgggtaatttattgtagtagagaaatctcagaaacgtgcggaactgcgaacgccctgcgtcctacttcgtctatgctttcacaactcgctgaaaattcaacgattccctcctcgccgtcaatcctcccacaaatccaacgcctgcagttgacgccaactcatcgatccgcgccgcacccatctccaccaatatccttccattgcgctcctctacaaaagctcccctcccccaatccaccccattccacaacaccaagaagcaagaaaactagaaaaggctcctcccgaccgcaacgcccctcatctccctcgaccccgacatccccgacccgatggcgcccaaggcggagaagacgaccgcagggaagaagcccaaggccgagaagcggctgcccgcgtccaagtcctccggcaaggagggcggcgagaagaaggggaagaagaaggccaagaagagcgtggagacctacaagatctacatcttcaaggtgctgaagcagctggccggcgaggccgccaagctggcgcggtacaacaagaagcccaccatcacgtcccgcgagatccagacctccgtgcgcctagtcctccccggagagctcgccaagcacgccgtctccgagggaaccaaggccgtcaccaagttcaccagcaactgagcgcgctgcgggatccgcggatctgttagaagggttctttgctgtgtcctttccccagtcccccaccctacccgcctagtagctagcttgcctgctctataaatccggcgcgccggattgtaatggtcctcttagatttgatgtccctgttgtggaatatagttgtatctctccgcttgctatttttctcattctttaggaacttggaaatctggtaattttgccgggagataactaggatcatcacaaattcgcgttgacaacgcgacctcacaaggtcgaaggctcgtgcgtttgttgtttcagtctcagattcttcagcacaagggtatttgtgagcggcaacgatgtctgtcttgcagccatacgatgattacaattttttttgtctgccagaacctgccaatgtgtgatgacataagagcgtctcaagcatgtgggtacattttgctctcgtcaatgtgtgatggtacaagttgc

SEQ ID NO: 37244 - DNA, 1173 bp, Zea Mays
atacgcttgttctcctcctcctctgtaattctccctgttgcaacgactctaattttcatttcaaggaagacaactgatgttctttcagaggaagaaatcaaagaaagccaaagactccagaggatcgcagaagaaggggaaagatgggcgtgggaagaatgatcttttcgatcgtgccaagggagggcttgatgccctcgcaggaagcctgcaggaagccaagaaggacgccgaaacggcgactgagaagcttcaaggggatgtgaagtcgggcatggaaacgatccggcacaagggctcaggcctccttgagaaagccaaagaagaactcgggagtcactccgacgccagccgttcctcaaaggaactagagcgaggaagcgaggaacaggggaacaacaaggacatggacgctttcagtgcagtgatggacaaggtgaagggccacccagaagcgatggagaaggtcagcgctgtgatggacaaggtgaagagccacccggaagtggtggacaaggtcaaggacgaggtgatgagcctcgctggcgctctccgtctgcggagacatggatccgaagataaagaagctgagtccgaagagaaggcagaaggagcgcagagcgccgacgagggtgcctctgatggcatggctggagaacctagtgtgttggagcaggccgtgcaagagattcaggctgtcgccgcagctttgcagcagacagctgaacccgaagctgaaattccagctgagaccgctgctgctgctgctgcagaaacttctgctggaggagacaagcctgaagaaacgaacggggaggtggagcaagatgacccgaagaagcggctcgacttcgctgggttcttcgccatgctgctcgagaggttctgctccccggccagcaagaagaaagattaagttggttgcaggtccggcttgtggatttctcgttctgtcttctgtgatcttcgacttggacattacatggagtgcgtgggattgtgggtggtgtacagtctgcagttgtgttatcttaaaacaacaaatcagctattggttttttactaccttactttgatgacggggcaatggctacgttttacttgatgtaattatcatcgccattgtggatttaatttattttatctctactatatttaaagcacaagtttcaa

SEQ ID NO: 37245 - DNA, 1290 bp, Zea Mays
ctcgacatgcttaagttgtggcagcgattactagagatagatggctccataaaaggagggccacgttgttgcatggcatgccccccctgaatacgcttgttctcctcctcctctgtaattctccctgttgcaacgactctaattttcatttcaaggaagacaactgtgtaattaagagaaggaacgggacaagatgttctttcagaggaagaaatcaaagaaagccaaagactccagaggatcgcagaagaaggggaaagatgggcgtgggaagaatgatcttttcgatcgtgccaagggagggcttgatgccctcgcaggaagcctgcaggaagccaagaaggacgccgaaacggcgactgagaagcttcaaggggatgtgaagtcgggcatggaaacgatccggcacaagggctcaggcctccttgagaaagccaaagaagaactcgggagtcactccgacgccagccgttcctcaaaggaactagagcgaggaagcgaggaacaggggaacaacaaggacatggacgctttcagtgcagtgatggacaaggtgaagggccacccagaagcgatggagaaggtcagcgctgtgatggacaaggtgaagagccacccggaagtggtggacaaggtcaaggacgaggtgatgagcctcgctggcgctctccgtctgcggagacatggatccgaagataaagaagctgagtccgaagagaaggcagaaggagcgcagagcgccgacgagggtgcctctgatggcatggctggagaacctagtgtgttggagcaggccgtgcaagagattcaggctgtcgccgcagctttgcagcagacagctgaacccgaagctgaaattccagctgagaccgctgctgctgctgctgcagaaacttctgctggaggagacaagcctgaagaaacgaacggggaggtggagcaagatgacccgaagaagcggctcgacttcgctgggttcttcgccatgctgctcgagaggttctgctccccggccagcaagaagaaagattaagttggttgcaggtccggcttgtggatttctcgttctgtcttctgtgatcttcgacttggacattacatggagtgcgtgggattgtgggtggtgtacagtctgcagttgtgttatcttaaaacaacaaatcagctattggttttttactaccttactttgatgacggggcaatggctacgttttacttgatgtaattatcatcgccattgtggatttaatttattttatctctactatatttaaagcacaagtttcaa

SEQ ID NO: 37246 - DNA, 1435 bp, Zea Mays
aacacagaattaaaaagaaaaggttaaaatcgacaactcgacatgcttaagttgtggcagcgattactagagatagatggctccataaaaggagggccacgttgttgcatggcatgccccccctgaatacgcttgttctcctcctcctctgtaattctccctgttgcaacgactctaattttcatttcaaggaagacaactgggaccacgagggattgaaggggattgagggaattaatttcttccttaattccttttaattcccgatccctggtcaccaaatcagcccgcatgtgactatattatcgcagtgtaattaagagaaggaacgggacaagatgttctttcagaggaagaaatcaaagaaagccaaagactccagaggatcgcagaagaaggggaaagatgggcgtgggaagaatgatcttttcgatcgtgccaagggagggcttgatgccctcgcaggaagcctgcaggaagccaagaaggacgccgaaacggcgactgagaagcttcaaggggatgtgaagtcgggcatggaaacgatccggcacaagggctcaggcctccttgagaaagccaaagaagaactcgggagtcactccgacgccagccgttcctcaaaggaactagagcgaggaagcgaggaacaggggaacaacaaggacatggacgctttcagtgcagtgatggacaaggtgaagggccacccagaagcgatggagaaggtcagcgctgtgatggacaaggtgaagagccacccggaagtggtggacaaggtcaaggacgaggtgatgagcctcgctggcgctctccgtctgcggagacatggatccgaagataaagaagctgagtccgaagagaaggcagaaggagcgcagagcgccgacgagggtgcctctgatggcatggctggagaacctagtgtgttggagcaggccgtgcaagagattcaggctgtcgccgcagctttgcagcagacagctgaacccgaagctgaaattccagctgagaccgctgctgctgctgctgcagaaacttctgctggaggagacaagcctgaagaaacgaacggggaggtggagcaagatgacccgaagaagcggctcgacttcgctgggttcttcgccatgctgctcgagaggttctgctccccggccagcaagaagaaagattaagttggttgcaggtccggcttgtggatttctcgttctgtcttctgtgatcttcgacttggacattacatggagtgcgtgggattgtgggtggtgtacagtctgcagttgtgttatcttaaaacaacaaatcagctattggttttttactaccttactttgatgacggggcaatggctacgttttacttgatgtaattatcatcgccattgtggatttaatttattttatctctactatatttaaagcacaagtttcaa

SEQ ID NO: 37247 - DNA, 1339 bp, Zea Mays
atggcgaacaaggtagtggcaactaaggcgaggaccatcattatcgtgcggagaggagaaaaaacccccaagaagaagaattcctctcgctcgaggggtgggaaagaagcggaagggcagacgagtcgagaggaagccctcgcctccggcacacgccatggtggagactcgccggagctccgccgccgccgccgggaagcgcacgtctccatcgccatcctcttcgtccgtacctcccccgaagcggcccaagatcaaggagtcgataagcagtcttccgctgctgcagagagttcaaagcggaggaaggagcaggagcaacagcaacccgcagtgccatgggcaaagctgctctcggagtgctcacagaaaatggttgtctttgtcatgcgacaggctgtttggaatgctgtcactaataatgaggtcgttcaaggtttcagaagatctttacatgatgagacaagattatcctacatgttgtcttgtggttcactagagaggctgctcaacatgaggaatctgaagttatggatggtgaggatgacgatgatgaagacaatgatgatgattatgatacaaagaagaacaagggaactgctggaggggaagggcaacagggaaaacgacctacaaagtgcaagcagcagtgagcggcggtgtgctctttgcaaagccttggagctgcctctcctgcaaagtctgaacttgcagagatagtcccacaagagaaatcaccaaaagcttccattcaaccaatgccgccgagtccaaggtcttctacctcaagatgaagggcgactaccataggaaggatgctgcggggagcaccatgaattcctacaaagctgctcaggtttcctctgactgttcaccattattggaagcagggcaggcagagagccttggaaccgaactcttggagatggtgcctagcagggaagaggagattaagttgaaagaatacagggaggatgttgtgtcgacttttgtagttgatgattatgtgagacttgagtttaagggctcaacttttaccggttcttggaagtcatttagtagccctaagatttcatcaacattcttattagtaattgctatagtatcaaatgggattgtgatctatgtttggatgatgaaaacagtgctactcgatgtgaagtccaccaatactatagttcagattaagtctaagatcggtgctttagagggaattggtaatagccagaaagcactcttttttgctggaattatgatgtttgagaggaagattggtcgtcttagtacattgttcctggccatggaggaaggcttcctcgcgctcgtgtcaagcctgtga

SEQ ID NO: 37248 - DNA, 1215 bp, Zea Mays
atggcgaacaaggtagtggcaactaaggcgaggaccatcattatcgtgcggagaggagaaaaaacccccaagaagaagaattcctctcgctcgaggggtgggaaagaagcggaagggcagacgagtcgagaggaagccctcgcctccggcacacgccatggtggagactcgccggagctccgccgccgccgccgggaagcgcacgtctccatcgccatcctcttcgtccgtacctcccccgaagcggcccaagatcaaggagtcgataagcagtcttccgctgctgcagagagttcaaagcggaggaaggagcaggagcaacagcaacccgcagtgccatgggcaaagctgctctcggagtgctcacagaaaatggttgtctttgtcatgcgacaggctgtttggaatgctgtcactaataatgaggtcgttcaaggtttcagaagatctttacatgatgaagaacaagggaactgctggaggggaagggcaacagggaaaacgacctacaaagtgcaagcagcagtgagcggcggtgtgctctttgcaaagccttggagctgcctctcctgcaaagtctgaacttgcagagatagtcccacaagagaaatcaccaaaagcttccattcaaccaatgccgccgagtccaaggtcttctacctcaagatgaagggcgactaccataggaaggatgctgcggggagcaccatgaattcctacaaagctgctcaggtttcctctgactgttcaccattattggaagcagggcaggcagagagccttggaaccgaactcttggagatggtgcctagcagggaagaggagattaagttgaaagaatacagggaggatgttgtgtcgacttttgtagttgatgattatgtgagacttgagtttaagggctcaacttttaccggttcttggaagtcatttagtagccctaagatttcatcaacattcttattagtaattgctatagtatcaaatgggattgtgatctatgtttggatgatgaaaacagtgctactcgatgtgaagtccaccaatactatagttcagattaagtctaagatcggtgctttagagggaattggtaatagccagaaagcactcttttttgctggaattatgatgtttgagaggaagattggtcgtcttagtacattgttcctggccatggaggaaggcttcctcgcgctcgtgtcaagcctgtga

SEQ ID NO: 37249 - DNA, 372 bp, Zea Mays
atggagaagagtatcgctgatctggcttctatccctcagttgatgcagcagcaaaatgaagccatcaagtcggcgttggaggaaaacacagcgatgattcgggatatttctctctggaaaccccaagtcgatgctgatgtgggctcactgcgaaagcagatgggcatgatctcggagaaggtgggcactctggtggaatttcgtgaagcgctacagcccgccctcaaggtgttcgagcgtacgtctacagagatgacgcctccagcagtggcgtcaggacttacgccgtttcttaattcagctcaaggaccaaatggccatcgtcttcatgatactcaccggagtgatggttttggggtggtgaccaactga

SEQ ID NO: 37250 - DNA, 1738 bp, Zea Mays
accgtctcgtacatgcccttatccctctcgccccgcatcccatcacccgcaggccggaacagcagccgtcagccatgcccgcggcggccttcttctccgccgcgctgccccctccctcgcgtacgctgtcccgccgcctcgtcgtgtcccgcgcggctgcggccgcggcctcagcatcagcatcctcgtcctccgggtggcaaggtggcgggggagtggagttccagggcaaggtggggttcctggggctcgggatcatgggcgcgcccatggcatccaacctcatcaaggcaggctgcgacgtcacggtttggaacaggaccaagagcaagtgcgatcccctcctcagtctcggtgccaagtacgagcctacaccggcccaagtcgcttcatcttgtgacgtgacattcgcgatgctcgctgatccacaaagcgcgctatgtcgatgtgtcgacggttgatggtgctacatccaagctgattggtgaacgcattacaagtactggagcatctttccttgaggctccagtttcaggctcgaaaaaaccagcagaagatgggctgctcatctttcttactgcaggtgatgagtccttgtacaagagagtggcgcccctccttgatgtcatggggaagtcaaggttttatcttggcgatgtaggcaatggtgctgcaatgaagctcgtggttaacatggtcatggggagcatgatggtttccttctcagaagggttgctcctgagtgaaaaagtcggtttagacccgaatactctcgtcgaggttatttcccagggtgctatcagtgcccccatgttctctctcaagggcccatccatggttaaagctgcatatcctcctgcatttcctctgaagcatcaacagaaggacttgaggctcgcattggccctggcggaatcggtgtcccagtccattcctacagttgcagctgcgaacgagctgtacaaggctgcaaaatcgctcggccttagtgaccacgacttctcggcggttattgaagcgctgaaagccaaagtgcagagccagagctcacaatagtagttgcctgttcagcagagctcacagtagttgttgcctcttcagcagctaccattgaggcagcattttgtctcgatggatgaagttgacacttaggaaaatttctcaagatcgctacagaaaagtctcagaacaatacaatttctgtattcgtaaatattttctcaaacatcacaacgacgacatttccttaaggaagaaaaaaaactttcattaaaggctagttggggaacttaaatcttcttctggattcccggagattgaataaaagattagttcatttttccactcaatactcaggaattctagaggagatttaggggtatgggtgtttggtttgaaaaattaattcattctaaatgagatgttatatcatgatccattgcacaaatttagtagaatgaattcatgtcttatattattactaactattagcctataagaaatgaaatggtaatgaaacaactcattctattctacaaactaaacaataaagtgagaagtgagaagataatgaactatatcatttctcaaacaaaaggttgtttgggaactcaaaacgcctctgaattactggtgtttgagtaggaaaatgagctaattttctactcaatcttcgggagtcttataggaaatttaagtttctaaactagtcctaagtttcaaggtaaccctaaaaaag

SEQ ID NO: 37251 - DNA, 1757 bp, Zea Mays
gcgcattgccgttccgccggaacagcagccgtcagccatgcccgcggcggccttcttctccgccgcgctgccccctccctcgcgtacgctgtcccgccgcctcgtcgtgtcccgcgcggctgcggccgcggcctcagcatcagcatcctcgtcctccgggtggcaaggtggcgggggagtggagttccagggcaaggtggggttcctggggctcgggatcatgggcgcgcccatggcatccaacctcatcaaggcaggctgcgacgtcacggtttggaacaggaccaagagcaagtgcgatcccctcctcagtctcggtgccaagtacgagcctacaccggcccaagtcgcttcatcttgtgacgtgacattcgcgatgctcgctgatccacaaagcgcggctgaggttgcatgtgggtccagtggagctgctgaagggttggcccctgggaaaggctatgtcgatgtgtcgacggttgatggtgctacatccaagctgattggtgaacgcattacaagtactggagcatctttccttgaggctccagtttcaggctcgaaaaaaccagcagaagatgggctgctcatctttcttactgcaggtgatgagtccttgtacaagagagtggcgcccctccttgatgtcatggggaagtcaaggttttatcttggcgatgtaggcaatggtgctgcaatgaagctcgtggttaacatggtcatggggagcatgatggtttccttctcagaagggttgctcctgagtgaaaaagtcggtttagacccgaatactctcgtcgaggttatttcccagggtgctatcagtgcccccatgttctctctcaagggcccatccatggttaaagctgcatatcctcctgcatttcctctgaagcatcaacagaaggacttgaggctcgcattggccctggcggaatcggtgtcccagtccattcctacagttgcagctgcgaacgagctgtacaaggctgcaaaatcgctcggccttagtgaccacgacttctcggcggttattgaagcgctgaaagccaaagtgcagagccagagctcacaatagtagttgcctgttcagcagagctcacagtagttgttgcctcttcagcagctaccattgaggcagcattttgtctcgatggatgaagttgacacttaggaaaatttctcaagatcgctacagaaaagtctcagaacaatacaatttctgtattcgtaaatattttctcaaacatcacaacgacgacatttccttaaggaagaaaaaaaactttcattaaaggctagttggggaacttaaatcttcttctggattcccggagattgaataaaagattagttcatttttccactcaatactcaggaattctagaggagatttaggggtatgggtgtttggtttgaaaaattaattcattctaaatgagatgttatatcatgatccattgcacaaatttagtagaatgaattcatgtcttatattattactaactattagcctataagaaatgaaatggtaatgaaacaactcattctattctacaaactaaacaataaagtgagaagtgagaagataatgaactatatcatttctcaaacaaaaggttgtttgggaactcaaaacgcctctgaattactggtgtttgagtaggaaaatgagctaattttctactcaatcttcgggagtcttataggaaatttaagtttctaaactagtcctaagtttcaaggtaaccctaaaaaag

SEQ ID NO: 37252 - DNA, 443 bp, Zea Mays
gtgtcgtcttcctctccgccgcttctcctgtccaccctcgactgcttgcgcgtgacctgagccgccgccgcctacatccgctcatccccgcgcccgcctcaaccacgccgccaccgaccacgtataatcctgcctccccttcgcgcggtttcgaggctcgtttcctttgggatcgttcgtctgccccgaccgcgtgggcgcttcttcttcgggatctcgctggaccgagcggcccagggctagggattcaggcccatggcgtggcggcgcgtcctcacccagcgagttccaccggccatgaagaccatttaatcaacagttgaggaatctccttgttgtggtgttgtacacagcgtttctgcagcacctgctcaggccattgtaaagagtgagacaaatcaagtagcttagaactgacctgggcatttgggccaatagttttt

SEQ ID NO: 37253 - DNA, 1443 bp, Zea Mays
gggagcctccggcactaggttttccctaattgtatgctggatggagggagtagtttgatagtttcatatgtatttgcagtcatattactaaaattattggttgatcctgcgcaacgtttgattttgtaaaaatttgggatccaagtttgcgtggttctgaacttcgagcaacacttaaagggcatactagggcaattcgaacaatcagttcagatcgtggcaaaatagtttctggagctgatgatcagtctgtcatagtatgggataagcagacttttaagcttttggaagaactgaagggccacgaggcaccggttagttctgtccggatgctctcaggagaacgtgtccttattgcatcccatgatggtactgtgaagatgtgggatgtccggactgatacttgtgttgttaccgtgggtcgttgccaaagtgctgttctctgtatggaatatgatgattccactgggattctggcggctgctggaagagatatcacggcacatgtctgggatattcgctccagcaagcagatgttcaagcttcaagggcatacaaagtggataagatcaatgaggatgaccggagagaccataataacaggtagtgatgattggactgctagagtgtggtcccttaaccggggaacatgtgatgcagtgttagcatgccatgctggtcccgtactatgtgtggaatactcaccttcagataaaggaattatcactggttcagctgatgggctcatacgattttgggaaaatgaaggaacaaaatcttctcattgcctccttgaggaccataaacacaggaggaataaaatgcgtcaagaatcttacacttcacacagcatccgttctgtccattagtgccagtgatcactggctagcgattggtgctgctgataattctatgtctctttttcatcggccacaagaaagattcggtggcttctcaaatgcaggatcaaaagttgcaggatggcagctttacagaactccccaaaaaactgctgcagtggtgagatgtatagcatctgacctggataggaaaagaatatgtagtggtggtcgcaacggactcctgcggctttgggatgcaactacaagcatctaggactgatagatgttcatgtgaaaaggcaattgacatgatgttgcatgccattttccttttagctaggaatttatgtgctatttagaggatgcgaaaggagccggactttgttctactgtttctttatcatctaaaaaaccctgcccagttgagtatatgtttgacgtcgtgtaaaattttgtttatattttcgggttcagatagccttacgtggctacgattttgtaagaactatgagaaacttgggaagttctgtactactaccagtgcaaatgtttgttttagtacaacattattttttatgtgcatattcatcgtatgaacctg

SEQ ID NO: 37254 - DNA, 1934 bp, Zea Mays
ccttgggcatgatggttttactggtcgcttttacaagcttctgggatggctacttcgaatatttgatggaaaattgttcaaataagtcagcaaattatgtaacgttagttactgcacagctcattctcatggcaactcacatggctggattgggattacctgacattgactcttggaatatgattgagaaaatagccgagagaaacaacttgggttataaacagcttatcaaacttagagcattgctcacacatctgcaacaactccggattggctattggggggttgctacagggaaaagccaaccattgcagtcatatggcatggcttcacctcatgcgatcgatgtgattgatgaaagccaacaacctgctgaagcatctgggttgggccgaagttgggtgcaaagtatgtttagcagagacagaagtttaagagccagctctttcaaccgagctagtgatggaaatgctgttgctgccacgggcaaaaccgaaatctcagctgcacaaaagaaaactcaaactaacatgaggacccttagagggcatacaggtgctattactgctcttcattgcgtaacaagaaaggaggtctgggatcttgttggtgatcgtgaagatgctggttttttcatcagcggaagcacagattgcacggtaaaaatttgggatccaagtttgcgtggttctgaacttcgagcaacacttaaagggcatactagggcaattcgaacaatcagttcagatcgtggcaaaatagtttctggagctgatgatcagtctgtcatagtatgggataagcagacttttaagcttttggaagaactgaagggccacgaggcaccggttagttctgtccggatgctctcaggagaacgtgtccttattgcatcccatgatggtactgtgaagatgtgggatgtccggactgatacttgtgttgttaccgtgggtcgttgccaaagtgctgttctctgtatggaatatgatgattccactgggattctggcggctgctggaagagatatcacggcacatgtctgggatattcgctccagcaagcagatgttcaagcttcaagggcatacaaagtggataagatcaatgaggatgaccggagagaccataataacaggtagtgatgattggactgctagagtgtggtcccttaaccggggaacatgtgatgcagtgttagcatgccatgctggtcccgtactatgtgtggaatactcaccttcagataaaggaattatcactggttcagctgatgggctcatacgattttgggaaaatgaaggaggaataaaatgcgtcaagaatcttacacttcacacagcatccgttctgtccattagtgccagtgatcactggctagcgattggtgctgctgataattctatgtctctttttcatcggccacaagaaagattcggtggcttctcaaatgcaggatcaaaagttgcaggatggcagctttacagaactccccaaaaaactgctgcagtggtgagatgtatagcatctgacctggataggaaaagaatatgtagtggtggtcgcaacggactcctgcggctttgggatgcaactacaagcatctaggactgatagatgttcatgtgaaaaggcaattgacatgatgttgcatgccattttccttttagctaggaatttatgtgctatttagaggatgcgaaaggagccggactttgttctactgtttctttatcatctaaaaaaccctgcccagttgagtatatgtttgacgtcgtgtaaaattttgtttatattttcgggttcagatagccttacgtggctacgattttgtaagaactatgagaaacttgggaagttctgtactactaccagtgcaaatgtttgttttagtacaacattattttttatgtgcatattcatcgtatgaacctg

SEQ ID NO: 37255 - DNA, 2886 bp, Zea Mays
tagaaaacaagataccatgccacttcccgacttaaaacactgtagcatggcttgctgctctgctgcctctgcgttcttcggtgcgccacaaggtcaaggcggtcagcagaactctaatcgccgcaacaacaagaatggcagcagtgggggtaggaacaaccaccaccagaagcaacagccatggtttcagtgtcagcagctggcctggcacagattatgcagtttttggagactcaagggttcttggattatctggagagatgcaacactgcagaagaaaatgcccacaaccttctcgataagttgcaggatgcaaccggaagaggacaaaaccctctaaccatatttccttctcaagtttctgatcctgagattataacaatagccaatcctgagattgaaggactagacaatagacactgctataagaggtttccagcaaatgcaagaacagaagaacaagaagaaaaacgtaagtcgattctagcgttagctagtggggctagtaagcaagtaccgagttctccttctatccgagtaaatgggggcccaaaggcagaaagtctgagcccaagagagagggcggctgagagagaaaggatggttctggacataaaagtgaagctccagggactctggcttcgtcttctgagactaggggcaactgaggatcctctctcatcttttgaatatggcaccatcctagctttgattgagtctgacgcagaaggcatcgggggaagtggctttgttgaatgcatcagagagcatattcattcgggctggcaatgtcgcttgactgatgaacaattcattgctgtaaaagaattgcttaagatggctataactcttgcgaactctcgcaacgacctggcgaccattagagatgctcttgaagtttctgctgaaatgtacagaaaagacccaaacaatgttcaagattatgttcagcgccatctattatcattgtcagtatgggaggagcttcgcttctgggatggctacttcgaatatttgatggaaaattgttcaaataagtcagcaaattatgtaacgttagttactgcacagctcattctcatggcaactcacatggctggattgggattacctgacattgactcttggaatatgattgagaaaatagccgagagaaacaacttgggttataaacagcttatcaaacttagagcattgctcacacatctgcaacaactccggattggctattggggggttgctacagggaaaagccaaccattgcagtcatatggcatggcttcacctcatgcgatcgatgtgattgatgaaagccaacaacctgctgaagcatctgggttgggccgaagttgggtgcaaagtatgtttagcagagacagaagtttaagagccagctctttcaaccgagctagtgatggaaatgctgttgctgccacgggcaaaaccgaaatctcagctgcacaaaagaaaactcaaactaacatgaggacccttagagggcatacaggtgctattactgctcttcattgcgtaacaagaaaggaggtctgggatcttgttggtgatcgtgaagatgctggttttttcatcagcggaagcacagattgcacggtaaaaatttgggatccaagtttgcgtggttctgaacttcgagcaacacttaaagggcatactagggcaattcgaacaatcagttcagatcgtggcaaaatagtttctggagctgatgatcagtctgtcatagtatgggataagcagacttttaagcttttggaagaactgaagggccacgaggcaccggttagttctgtccggatgctctcaggagaacgtgtccttattgcatcccatgatggtactgtgaagatgtgggatgtccggactgatacttgtgttgttaccgtgggtcgttgccaaagtgctgttctctgtatggaatatgatgattccactgggattctggcggctgctggaagagatatcacggcacatgtctgggatattcgctccagcaagcagatgttcaagcttcaagggcatacaaagtggataagatcaatgaggatgaccggagagaccataataacaggtagtgatgattggactgctagagtgtggtcccttaaccggggaacatgtgatgcagtgttagcatgccatgctggtcccgtactatgtgtggaatactcaccttcagataaaggaattatcactggttcagctgatgggctcatacgattttgggaaaatgaaggaggaataaaatgcgtcaagaatcttacacttcacacagcatccgttctgtccattagtgccagtgatcactggctagcgattggtgctgctgataattctatgtctctttttcatcggccacaagaaagattcggtggcttctcaaatgcaggatcaaaagttgcaggatggcagctttacagaactccccaaaaaactgctgcagtggtgagatgtatagcatctgacctggataggaaaagaatatgtagtggtggtcgcaacggactcctgcggctttgggatgcaactacaagcatctaggactgatagatgttcatgtgaaaaggcaattgacatgatgttgcatgccattttccttttagctaggaatttatgtgctatttagaggatgcgaaaggagccggactttgttctactgtttctttatcatctaaaaaaccctgcccagttgagtatatgtttgacgtcgtgtaaaattttgtttatattttcgggttcagatagccttacgtggctacgattttgtaagaactatgagaaacttgggaagttctgtactactaccagtgcaaatgtttgttttagtacaacattattttttatgtgcatattcatcgtatgaacctg

SEQ ID NO: 37256 - DNA, 3062 bp, Zea Mays
atgtgttaataatttccattgtggtagtggtggtagatctcgaatacaaccgtataacaataacggaagaaattcctccaataccagaaactgaacataactttcttcgtgttgagattttaaaattactacaacccaatgtcatgggaattgatttcatgaaaatcaatcttgccaatatgggtgacctaagggctggcacaaaatcatggagtcaggaacatgatttccaacttaggctgatatttttgagattctttgcacagatcctgagtggttatcgtaacttcattgatactacttcagcgactggtttcaattctcaagcttttcttaaaaagcgttctcgagcaactaaccagcctgtcgactccatgtcaatgattatgcagtttttggagactcaagggttcttggattatctggagagatgcaacactgcagaagaaaatgcccacaaccttctcgataagttgcaggatgcaaccggaagaggacaaaaccctctaaccatatttccttctcaagtttctgatcctgagattataacaatagccaatcctgagattgaaggttcaagactagacaatagacactgctataagaggtttccagcaaatgcaagaacagaagaacaagaagaaaaacgtaagtcgattctagcgttagctagtggggctagtaagcaagtaccgagttctccttctatccgagtaaatgggggcccaaaggcagaaagtctgagcccaagagagagggcggctgagagagaaaggatggttctggacataaaagtgaagctccagggactctggcttcgtcttctgagactaggggcaactgaggatcctctctcatcttttgaatatggcaccatcctagctttgattgagtctgacgcagaaggcatcgggggaagtggctttgttgaatgcatcagagagcatattcattcgggctggcaatgtcgcttgactgatgaacaattcattgctgtaaaagaattgcttaagatggctataactcttgcgaactctcgcaacgacctggcgaccattagagatgctcttgaagtttctgctgaaatgtacagaaaagacccaaacaatgttcaagattatgttcagcgccatctattatcattgtcagtatgggaggagcttcgcttctgggatggctacttcgaatatttgatggaaaattgttcaaataagtcagcaaattatgtaacgttagttactgcacagctcattctcatggcaactcacatggctggattgggattacctgacattgactcttggaatatgattgagaaaatagccgagagaaacaacttgggttataaacagcttatcaaacttagagcattgctcacacatctgcaacaactccggattggctattggggggttgctacagggaaaagccaaccattgcagtcatatggcatggcttcacctcatgcgatcgatgtgattgatgaaagccaacaacctgctgaagcatctgggttgggccgaagttgggtgcaaagtatgtttagcagagacagaagtttaagagccagctctttcaaccgagctagtgatggaaatgctgttgctgccacgggcaaaaccgaaatctcagctgcacaaaagaaaactcaaactaacatgaggacccttagagggcatacaggtgctattactgctcttcattgcgtaacaagaaaggaggtctgggatcttgttggtgatcgtgaagatgctggttttttcatcagcggaagcacagattgcacggtaaaaatttgggatccaagtttgcgtggttctgaacttcgagcaacacttaaagggcatactagggcaattcgaacaatcagttcagatcgtggcaaaatagtttctggagctgatgatcagtctgtcatagtatgggataagcagacttttaagcttttggaagaactgaagggccacgaggcaccggttagttctgtccggatgctctcaggagaacgtgtccttattgcatcccatgatggtactgtgaagatgtgggatgtccggactgatacttgtgttgttaccgtgggtcgttgccaaagtgctgttctctgtatggaatatgatgattccactgggattctggcggctgctggaagagatatcacggcacatgtctgggatattcgctccagcaagcagatgttcaagcttcaagggcatacaaagtggataagatcaatgaggatgaccggagagaccataataacaggtagtgatgattggactgctagagtgtggtcccttaaccggggaacatgtgatgcagtgttagcatgccatgctggtcccgtactatgtgtggaatactcaccttcagataaaggaattatcactggttcagctgatgggctcatacgattttgggaaaatgaaggaggaataaaatgcgtcaagaatcttacacttcacacagcatccgttctgtccattagtgccagtgatcactggctagcgattggtgctgctgataattctatgtctctttttcatcggccacaagaaagattcggtggcttctcaaatgcaggatcaaaagttgcaggatggcagctttacagaactccccaaaaaactgctgcagtggtgagatgtatagcatctgacctggataggaaaagaatatgtagtggtggtcgcaacggactcctgcggctttgggatgcaactacaagcatctaggactgatagatgttcatgtgaaaaggcaattgacatgatgttgcatgccattttccttttagctaggaatttatgtgctatttagaggatgcgaaaggagccggactttgttctactgtttctttatcatctaaaaaaccctgcccagttgagtatatgtttgacgtcgtgtaaaattttgtttatattttcgggttcagatagccttacgtggctacgattttgtaagaactatgagaaacttgggaagttctgtactactaccagtgcaaatgtttgttttagtacaacattattttttatgtgcatattcatcgtatgaacctg

SEQ ID NO: 37257 - DNA, 3056 bp, Zea Mays
tggcactaggtttccttccagatgtgttaataatttccattgtggtagtggtggtagatctcgaatacaaccgtataacaataacggaagaaattcctccaataccagaaactgaacataactttcttcgtgttgagattttaaaattactacaacccaatgtcatgggaattgatttcatgaaaatcaatcttgccaatatgggtgacctaagggctggcacaaaatcatggagtcaggaacatgatttccaacttaggctgatatttttgagattctttgcacagatcctgagtggttatcgtaacttcattgatactacttcagcgactggtttcaattctcaagcttttcttaaaaagcgttctcgagcaactaaccagcctgtcgactccatgtcaatgattatgcagtttttggagactcaagggttcttggattatctggagagatgcaacactgcagaagaaaatgcccacaaccttctcgataagttgcaggatgcaaccggaagaggacaaaaccctctaaccatatttccttctcaagtttctgatcctgagattataacaatagccaatcctgagattgaaggactagacaatagacactgctataagaggtttccagcaaatgcaagaacagaagaacaagaagaaaaacgtaagtcgattctagcgttagctagtggggctagtaagcaagtaccgagttctccttctatccgagtaaatgggggcccaaaggcagaaagtctgagcccaagagagagggcggctgagagagaaaggatggttctggacataaaagtgaagctccagggactctggcttcgtcttctgagactaggggcaactgaggatcctctctcatcttttgaatatggcaccatcctagctttgattgagtctgacgcagaaggcatcgggggaagtggctttgttgaatgcatcagagagcatattcattcgggctggcaatgtcgcttgactgatgaacaattcattgctgtaaaagaattgcttaagatggctataactcttgcgaactctcgcaacgacctggcgaccattagagatgctcttgaagtttctgctgaaatgtacagaaaagacccaaacaatgttcaagattatgttcagcgccatctattatcattcttctgggatggctacttcgaatatttgatggaaaattgttcaaataagtcagcaaattatgtaacgttagttactgcacagctcattctcatggcaactcacatggctggattgggattacctgacattgactcttggaatatgattgagaaaatagccgagagaaacaacttgggttataaacagcttatcaaacttagagcattgctcacacatctgcaacaactccggattggctattggggggttgctacagggaaaagccaaccattgcagtcatatggcatggcttcacctcatgcgatcgatgtgattgatgaaagccaacaacctgctgaagcatctgggttgggccgaagttgggtgcaaagtatgtttagcagagacagaagtttaagagccagctctttcaaccgagctagtgatggaaatgctgttgctgccacgggcaaaaccgaaatctcagctgcacaaaagaaaactcaaactaacatgaggacccttagagggcatacaggtgctattactgctcttcattgcgtaacaagaaaggaggtctgggatcttgttggtgatcgtgaagatgctggttttttcatcagcggaagcacagattgcacggtaaaaatttgggatccaagtttgcgtggttctgaacttcgagcaacacttaaagggcatactagggcaattcgaacaatcagttcagatcgtggcaaaatagtttctggagctgatgatcagtctgtcatagtatgggataagcagacttttaagcttttggaagaactgaagggccacgaggcaccggttagttctgtccggatgctctcaggagaacgtgtccttattgcatcccatgatggtactgtgaagatgtgggatgtccggactgatacttgtgttgttaccgtgggtcgttgccaaagtgctgttctctgtatggaatatgatgattccactgggattctggcggctgctggaagagatatcacggcacatgtctgggatattcgctccagcaagcagatgttcaagcttcaagggcatacaaagtggataagatcaatgaggatgaccggagagaccataataacaggtagtgatgattggactgctagagtgtggtcccttaaccggggaacatgtgatgcagtgttagcatgccatgctggtcccgtactatgtgtggaatactcaccttcagataaaggaattatcactggttcagctgatgggctcatacgattttgggaaaatgaaggaggaataaaatgcgtcaagaatcttacacttcacacagcatccgttctgtccattagtgccagtgatcactggctagcgattggtgctgctgataattctatgtctctttttcatcggccacaagaaagattcggtggcttctcaaatgcaggatcaaaagttgcaggatggcagctttacagaactccccaaaaaactgctgcagtggtgagatgtatagcatctgacctggataggaaaagaatatgtagtggtggtcgcaacggactcctgcggctttgggatgcaactacaagcatctaggactgatagatgttcatgtgaaaaggcaattgacatgatgttgcatgccattttccttttagctaggaatttatgtgctatttagaggatgcgaaaggagccggactttgttctactgtttctttatcatctaaaaaaccctgcccagttgagtatatgtttgacgtcgtgtaaaattttgtttatattttcgggttcagatagccttacgtggctacgattttgtaagaactatgagaaacttgggaagttctgtactactaccagtgcaaatgtttgttttagtacaacattattttttatgtgcatattcatcgtatgaacctg

SEQ ID NO: 37258 - DNA, 3842 bp, Zea Mays
aaacacagaagcgaagaaaacgaacgaattgccgctgaatccttaagaacagacgacgatctgacccgcgggcctctcgtccccttcttcctgcacttcagtgtgttttgccagcgggagtaagaatatattcttcagggctggacacagatgatgtctcaacttatccacgtagttatcctatagttttaacagagggagatggctcaaaaatttatgtcagttgtattgcatttcgggatcctatttgtgaagacataattgaggcttaccaaattccggcgaattcgtttgctgataaatgcatctgccttgtgtcccattctcctagtttccaagtccttcgtgatgcccttgaggaaatatttgttctttgtttttctccttcagggtgcagcaagcctttgtgggacataatatctcatatggtgtcacatgtgacattacccacaccaggaaagaatcgtgtcttatttgccattgagaattgtcttctttctgcggaagctcctccaaaagaatggcttccccatgctgatatatcattccagccattggtgcagtgtctggatgttgataaactaatacttctctttacagctgtcctgcttgaaagaaggatattgcttcgatcaaataagtatactctactgactctagtttcagaagccatttgccatttaatatacccaattaggtggcagcatgtctatattccaataatattctctagtggggttgattacattgatgccccgacaccctacatgatggggcttcattctggtgttgacacatctgcagtgacaatggatggtgtagtggtggtagatctcgaatacaaccgtataacaataacggaagaaattcctccaataccagaaactgaacataactttcttcgtgttgagattttaaaattactacaacccaatgtcatgggaattgatttcatgaaaatcaatcttgccaatatgggtgacctaagggctggcacaaaatcatggagtcaggaacatgatttccaacttaggctgatatttttgagattctttgcacagatcctgagtggttatcgtaacttcattgatactacttcagcgactggtttcaattctcaagcttttcttaaaaagcgttctcgagcaactaaccagcctgtcgactccatgtcaatgtttttggagactcaagggttcttggattatctggagagatgcaacactgcagaagaaaatgcccacaaccttctcgataagttgcaggatgcaaccggaagaggacaaaaccctctaaccatatttccttctcaagtttctgatcctgagattataacaatagccaatcctgagattgaaggactagacaatagacactgctataagaggtttccagcaaatgcaagaacagaagaacaagaagaaaaacgtaagtcgattctagcgttagctagtggggctagtaagcaagtaccgagttctccttctatccgagtaaatgggggcccaaaggcagaaagtctgagcccaagagagagggcggctgagagagaaaggatggttctggacataaaagtgaagctccagggactctggcttcgtcttctgagactaggggcaactgaggatcctctctcatcttttgaatatggcaccatcctagctttgattgagtctgacgcagaaggcatcgggggaagtggctttgttgaatgcatcagagagcatattcattcgggctggcaatgtcgcttgactgatgaacaattcattgctgtaaaagaattgcttaagatggctataactcttgcgaactctcgcaacgacctggcgaccattagagatgctcttgaagtttctgctgaaatgtacagaaaagacccaaacaatgttcaagattatgttcagcgccatctattatcattgtcagtatgggaggagcttcgcttctgggatggctacttcgaatatttgatggaaaattgttcaaataagtcagcaaattatgtaacgttagttactgcacagctcattctcatggcaactcacatggctggattgggattacctgacattgactcttggaatatgattgagaaaatagccgagagaaacaacttgggttataaacagcttatcaaacttagagcattgctcacacatctgcaacaactccggattggctattggggggttgctacagggaaaagccaaccattgcagtcatatggcatggcttcacctcatgcgatcgatgtgattgatgaaagccaacaacctgctgaagcatctgggttgggccgaagttgggtgcaaagtatgtttagcagagacagaagtttaagagccagctctttcaaccgagctagtgatggaaatgctgttgctgccacgggcaaaaccgaaatctcagctgcacaaaagaaaactcaaactaacatgaggacccttagagggcatacaggtgctattactgctcttcattgcgtaacaagaaaggaggtctgggatcttgttggtgatcgtgaagatgctggttttttcatcagcggaagcacagattgcacggtaaaaatttgggatccaagtttgcgtggttctgaacttcgagcaacacttaaagggcatactagggcaattcgaacaatcagttcagatcgtggcaaaatagtttctggagctgatgatcagtctgtcatagtatgggataagcagacttttaagcttttggaagaactgaagggccacgaggcaccggttagttctgtccggatgctctcaggagaacgtgtccttattgcatcccatgatggtactgtgaagatgtgggatgtccggactgatacttgtgttgttaccgtgggtcgttgccaaagtgctgttctctgtatggaatatgatgattccactgggattctggcggctgctggaagagatatcacggcacatgtctgggatattcgctccagcaagcagatgttcaagcttcaagggcatacaaagtggataagatcaatgaggatgaccggagagaccataataacaggtagtgatgattggactgctagagtgtggtcccttaaccggggaacatgtgatgcagtgttagcatgccatgctggtcccgtactatgtgtggaatactcaccttcagataaaggaattatcactggttcagctgatgggctcatacgattttgggaaaatgaaggaggaataaaatgcgtcaagaatcttacacttcacacagcatccgttctgtccattagtgccagtgatcactggctagcgattggtgctgctgataattctatgtctctttttcatcggccacaagaaagattcggtggcttctcaaatgcaggatcaaaagttgcaggatggcagctttacagaactccccaaaaaactgctgcagtggtgagatgtatagcatctgacctggataggaaaagaatatgtagtggtggtcgcaacggactcctgcggctttgggatgcaactacaagcatctaggactgatagatgttcatgtgaaaaggcaattgacatgatgttgcatgccattttccttttagctaggaatttatgtgctatttagaggatgcgaaaggagccggactttgttctactgtttctttatcatctaaaaaaccctgcccagttgagtatatgtttgacgtcgtgtaaaattttgtttatattttcgggttcagatagccttacgtggctacgattttgtaagaactatgagaaacttgggaagttctgtactactaccagtgcaaatgtttgttttagtacaacattattttttatgtgcatattcatcgtatgaacctg

SEQ ID NO: 37259 - DNA, 3851 bp, Zea Mays
aaacacagaagcgaagaaaacgaacgaattgccgctgaatccttaagaacagacgacgatctgacccgcgggcctctcgtccccttcttcctgcacttcagtgtgttttgccagcgggagtaagaatatattcttcagggctggacacagatgatgtctcaacttatccacgtagttatcctatagttttaacagagggagatggctcaaaaatttatgtcagttgtattgcatttcgggatcctatttgtgaagacataattgaggcttaccaaattccggcgaattcgtttgctgataaatgcatctgccttgtgtcccattctcctagtttccaagtccttcgtgatgcccttgaggaaatatttgttctttgtttttctccttcagggtgcagcaagcctttgtgggacataatatctcatatggtgtcacatgtgacattacccacaccaggaaagaatcgtgtcttatttgccattgagaattgtcttctttctgcggaagctcctccaaaagaatggcttccccatgctgatatatcattccagccattggtgcagtgtctggatgttgataaactaatacttctctttacagctgtcctgcttgaaagaaggatattgcttcgatcaaataagtatactctactgactctagtttcagaagccatttgccatttaatatacccaattaggtggcagcatgtctatattccaataatattctctagtggggttgattacattgatgccccgacaccctacatgatggggcttcattctggtgttgacacatctgcagtgacaatggatggtgtagtggtggtagatctcgaatacaaccgtataacaataacggaagaaattcctccaataccagaaactgaacataactttcttcgtgttgagattttaaaattactacaacccaatgtcatgggaattgatttcatgaaaatcaatcttgccaatatgggtgacctaagggctggcacaaaatcatggagtcaggaacatgatttccaacttaggctgatatttttgagattctttgcacagatcctgagtggttatcgtaacttcattgatactacttcagcgactggtttcaattctcaagcttttcttaaaaagcgttctcgagcaactaaccagcctgtcgactccatgtcaatgattatgcagtttttggagactcaagggttcttggattatctggagagatgcaacactgcagaagaaaatgcccacaaccttctcgataagttgcaggatgcaaccggaagaggacaaaaccctctaaccatatttccttctcaagtttctgatcctgagattataacaatagccaatcctgagattgaaggactagacaatagacactgctataagaggtttccagcaaatgcaagaacagaagaacaagaagaaaaacgtaagtcgattctagcgttagctagtggggctagtaagcaagtaccgagttctccttctatccgagtaaatgggggcccaaaggcagaaagtctgagcccaagagagagggcggctgagagagaaaggatggttctggacataaaagtgaagctccagggactctggcttcgtcttctgagactaggggcaactgaggatcctctctcatcttttgaatatggcaccatcctagctttgattgagtctgacgcagaaggcatcgggggaagtggctttgttgaatgcatcagagagcatattcattcgggctggcaatgtcgcttgactgatgaacaattcattgctgtaaaagaattgcttaagatggctataactcttgcgaactctcgcaacgacctggcgaccattagagatgctcttgaagtttctgctgaaatgtacagaaaagacccaaacaatgttcaagattatgttcagcgccatctattatcattgtcagtatgggaggagcttcgcttctgggatggctacttcgaatatttgatggaaaattgttcaaataagtcagcaaattatgtaacgttagttactgcacagctcattctcatggcaactcacatggctggattgggattacctgacattgactcttggaatatgattgagaaaatagccgagagaaacaacttgggttataaacagcttatcaaacttagagcattgctcacacatctgcaacaactccggattggctattggggggttgctacagggaaaagccaaccattgcagtcatatggcatggcttcacctcatgcgatcgatgtgattgatgaaagccaacaacctgctgaagcatctgggttgggccgaagttgggtgcaaagtatgtttagcagagacagaagtttaagagccagctctttcaaccgagctagtgatggaaatgctgttgctgccacgggcaaaaccgaaatctcagctgcacaaaagaaaactcaaactaacatgaggacccttagagggcatacaggtgctattactgctcttcattgcgtaacaagaaaggaggtctgggatcttgttggtgatcgtgaagatgctggttttttcatcagcggaagcacagattgcacggtaaaaatttgggatccaagtttgcgtggttctgaacttcgagcaacacttaaagggcatactagggcaattcgaacaatcagttcagatcgtggcaaaatagtttctggagctgatgatcagtctgtcatagtatgggataagcagacttttaagcttttggaagaactgaagggccacgaggcaccggttagttctgtccggatgctctcaggagaacgtgtccttattgcatcccatgatggtactgtgaagatgtgggatgtccggactgatacttgtgttgttaccgtgggtcgttgccaaagtgctgttctctgtatggaatatgatgattccactgggattctggcggctgctggaagagatatcacggcacatgtctgggatattcgctccagcaagcagatgttcaagcttcaagggcatacaaagtggataagatcaatgaggatgaccggagagaccataataacaggtagtgatgattggactgctagagtgtggtcccttaaccggggaacatgtgatgcagtgttagcatgccatgctggtcccgtactatgtgtggaatactcaccttcagataaaggaattatcactggttcagctgatgggctcatacgattttgggaaaatgaaggaggaataaaatgcgtcaagaatcttacacttcacacagcatccgttctgtccattagtgccagtgatcactggctagcgattggtgctgctgataattctatgtctctttttcatcggccacaagaaagattcggtggcttctcaaatgcaggatcaaaagttgcaggatggcagctttacagaactccccaaaaaactgctgcagtggtgagatgtatagcatctgacctggataggaaaagaatatgtagtggtggtcgcaacggactcctgcggctttgggatgcaactacaagcatctaggactgatagatgttcatgtgaaaaggcaattgacatgatgttgcatgccattttccttttagctaggaatttatgtgctatttagaggatgcgaaaggagccggactttgttctactgtttctttatcatctaaaaaaccctgcccagttgagtatatgtttgacgtcgtgtaaaattttgtttatattttcgggttcagatagccttacgtggctacgattttgtaagaactatgagaaacttgggaagttctgtactactaccagtgcaaatgtttgttttagtacaacattattttttatgtgcatattcatcgtatgaacctg

SEQ ID NO: 37260 - DNA, 4173 bp, Zea Mays
aaacacagaagcgaagaaaacgaacgaattgccgctgaatccttaagaacagacgacgatctgacccgcgggcctctcgtccccttcttcctgcacttcaggtctgcaaccatcatctatctggcttcctattccgcttggtcgcttccctccctccctcgtcctgctcgcgcgcggagtgagcctacaccacagggagaagcaggcgccaaccgtgacaccgagggtacctaactggaggccggtgatctccggttccggcggcggagatggggtcgtcgtcgcggatcttcgagtacttcgtagtgtgcgggctgggcccggagatccggtccctggatggcatcaagggtttccatggcgttgaggagatgtacatgtcggccttccttgaccagttcccgccgtccaaccacgctctgtaccctcctcctcctccgcagctccccacctgtgttttgccagcgggagtaagaatatattcttcagggctggacacagatgatgtctcaacttatccacgtagttatcctatagttttaacagagggagatggctcaaaaatttatgtcagttgtattgcatttcgggatcctatttgtgaagacataattgaggcttaccaaattccggcgaattcgtttgctgataaatgcatctgccttgtgtcccattctcctagtttccaagtccttcgtgatgcccttgaggaaatatttgttctttgtttttctccttcagggtgcagcaagcctttgtgggacataatatctcatatggtgtcacatgtgacattacccacaccaggaaagaatcgtgtcttatttgccattgagaattgtcttctttctgcggaagctcctccaaaagaatggcttccccatgctgatatatcattccagccattggtgcagtgtctggatgttgataaactaatacttctctttacagctgtcctgcttgaaagaaggatattgcttcgatcaaataagtatactctactgactctagtttcagaagccatttgccatttaatatacccaattaggtggcagcatgtctatattccaataatattctctagtggggttgattacattgatgccccgacaccctacatgatggggcttcattctggtgttgacacatctgcagtgacaatggatggtgtagtggtggtagatctcgaatacaaccgtataacaataacggaagaaattcctccaataccagaaactgaacataactttcttcgtgttgagattttaaaattactacaacccaatgtcatgggaattgatttcatgaaaatcaatcttgccaatatgggtgacctaagggctggcacaaaatcatggagtcaggaacatgatttccaacttaggctgatatttttgagattctttgcacagatcctgagtggttatcgtaacttcattgatactacttcagcgactggtttcaattctcaagcttttcttaaaaagcgttctcgagcaactaaccagcctgtcgactccatgtcaatgattatgcagtttttggagactcaagggttcttggattatctggagagatgcaacactgcagaagaaaatgcccacaaccttctcgataagttgcaggatgcaaccggaagaggacaaaaccctctaaccatatttccttctcaagtttctgatcctgagattataacaatagccaatcctgagattgaaggttcaagactagacaatagacactgctataagaggtttccagcaaatgcaagaacagaagaacaagaagaaaaacgtaagtcgattctagcgttagctagtggggctagtaagcaagtaccgagttctccttctatccgagtaaatgggggcccaaaggcagaaagtctgagcccaagagagagggcggctgagagagaaaggatggttctggacataaaagtgaagctccagggactctggcttcgtcttctgagactaggggcaactgaggatcctctctcatcttttgaatatggcaccatcctagctttgattgagtctgacgcagaaggcatcgggggaagtggctttgttgaatgcatcagagagcatattcattcgggctggcaatgtcgcttgactgatgaacaattcattgctgtaaaagaattgcttaagatggctataactcttgcgaactctcgcaacgacctggcgaccattagagatgctcttgaagtttctgctgaaatgtacagaaaagacccaaacaatgttcaagattatgttcagcgccatctattatcattgtcagtatgggaggagcttcgcttctgggatggctacttcgaatatttgatggaaaattgttcaaataagtcagcaaattatgtaacgttagttactgcacagctcattctcatggcaactcacatggctggattgggattacctgacattgactcttggaatatgattgagaaaatagccgagagaaacaacttgggttataaacagcttatcaaacttagagcattgctcacacatctgcaacaactccggattggctattggggggttgctacagggaaaagccaaccattgcagtcatatggcatggcttcacctcatgcgatcgatgtgattgatgaaagccaacaacctgctgaagcatctgggttgggccgaagttgggtgcaaagtatgtttagcagagacagaagtttaagagccagctctttcaaccgagctagtgatggaaatgctgttgctgccacgggcaaaaccgaaatctcagctgcacaaaagaaaactcaaactaacatgaggacccttagagggcatacaggtgctattactgctcttcattgcgtaacaagaaaggaggtctgggatcttgttggtgatcgtgaagatgctggttttttcatcagcggaagcacagattgcacggtaaaaatttgggatccaagtttgcgtggttctgaacttcgagcaacacttaaagggcatactagggcaattcgaacaatcagttcagatcgtggcaaaatagtttctggagctgatgatcagtctgtcatagtatgggataagcagacttttaagcttttggaagaactgaagggccacgaggcaccggttagttctgtccggatgctctcaggagaacgtgtccttattgcatcccatgatggtactgtgaagatgtgggatgtccggactgatacttgtgttgttaccgtgggtcgttgccaaagtgctgttctctgtatggaatatgatgattccactgggattctggcggctgctggaagagatatcacggcacatgtctgggatattcgctccagcaagcagatgttcaagcttcaagggcatacaaagtggataaggtagtgatgattggactgctagagtgtggtcccttaaccggggaacatgtgatgcagtgttagcatgccatgctggtcccgtactatgtgtggaatactcaccttcagataaaggaattatcactggttcagctgatgggctcatacgattttgggaaaatgaaggaggaataaaatgcgtcaagaatcttacacttcacacagcatccgttctgtccattagtgccagtgatcactggctagcgattggtgctgctgataattctatgtctctttttcatcggccacaagaaagattcggtggcttctcaaatgcaggatcaaaagttgcaggatggcagctttacagaactccccaaaaaactgctgcagtggtgagatgtatagcatctgacctggataggaaaagaatatgtagtggtggtcgcaacggactcctgcggctttgggatgcaactacaagcatctaggactgatagatgttcatgtgaaaaggcaattgacatgatgttgcatgccattttccttttagctaggaatttatgtgctatttagaggatgcgaaaggagccggactttgttctactgtttctttatcatctaaaaaaccctgcccagttgagtatatgtttgacgtcgtgtaaaattttgtttatattttcgggttcagatagccttacgtggctacgattttgtaagaactatgagaaacttgggaagttctgtactactaccagtgcaaatgtttgttttagtacaacattattttttatgtgcatattcatcgtatgaacctg

SEQ ID NO: 37261 - DNA, 4192 bp, Zea Mays
gaacaattaaacacagaagcgaagaaaacgaacgaattgccgctgaatccttaagaacagacgacgatctgacccgcgggcctctcgtccccttcttcctgcacttcaggtctgcaaccatcatctatctggcttcctattccgcttggtcgcttccctccctccctcgtcctgctcgcgcgcggagtgagcctacaccacagggagaagcaggcgccaaccgtgacaccgagggtacctaactggaggccggtgatctccggttccggcggcggagatggggtcgtcgtcgcggatcttcgagtacttcgtagtgtgcgggctgggcccggagatccggtccctggatggcatcaagggtttccatggcgttgaggagatgtacatgtcggccttccttgaccagttcccgccgtccaaccacgctctgtaccctcctcctcctccgcagctccccacctgtgttttgccagcgggagtaagaatatattcttcagggctggacacagatgatgtctcaacttatccacgtagttatcctatagttttaacagagggagatggctcaaaaatttatgtcagttgtattgcatttcgggatcctatttgtgaagacataattgaggcttaccaaattccggcgaattcgtttgctgataaatgcatctgccttgtgtcccattctcctagtttccaagtccttcgtgatgcccttgaggaaatatttgttctttgtttttctccttcagggtgcagcaagcctttgtgggacataatatctcatatggtgtcacatgtgacattacccacaccaggaaagaatcgtgtcttatttgccattgagaattgtcttctttctgcggaagctcctccaaaagaatggcttccccatgctgatatatcattccagccattggtgcagtgtctggatgttgataaactaatacttctctttacagctgtcctgcttgaaagaaggatattgcttcgatcaaataagtatactctactgactctagtttcagaagccatttgccatttaatatacccaattaggtggcagcatgtctatattccaataatattctctagtggggttgattacattgatgccccgacaccctacatgatggggcttcattctggtgttgacacatctgcagtgacaatggatggtgtagtggtggtagatctcgaatacaaccgtataacaataacggaagaaattcctccaataccagaaactgaacataactttcttcgtgttgagattttaaaattactacaacccaatgtcatgggaattgatttcatgaaaatcaatcttgccaatatgggtgacctaagggctggcacaaaatcatggagtcaggaacatgatttccaacttaggctgatatttttgagattctttgcacagatcctgagtggttatcgtaacttcattgatactacttcagcgactggtttcaattctcaagcttttcttaaaaagcgttctcgagcaactaaccagcctgtcgactccatgtcaatgattatgcagtttttggagactcaagggttcttggattatctggagagatgcaacactgcagaagaaaatgcccacaaccttctcgataagttgcaggatgcaaccggaagaggacaaaaccctctaaccatatttccttctcaagtttctgatcctgagattataacaatagccaatcctgagattgaaggactagacaatagacactgctataagaggtttccagcaaatgcaagaacagaagaacaagaagaaaaacgtaagtcgattctagcgttagctagtggggctagtaagcaagtaccgagttctccttctatccgagtaaatgggggcccaaaggcagaaagtctgagcccaagagagagggcggctgagagagaaaggatggttctggacataaaagtgaagctccagggactctggcttcgtcttctgagactaggggcaactgaggatcctctctcatcttttgaatatggcaccatcctagctttgattgagtctgacgcagaaggcatcgggggaagtggctttgttgaatgcatcagagagcatattcattcgggctggcaatgtcgcttgactgatgaacaattcattgctgtaaaagaattgcttaagatggctataactcttgcgaactctcgcaacgacctggcgaccattagagatgctcttgaagtttctgctgaaatgtacagaaaagacccaaacaatgttcaagattatgttcagcgccatctattatcattgtcagtatgggaggagcttcgcttctgggatggctacttcgaatatttgatggaaaattgttcaaataagtcagcaaattatgtaacgttagttactgcacagctcattctcatggcaactcacatggctggattgggattacctgacattgactcttggaatatgattgagaaaatagccgagagaaacaacttgggttataaacagcttatcaaacttagagcattgctcacacatctgcaacaactccggattggctattggggggttgctacagggaaaagccaaccattgcagtcatatggcatggcttcacctcatgcgatcgatgtgattgatgaaagccaacaacctgctgaagcatctgggttgggccgaagttgggtgcaaagtatgtttagcagagacagaagtttaagagccagctctttcaaccgagctagtgatggaaatgctgttgctgccacgggcaaaaccgaaatctcagctgcacaaaagaaaactcaaactaacatgaggacccttagagggcatacaggtgctattactgctcttcattgcgtaacaagaaaggaggtctgggatcttgttggtgatcgtgaagatgctggttttttcatcagcggaagcacagattgcacggtaaaaatttgggatccaagtttgcgtggttctgaacttcgagcaacacttaaagggcatactagttcagatcgtggcaaaatagtttctggagctgatgatcagtctgtcatagtatgggataagcagacttttaagcttttggaagaactgaagggccacgaggcaccggttagttctgtccggatgctctcaggagaacgtgtccttattgcatcccatgatggtactgtgaagatgtgggatgtccggactgatacttgtgttgttaccgtgggtcgttgccaaagtgctgttctctgtatggaatatgatgattccactgggattctggcggctgctggaagagatatcacggcacatgtctgggatattcgctccagcaagcagatgttcaagcttcaagggcatacaaagtggataagatcaatgaggatgaccggagagaccataataacaggtagtgatgattggactgctagagtgtggtcccttaaccggggaacatgtgatgcagtgttagcatgccatgctggtcccgtactatgtgtggaatactcaccttcagataaaggaattatcactggttcagctgatgggctcatacgattttgggaaaatgaaggaggaataaaatgcgtcaagaatcttacacttcacacagcatccgttctgtccattagtgccagtgatcactggctagcgattggtgctgctgataattctatgtctctttttcatcggccacaagaaagattcggtggcttctcaaatgcaggatcaaaagttgcaggatggcagctttacagaactccccaaaaaactgctgcagtggtgagatgtatagcatctgacctggataggaaaagaatatgtagtggtggtcgcaacggactcctgcggctttgggatgcaactacaagcatctaggactgatagatgttcatgtgaaaaggcaattgacatgatgttgcatgccattttccttttagctaggaatttatgtgctatttagaggatgcgaaaggagccggactttgttctactgtttctttatcatctaaaaaaccctgcccagttgagtatatgtttgacgtcgtgtaaaattttgtttatattttcgggttcagatagccttacgtggctacgattttgtaagaactatgagaaacttgggaagttctgtactactaccagtgcaaatgtttgttttagtacaacattattttttatgtgcatattcatcgtatgaacctg

SEQ ID NO: 37262 - DNA, 4162 bp, Zea Mays
gaacaattaaacacagaagcgaagaaaacgaacgaattgccgctgaatccttaagaacagacgacgatctgacccgcgggcctctcgtccccttcttcctgcacttcaggtctgcaaccatcatctatctggcttcctattccgcttggtcgcttccctccctccctcgtcctgctcgcgcgcggagtgagcctacaccacagggagaagcaggcgccaaccgtgacaccgagggtacctaactggaggccggtgatctccggttccggcggcggagatggggtcgtcgtcgcggatcttcgagtacttcgtagtgtgcgggctgggcccggagatccggtccctggatggcatcaagggtttccatggcgttgaggagatgtacatgtcggccttccttgaccagttcccgccgtccaaccacgctctgtaccctcctcctcctccgcagctccccacctgtgttttgccagcgggagtaagaatatattcttcagggctggacacagatgatgtctcaacttatccacgtagttatcctatagttttaacagagggagatggctcaaaaatttatgtcagttgtattgcatttcgggatcctatttgtgaagacataattgaggcttaccaaattccggcgaattcgtttgctgataaatgcatctgccttgtgtcccattctcctagtttccaagtccttcgtgatgcccttgaggaaatatttgttctttgtttttctccttcagggtgcagcaagcctttgtgggacataatatctcatatggtgtcacatgtgacattacccacaccaggaaagaatcgtgtcttatttgccattgagaattgtcttctttctgcggaagctcctccaaaagaatggcttccccatgctgatatatcattccagccattggtgcagtgtctggatgttgataaactaatacttctctttacagctgtcctgcttgaaagaaggatattgcttcgatcaaataagtatactctactgactctagtttcagaagccatttgccatttaatatacccaattaggtggcagcatgtctatattccaataatattctctagtggggttgattacattgatgccccgacaccctacatgatggggcttcattctggtgttgacacatctgcagtgacaatggatggtgtagtggtggtagatctcgaatacaaccgtataacaataacggaagaaattcctccaataccagaaactgaacataactttcttcgtgttgagattttaaaattactacaacccaatgtcatgggaattgatttcatgaaaatcaatcttgccaatatgggtgacctaagggctggcacaaaatcatggagtcaggaacatgatttccaacttaggctgatatttttgagattctttgcacagatcctgagtggttatcgtaacttcattgatactacttcagcgactggtttcaattctcaagcttttcttaaaaagcgttctcgagcaactaaccagcctgtcgactccatgtcaatgattatgcagtttttggagactcaagggttcttggattatctggagagatgcaacactgcagaagaaaatgcccacaaccttctcgataagttgcaggatgcaaccggaagaggacaaaaccctctaaccatatttccttctcaagtttctgatcctgagattataacaatagccaatcctgagattgaaggactagacaatagacactgctataagaggtttccagcaaatgcaagaacagaagaacaagaagaaaaacgtaagtcgattctagcgttagctagtggggctagtaagcaagtaccgagttctccttctatccgagtaaatgggggcccaaaggcagaaagtctgagcccaagagagagggcggctgagagagaaaggatggttctggacataaaagtgaagctccagggactctggcttcgtcttctgagactaggggcaactgaggatcctctctcatcttttgaatatggcaccatcctagctttgattgagtctgacgcagaaggcatcgggggaagtggctttgttgaatgcatcagagagcatattcattcgggctggcaatgtcgcttgactgatgaacaattcattgctgtaaaagaattgcttaagatggctataactcttgcgaactctcgcaacgacctggcgaccattagagatgctcttgaagtttctgctgaaatgtacagaaaagacccaaacaatgttcaagattatgttcagcgccatctattatcattgtcagtatgggaggagcttcggtcagcaaattatgtaacgttagttactgcacagctcattctcatggcaactcacatggctggattgggattacctgacattgactcttggaatatgattgagaaaatagccgagagaaacaacttgggttataaacagcttatcaaacttagagcattgctcacacatctgcaacaactccggattggctattggggggttgctacagggaaaagccaaccattgcagtcatatggcatggcttcacctcatgcgatcgatgtgattgatgaaagccaacaacctgctgaagcatctgggttgggccgaagttgggtgcaaagtatgtttagcagagacagaagtttaagagccagctctttcaaccgagctagtgatggaaatgctgttgctgccacgggcaaaaccgaaatctcagctgcacaaaagaaaactcaaactaacatgaggacccttagagggcatacaggtgctattactgctcttcattgcgtaacaagaaaggaggtctgggatcttgttggtgatcgtgaagatgctggttttttcatcagcggaagcacagattgcacggtaaaaatttgggatccaagtttgcgtggttctgaacttcgagcaacacttaaagggcatactagggcaattcgaacaatcagttcagatcgtggcaaaatagtttctggagctgatgatcagtctgtcatagtatgggataagcagacttttaagcttttggaagaactgaagggccacgaggcaccggttagttctgtccggatgctctcaggagaacgtgtccttattgcatcccatgatggtactgtgaagatgtgggatgtccggactgatacttgtgttgttaccgtgggtcgttgccaaagtgctgttctctgtatggaatatgatgattccactgggattctggcggctgctggaagagatatcacggcacatgtctgggatattcgctccagcaagcagatgttcaagcttcaagggcatacaaagtggataagatcaatgaggatgaccggagagaccataataacaggtagtgatgattggactgctagagtgtggtcccttaaccggggaacatgtgatgcagtgttagcatgccatgctggtcccgtactatgtgtggaatactcaccttcagataaaggaattatcactggttcagctgatgggctcatacgattttgggaaaatgaaggaggaataaaatgcgtcaagaatcttacacttcacacagcatccgttctgtccattagtgccagtgatcactggctagcgattggtgctgctgataattctatgtctctttttcatcggccacaagaaagattcggtggcttctcaaatgcaggatcaaaagttgcaggatggcagctttacagaactccccaaaaaactgctgcagtggtgagatgtatagcatctgacctggataggaaaagaatatgtagtggtggtcgcaacggactcctgcggctttgggatgcaactacaagcatctaggactgatagatgttcatgtgaaaaggcaattgacatgatgttgcatgccattttccttttagctaggaatttatgtgctatttagaggatgcgaaaggagccggactttgttctactgtttctttatcatctaaaaaaccctgcccagttgagtatatgtttgacgtcgtgtaaaattttgtttatattttcgggttcagatagccttacgtggctacgattttgtaagaactatgagaaacttgggaagttctgtactactaccagtgcaaatgtttgttttagtacaacattattttttatgtgcatattcatcgtatgaacctg

SEQ ID NO: 37263 - DNA, 4139 bp, Zea Mays
gtaaaaaaagggcgaacaattaaacacagaagcgaagaaaacgaacgaattgccgctgaatccttaagaacagacgacgatctgacccgcgggcctctcgtccccttcttcctgcacttcaggtctgcaaccatcatctatctggcttcctattccgcttggtcgcttccctccctccctcgtcctgctcgcgcgcggagtgagcctacaccacagggagaagcaggcgccaaccgtgacaccgagggtacctaactggaggccggtgatctccggttccggcggcggagatggggtcgtcgtcgcggatcttcgagtacttcgtagtgtgcgggctgggcccggagatccggtccctggatggcatcaagggtttccatggcgttgaggagatgtacatgtcggccttccttgaccagttcccgccgtccaaccacgctctgtaccctcctcctcctccgcagctccccacctgtgttttgccagcgggagtaagaatatattcttcagggctggacacagatgatgtctcaacttatccacgtagttatcctatagttttaacagagggagatggctcaaaaatttatgtcagttgtattgcatttcgggatcctatttgtgaagacataattgaggcttaccaaattccggcgaattcgtttgctgataaatgcatctgccttgtgtcccattctcctagtttccaagtccttcgtgatgcccttgaggaaatatttgttctttgtttttctccttcagggtgcagcaagcctttgtgggacataatatctcatatggtgtcacatgtgacattacccacaccaggaaagaatcgtgtcttatttgccattgagaattgtcttctttctgcggaagctcctccaaaagaatggcttccccatgctgatatatcattccagccattggtgcagtgtctggatgttgataaactaatacttctctttacagctgtcctgcttgaaagaaggatattgcttcgatcaaataagtatactctactgactctagtttcagaagccatttgccatttaatatacccaattaggtggcagcatgtctatattccaataatattctctagtggggttgattacattgatgccccgacaccctacatgatggggcttcattctggtgttgacacatctgcagtgacaatggatggtgtagtggtggtagatctcgaatacaaccgtataacaataacggaagaaattcctccaataccagaaactgaacataactttcttcgtgttgagattttaaaattactacaacccaatgtcatgggaattgatttcatgaaaatcaatcttgccaatatgggtgacctaagggctggcacaaaatcatggagtcaggaacatgatttccaacttaggctgatatttttgagattctttgcacagatcctgagtggttatcgtaacttcattgatactacttcagcgactggtttcaattctcaagcttttcttaaaaagcgttctcgagcaactaaccagcctgtcgactccatgtcaatgattatgcagtttttggagactcaagggttcttggattatctggagagatgcaacactgcagaagaaaatgcccacaaccttctcgataagttgcaggatgcaaccggaagaggacaaaaccctctaaccatatttccttctcaagtttctgatcctgagattataacaatagccaatcctgagattgaaggactagacaatagacactgctataagaggtttccagcaaatgcaagaacagaagaacaagaagaaaaacttctccttctatccgagtaaatgggggcccaaaggcagaaagtctgagcccaagagagagggcggctgagagagaaaggatggttctggacataaaagtgaagctccagggactctggcttcgtcttctgagactaggggcaactgaggatcctctctcatcttttgaatatggcaccatcctagctttgattgagtctgacgcagaaggcatcgggggaagtggctttgttgaatgcatcagagagcatattcattcgggctggcaatgtcgcttgactgatgaacaattcattgctgtaaaagaattgcttaagatggctataactcttgcgaactctcgcaacgacctggcgaccattagagatgctcttgaagtttctgctgaaatgtacagaaaagacccaaacaatgttcaagattatgttcagcgccatctattatcattgtcagtatgggaggagcttcgcttctgggatggctacttcgaatatttgatggaaaattgttcaaataagtcagcaaattatgtaacgttagttactgcacagctcattctcatggcaactcacatggctggattgggattacctgacattgactcttggaatatgattgagaaaatagccgagagaaacaacttgggttataaacagcttatcaaacttagagcattgctcacacatctgcaacaactccggattggctattggggggttgctacagggaaaagccaaccattgcagtcatatggcatggcttcacctcatgcgatcgatgtgattgatgaaagccaacaacctgctgaagcatctgggttgggccgaagttgggtgcaaagtatgtttagcagagacagaagtttaagagccagctctttcaaccgagctagtgatggaaatgctgttgctgccacgggcaaaaccgaaatctcagctgcacaaaagaaaactcaaactaacatgaggacccttagagggcatacaggtgctattactgctcttcattgcgtaacaagaaaggaggtctgggatcttgttggtgatcgtgaagatgctggttttttcatcagcggaagcacagattgcacggtaaaaatttgggatccaagtttgcgtggttctgaacttcgagcaacacttaaagggcatactagggcaattcgaacaatcagttcagatcgtggcaaaatagtttctggagctgatgatcagtctgtcatagtatgggataagcagacttttaagcttttggaagaactgaagggccacgaggcaccggttagttctgtccggatgctctcaggagaacgtgtccttattgcatcccatgatggtactgtgaagatgtgggatgtccggactgatacttgtgttgttaccgtgggtcgttgccaaagtgctgttctctgtatggaatatgatgattccactgggattctggcggctgctggaagagatatcacggcacatgtctgggatattcgctccagcaagcagatgttcaagcttcaagggcatacaaagtggataaggtagtgatgattggactgctagagtgtggtcccttaaccggggaacatgtgatgcagtgttagcatgccatgctggtcccgtactatgtgtggaatactcaccttcagataaaggaattatcactggttcagctgatgggctcatacgattttgggaaaatgaaggaggaataaaatgcgtcaagaatcttacacttcacacagcatccgttctgtccattagtgccagtgatcactggctagcgattggtgctgctgataattctatgtctctttttcatcggccacaagaaagattcggtggcttctcaaatgcaggatcaaaagttgcaggatggcagctttacagaactccccaaaaaactgctgcagtggtgagatgtatagcatctgacctggataggaaaagaatatgtagtggtggtcgcaacggactcctgcggctttgggatgcaactacaagcatctaggactgatagatgttcatgtgaaaaggcaattgacatgatgttgcatgccattttccttttagctaggaatttatgtgctatttagaggatgcgaaaggagccggactttgttctactgtttctttatcatctaaaaaaccctgcccagttgagtatatgtttgacgtcgtgtaaaattttgtttatattttcgggttcagatagccttacgtggctacgattttgtaagaactatgagaaacttgggaagttctgtactactaccagtgcaaatgtttgttttagtacaacattattttttatgtgcatattcatcgtatgaacctg

SEQ ID NO: 37264 - DNA, 4233 bp, Zea Mays
catcatcgtcgtaaaaaaagggcgaacaattaaacacagaagcgaagaaaacgaacgaattgccgctgaatccttaagaacagacgacgatctgacccgcgggcctctcgtccccttcttcctgcacttcaggtctgcaaccatcatctatctggcttcctattccgcttggtcgcttccctccctccctcgtcctgctcgcgcgcggagtgagcctacaccacagggagaagcaggcgccaaccgtgacaccgagggtacctaactggaggccggtgatctccggttccggcggcggagatggggtcgtcgtcgcggatcttcgagtacttcgtagtgtgcgggctgggcccggagatccggtccctggatggcatcaagggtttccatggcgttgaggagatgtacatgtcggccttccttgaccagttcccgccgtccaaccacgctctgtaccctcctcctcctccgcagctccccacctgtgttttgccagcgggagtaagaatatattcttcagggctggacacagatgatgtctcaacttatccacgtagttatcctatagttttaacagagggagatggctcaaaaatttatgtcagttgtattgcatttcgggatcctatttgtgaagacataattgaggcttaccaaattccggcgaattcgtttgctgataaatgcatctgccttgtgtcccattctcctagtttccaagtccttcgtgatgcccttgaggaaatatttgttctttgtttttctccttcagggtgcagcaagcctttgtgggacataatatctcatatggtgtcacatgtgacattacccacaccaggaaagaatcgtgtcttatttgccattgagaattgtcttctttctgcggaagctcctccaaaagaatggcttccccatgctgatatatcattccagccattggtgcagtgtctggatgttgataaactaatacttctctttacagctgtcctgcttgaaagaaggatattgcttcgatcaaataagtatactctactgactctagtttcagaagccatttgccatttaatatacccaattaggtggcagcatgtctatattccaataatattctctagtggggttgattacattgatgccccgacaccctacatgatggggcttcattctggtgttgacacatctgcagtgacaatggatggtgtagtggtggtagatctcgaatacaaccgtataacaataacggaagaaattcctccaataccagaaactgaacataactttcttcgtgttgagattttaaaattactacaacccaatgtcatgggaattgatttcatgaaaatcaatcttgccaatatgggtgacctaagggctggcacaaaatcatggagtcaggaacatgatttccaacttaggctgatatttttgagattctttgcacagatcctgagtggttatcgtaacttcattgatactacttcagcgactggtttcaattctcaagcttttcttaaaaagcgttctcgagcaactaaccagcctgtcgactccatgtcaatgattatgcagtttttggagactcaagggttcttggattatctggagagatgcaacactgcagaagaaaatgcccacaaccttctcgataagttgcaggatgcaaccggaagaggacaaaaccctctaaccatatttccttctcaagtttctgatcctgagattataacaatagccaatcctgagattgaaggactagacaatagacactgctataagaggtttccagcaaatgcaagaacagaagaacaagaagaaaaacgtaagtcgattctagcgttagctagtggggctagtaagcaagtaccgagttctccttctatccgagtaaatgggggcccaaaggcagaaagtctgagcccaagagagagggcggctgagagagaaaggatggttctggacataaaagtgaagctccagggactctggcttcgtcttctgagactaggggcaactgaggatcctctctcatcttttgaatatggcaccatcctagctttgattgagtctgacgcagaaggcatcgggggaagtggctttgttgaatgcatcagagagcatattcattcgggctggcaatgtcgcttgactgatgaacaattcattgctgtaaaagaattgcttaagatggctataactcttgcgaactctcgcaacgacctggcgaccattagagatgctcttgaagtttctgctgaaatgtacagaaaagacccaaacaatgttcaagattatgttcagcgccatctattatcattgtcagtatgggaggagcttcgcttctgggatggctacttcgaatatttgatggaaaattgttcaaataagtcagcaaattatgtaacgttagttactgcacagctcattctcatggcaactcacatggctggattgggattacctgacattgactcttggaatatgattgagaaaatagccgagagaaacaacttgggttataaacagcttatcaaacttagagcattgctcacacatctgcaacaactccggattggctattggggggttgctacagggaaaagccaaccattgcagtcatatggcatggcttcacctcatgcgatcgatgtgattgatgaaagccaacaacctgctgaagcatctgggttgggccgaagttgggtgcaaagtatgtttagcagagacagaagtttaagagccagctctttcaaccgagctagtgatggaaatgctgttgctgccacgggcaaaaccgaaatctcagctgcacaaaagaaaactcaaactaacatgaggacccttagagggcatacaggtgctattactgctcttcattgcgtaacaagaaaggaggtctgggatcttgttggtgatcgtgaagatgctggttttttcatcagcggaagcacagattgcacggtaaaaatttgggatccaagtttgcgtggttctgaacttcgagcaacacttaaagggcatactagggcaattcgaacaatcagttcagatcgtggcaaaatagtttctggagctgatgatcagtctgtcatagtatgggataagcagacttttaagcttttggaagaactgaagggccacgaggcaccggttagttctgtccggatgctctcaggagaacgtgtccttattgcatcccatgatggtactgtgaagatgtgggatgtccggactgatacttgtgttgttaccgtgggtcgttgccaaagtgctgttctctgtatggaatatgatgattccactgggattctggcggctgctggaagagatatcacggcacatgtctgggatattcgctccagcaagcagatgttcaagcttcaagggcatacaaagtggataagatcaatgaggatgaccggagagaccataataacaggtagtgatgattggactgctagagtgtggtcccttaaccggggaacatgtgatgcagtgttagcatgccatgctggtcccgtactatgtgtggaatactcaccttcagataaaggaattatcactggttcagctgatgggctcatacgattttgggaaaatgaaggaggaataaaatgcgtcaagaatcttacacttcacacagcatccgttctgtccattagtgccagtgatcactggctagcgattggtgctgctgataattctatgtctctttttcatcggccacaagaaagattcggtggcttctcaaatgcaggatcaaaagttgcaggatggcagctttacagaactccccaaaaaactgctgcagtggtgagatgtatagcatctgacctggataggaaaagaatatgtagtggtggtcgcaacggactcctgcggctttgggatgcaactacaagcatctaggactgatagatgttcatgtgaaaaggcaattgacatgatgttgcatgccattttccttttagctaggaatttatgtgctatttagaggatgcgaaaggagccggactttgttctactgtttctttatcatctaaaaaaccctgcccagttgagtatatgtttgacgtcgtgtaaaattttgtttatattttcgggttcagatagccttacgtggctacgattttgtaagaactatgagaaacttgggaagttctgtactactaccagtgcaaatgtttgttttagtacaacattattttttatgtgcatattcatcgtatgaacctg

SEQ ID NO: 37265 - DNA, 3924 bp, Zea Mays
caaaattcaacaagtacctttcagtcatcatcgtcgtaaaaaaagggcgaacaattaaacacagaagcgaagaaaacgaacgaattgccgctgaatccttaagaacagacgacgatctgacccgcgggcctctcgtccccttcttcctgcacttcagtgtgttttgccagcgggagtaagaatatattcttcagggctggacacagatgatgtctcaacttatccacgtagttatcctatagttttaacagagggagatggctcaaaaatttatgtcagttgtattgcatttcgggatcctatttgtgaagacataattgaggcttaccaaattccggcgaattcgtttgctgataaatgcatctgccttgtgtcccattctcctagtttccaagtccttcgtgatgcccttgaggaaatatttgttctttgtttttctccttcagggtgcagcaagcctttgtgggacataatatctcatatggtgtcacatgtgacattacccacaccaggaaagaatcgtgtcttatttgccattgagaattgtcttctttctgcggaagctcctccaaaagaatggcttccccatgctgattttttctgtgcctgcagatatcattccagccattggtgcagtgtctggatgttgataaactaatacttctctttacagctgtcctgcttgaaagaaggatattgcttcgatcaaataagtatactctactgactctagtttcagaagccatttgccatttaatatacccaattaggtggcagcatgtctatattccaataatattctctagtggggttgattacattgatgccccgacaccctacatgatggggcttcattctggtgttgacacatctgcagtgacaatggatggtgtagtggtggtagatctcgaatacaaccgtataacaataacggaagaaattcctccaataccagaaactgaacataactttcttcgtgttgagattttaaaattactacaacccaatgtcatgggaattgatttcatgaaaatcaatcttgccaatatgggtgacctaagggctggcacaaaatcatggagtcaggaacatgatttccaacttaggctgatatttttgagattctttgcacagatcctgagtggttatcgtaacttcattgatactacttcagcgactggtttcaattctcaagcttttcttaaaaagcgttctcgagcaactaaccagcctgtcgactccatgtcaatgattatgcagtttttggagactcaagggttcttggattatctggagagatgcaacactgcagaagaaaatgcccacaaccttctcgataagttgcaggatgcaaccggaagaggacaaaaccctctaaccatatttccttctcaagtttctgatcctgagattataacaatagccaatcctgagattgaaggactagacaatagacactgctataagaggtttccagcaaatgcaagaacagaagaacaagaagaaaaacgtaagtcgattctagcgttagctagtggggctagtaagcaagtaccgagttctccttctatccgagtaaatgggggcccaaaggcagaaagtctgagcccaagagagagggcggctgagagagaaaggatggttctggacataaaagtgaagctccagggactctggcttcgtcttctgagactaggggcaactgaggatcctctctcatcttttgaatatggcaccatcctagctttgattgagtctgacgcagaaggcatcgggggaagtggctttgttgaatgcatcagagagcatattcattcgggctggcaatgtcgcttgactgatgaacaattcattgctgtaaaagaattgcttaagatggctataactcttgcgaactctcgcaacgacctggcgaccattagagatgctcttgaagtttctgctgaaatgtacagaaaagacccaaacaatgttcaagattatgttcagcgccatctattatcattgtcagtatgggaggagcttcgcttctgggatggctacttcgaatatttgatggaaaattgttcaaataagtcagcaaattatgtaacgttagttactgcacagctcattctcatggcaactcacatggctggattgggattacctgacattgactcttggaatatgattgagaaaatagccgagagaaacaacttgggttataaacagcttatcaaacttagagcattgctcacacatctgcaacaactccggattggctattggggggttgctacagggaaaagccaaccattgcagtcatatggcatggcttcacctcatgcgatcgatgtgattgatgaaagccaacaacctgctgaagcatctgggttgggccgaagttgggtgcaaagtatgtttagcagagacagaagtttaagagccagctctttcaaccgagctagtgatggaaatgctgttgctgccacgggcaaaaccgaaatctcagctgcacaaaagaaaactcaaactaacatgaggacccttagagggcatacaggtgctattactgctcttcattgcgtaacaagaaaggaggtctgggatcttgttggtgatcgtgaagatgctggttttttcatcagcggaagcacagattgcacggtaaaaatttgggatccaagtttgcgtggttctgaacttcgagcaacacttaaagggcatactagggcaattcgaacaatcagttcagatcgtggcaaaatagtttctggagctgatgatcagtctgtcatagtatgggataagcagacttttaagcttttggaagaactgaagggccacgaggcaccggttagttctgtccggatgctctcaggagaacgtgtccttattgcatcccatgatggtactgtgaagatgtgggatgtccggactgatacttgtgttgttaccgtgggtcgttgccaaagtgctgttctctgtatggaatatgatgattccactgggattctggcggctgctggaagagatatcacggcacatgtctgggatattcgctccagcaagcagatgttcaagcttcaagggcatacaaagtggataagatcaatgaggatgaccggagagaccataataacaggtagtgatgattggactgctagagtgtggtcccttaaccggggaacatgtgatgcagtgttagcatgccatgctggtcccgtactatgtgtggaatactcaccttcagataaaggaattatcactggttcagctgatgggctcatacgattttgggaaaatgaaggaggaataaaatgcgtcaagaatcttacacttcacacagcatccgttctgtccattagtgccagtgatcactggctagcgattggtgctgctgataattctatgtctctttttcatcggccacaagaaagattcggtggcttctcaaatgcaggatcaaaagttgcaggatggcagctttacagaactccccaaaaaactgctgcagtggtgagatgtatagcatctgacctggataggaaaagaatatgtagtggtggtcgcaacggactcctgcggctttgggatgcaactacaagcatctaggactgatagatgttcatgtgaaaaggcaattgacatgatgttgcatgccattttccttttagctaggaatttatgtgctatttagaggatgcgaaaggagccggactttgttctactgtttctttatcatctaaaaaaccctgcccagttgagtatatgtttgacgtcgtgtaaaattttgtttatattttcgggttcagatagccttacgtggctacgattttgtaagaactatgagaaacttgggaagttctgtactactaccagtgcaaatgtttgttttagtacaacattattttttatgtgcatattcatcgtatgaacctg

SEQ ID NO: 37266 - DNA, 4199 bp, Zea Mays
ggcttctttaaccgttacaaaattcaacaagtacctttcagtcatcatcgtcgtaaaaaaagggcgaacaattaaacacagaagcgaagaaaacgaacgaattgccgctgaatccttaagaacagacgacgatctgacccgcgggcctctcgtccccttcttcctgcacttcagtgtgttttgccagcgggagtaagaatatattcttcagggctggacacagatgatgtctcaacttatccacgtagttatcctatagttttaacagagggagatggctcaaaaatttatgtcagttgtattgcatttcgggatcctatttgtgaagacataattgaggcttaccaaattccggcgaattcgtttgctgataaatgcatctgccttgtgtcccattctcctagtttccaagtccttcgtgatgcccttgaggaaatatttgttctttgtttttctccttcagggtgcagcaagcctttgtgggacataatatctcatatggtgtcacatgtgacattacccacaccaggaaagaatcgtgtcttatttgccattgagaattgtcttctttctgcggaagctcctccaaaagaatggcttccccatgctgatatatcattccagccattggtgcagtgtctggatgttgataaactaatacttctctttacagctgtcctgcttgaaagaaggatattgcttcgatcaaataagtatttgattgttctgtccccacttcccacttagctactttgatcattttgctcctcctatcagttcatccttatttagcctactccaatttacttgggactaaagtcccttgcttatctgttcacccttgtctctgcatgtcatagtcacataagtgaaggaaccgtttcattgcatatgttacctcaacctgaaagagttcttgacacattcgccaccattaatgatgaaattattatgcgtttgatagtcttctcgttgattgataatgcaggtatactctactgactctagtttcagaagccatttgccatttaatatacccaattaggtggcagcatgtctatattccaataatattctctagtggggttgattacattgatgccccgacaccctacatgatggggcttcattctggtgttgacacatctgcagtgacaatggatggtgtagtggtggtagatctcgaatacaaccgtataacaataacggaagaaattcctccaataccagaaactgaacataactttcttcgtgttgagattttaaaattactacaacccaatgtcatgggaattgatttcatgaaaatcaatcttgccaatatgggtgacctaagggctggcacaaaatcatggagtcaggaacatgatttccaacttaggctgatatttttgagattctttgcacagatcctgagtggttatcgtaacttcattgatactacttcagcgactggtttcaattctcaagcttttcttaaaaagcgttctcgagcaactaaccagcctgtcgactccatgtcaatgattatgcagtttttggagactcaagggttcttggattatctggagagatgcaacactgcagaagaaaatgcccacaaccttctcgataagttgcaggatgcaaccggaagaggacaaaaccctctaaccatatttccttctcaagtttctgatcctgagattataacaatagccaatcctgagattgaaggactagacaatagacactgctataagaggtttccagcaaatgcaagaacagaagaacaagaagaaaaacgtaagtcgattctagcgttagctagtggggctagtaagcaagtaccgagttctccttctatccgagtaaatgggggcccaaaggcagaaagtctgagcccaagagagagggcggctgagagagaaaggatggttctggacataaaagtgaagctccagggactctggcttcgtcttctgagactaggggcaactgaggatcctctctcatcttttgaatatggcaccatcctagctttgattgagtctgacgcagaaggcatcgggggaagtggctttgttgaatgcatcagagagcatattcattcgggctggcaatgtcgcttgactgatgaacaattcattgctgtaaaagaattgcttaagatggctataactcttgcgaactctcgcaacgacctggcgaccattagagatgctcttgaagtttctgctgaaatgtacagaaaagacccaaacaatgttcaagattatgttcagcgccatctattatcattgtcagtatgggaggagcttcgcttctgggatggctacttcgaatatttgatggaaaattgttcaaataagtcagcaaattatgtaacgttagttactgcacagctcattctcatggcaactcacatggctggattgggattacctgacattgactcttggaatatgattgagaaaatagccgagagaaacaacttgggttataaacagcttatcaaacttagagcattgctcacacatctgcaacaactccggattggctattggggggttgctacagggaaaagccaaccattgcagtcatatggcatggcttcacctcatgcgatcgatgtgattgatgaaagccaacaacctgctgaagcatctgggttgggccgaagttgggtgcaaagtatgtttagcagagacagaagtttaagagccagctctttcaaccgagctagtgatggaaatgctgttgctgccacgggcaaaaccgaaatctcagctgcacaaaagaaaactcaaactaacatgaggacccttagagggcatacaggtgctattactgctcttcattgcgtaacaagaaaggaggtctgggatcttgttggtgatcgtgaagatgctggttttttcatcagcggaagcacagattgcacggtaaaaatttgggatccaagtttgcgtggttctgaacttcgagcaacacttaaagggcatactagggcaattcgaacaatcagttcagatcgtggcaaaatagtttctggagctgatgatcagtctgtcatagtatgggataagcagacttttaagcttttggaagaactgaagggccacgaggcaccggttagttctgtccggatgctctcaggagaacgtgtccttattgcatcccatgatggtactgtgaagatgtgggatgtccggactgatacttgtgttgttaccgtgggtcgttgccaaagtgctgttctctgtatggaatatgatgattccactgggattctggcggctgctggaagagatatcacggcacatgtctgggatattcgctccagcaagcagatgttcaagcttcaagggcatacaaagtggataagatcaatgaggatgaccggagagaccataataacaggtagtgatgattggactgctagagtgtggtcccttaaccggggaacatgtgatgcagtgttagcatgccatgctggtcccgtactatgtgtggaatactcaccttcagataaaggaattatcactggttcagctgatgggctcatacgattttgggaaaatgaaggaggaataaaatgcgtcaagaatcttacacttcacacagcatccgttctgtccattagtgccagtgatcactggctagcgattggtgctgctgataattctatgtctctttttcatcggccacaagaaagattcggtggcttctcaaatgcaggatcaaaagttgcaggatggcagctttacagaactccccaaaaaactgctgcagtggtgagatgtatagcatctgacctggataggaaaagaatatgtagtggtggtcgcaacggactcctgcggctttgggatgcaactacaagcatctaggactgatagatgttcatgtgaaaaggcaattgacatgatgttgcatgccattttccttttagctaggaatttatgtgctatttagaggatgcgaaaggagccggactttgttctactgtttctttatcatctaaaaaaccctgcccagttgagtatatgtttgacgtcgtgtaaaattttgtttatattttcgggttcagatagccttacgtggctacgattttgtaagaactatgagaaacttgggaagttctgtactactaccagtgcaaatgtttgttttagtacaacattattttttatgtgcatattcatcgtatgaacctg

SEQ ID NO: 37267 - DNA, 3906 bp, Zea Mays
attctagtatccctctgctcaggcctcaggggcttctttaaccgttacaaaattcaacaagtacctttcagtcatcatcgtcgtaaaaaaagggcgaacaattaaacacagaagcgaagaaaacgaacgaattgccgctgaatccttaagaacagacgacgatctgacccgcgggcctctcgtccccttcttcctgcacttcagtgtgttttgccagcgggagtaagaatatattcttcagggctggacacagatgatgtctcaacttatccacgtagttatcctatagttttaacagagggagatggctcaaaaatttatgtcagttgtattgcatttcgggatcctatttgtgaagacataattgaggcttaccaaattccggcgaattcgtttgctgataaatgcatctgccttgtgtcccattctcctagtttccaagtccttcgtgatgcccttgaggaaatatttgttctttgtttttctccttcagggtgcagcaagcctttgtgggacataatatctcatatggtgtcacatgtgacattacccacaccaggaaagaatcgtgtcttatttgccattgagaattgtcttctttctgcggaagctcctccaaaagaatggcttccccatgctgatatatcattccagccattggtgcagtgtctggatgttgataaactaatacttctctttacagctgtcctgcttgaaagaaggatattgcttcgatcaaataagtatactctactgactctagtttcagaagccatttgccatttaatatacccaattaggtggcagcatgtctatattccaataatattctctagtggggttgattacattgatgccccgacaccctacatgatggggcttcattctggtgttgacacatctgcagtgacaatggatggtgtagtggtggtagatctcgaatacaaccgtataacaataacggaagaaattcctccaataccagaaactgaacataactttcttcgtgttgagattttaaaattactacaacccaatgtcatgggaattgatttcatgaaaatcaatcttgccaatatgggtgacctaagggctggcacaaaatcatggagtcaggaacatgatttccaacttaggctgatatttttgagattctttgcacagatcctgagtggttatcgtaacttcattgatactacttcagcgactggtttcaattctcaagcttttcttaaaaagcgttctcgagcaactaaccagcctgtcgactccatgtcaatgattatgcagtttttggagactcaagggttcttggattatctggagagatgcaacactgcagaagaaaatgcccacaaccttctcgataagttgcaggatgcaaccggaagaggacaaaaccctctaaccatatttccttctcaagtttctgatcctgagattataacaatagccaatcctgagattgaaggactagacaatagacactgctataagaggtttccagcaaatgcaagaacagaagaacaagaagaaaaacgtaagtcgattctagcgttagctagtggggctagtaagcaagtaccgagttctccttctatccgagtaaatgggggcccaaaggcagaaagtctgagcccaagagagagggcggctgagagagaaaggatggttctggacataaaagtgaagctccagggactctggcttcgtcttctgagactaggggcaactgaggatcctctctcatcttttgaatatggcaccatcctagctttgattgagtctgacgcagaaggcatcgggggaagtggctttgttgaatgcatcagagagcatattcattcgggctggcaatgtcgcttgactgatgaacaattcattgctgtaaaagaattgcttaagatggctataactcttgcgaactctcgcaacgacctggcgaccattagagatgctcttgaagtttctgctgaaatgtacagaaaagacccaaacaatgttcaagattatgttcagcgccatctattatcattgtcagtatgggaggagcttcggtcagcaaattatgtaacgttagttactgcacagctcattctcatggcaactcacatggctggattgggattacctgacattgactcttggaatatgattgagaaaatagccgagagaaacaacttgggttataaacagcttatcaaacttagagcattgctcacacatctgcaacaactccggattggctattggggggttgctacagggaaaagccaaccattgcagtcatatggcatggcttcacctcatgcgatcgatgtgattgatgaaagccaacaacctgctgaagcatctgggttgggccgaagttgggtgcaaagtatgtttagcagagacagaagtttaagagccagctctttcaaccgagctagtgatggaaatgctgttgctgccacgggcaaaaccgaaatctcagctgcacaaaagaaaactcaaactaacatgaggacccttagagggcatacaggtgctattactgctcttcattgcgtaacaagaaaggaggtctgggatcttgttggtgatcgtgaagatgctggttttttcatcagcggaagcacagattgcacggtaaaaatttgggatccaagtttgcgtggttctgaacttcgagcaacacttaaagggcatactagggcaattcgaacaatcagttcagatcgtggcaaaatagtttctggagctgatgatcagtctgtcatagtatgggataagcagacttttaagcttttggaagaactgaagggccacgaggcaccggttagttctgtccggatgctctcaggagaacgtgtccttattgcatcccatgatggtactgtgaagatgtgggatgtccggactgatacttgtgttgttaccgtgggtcgttgccaaagtgctgttctctgtatggaatatgatgattccactgggattctggcggctgctggaagagatatcacggcacatgtctgggatattcgctccagcaagcagatgttcaagcttcaagggcatacaaagtggataagatcaatgaggatgaccggagagaccataataacaggtagtgatgattggactgctagagtgtggtcccttaaccggggaacatgtgatgcagtgttagcatgccatgctggtcccgtactatgtgtggaatactcaccttcagataaaggaattatcactggttcagctgatgggctcatacgattttgggaaaatgaaggaggaataaaatgcgtcaagaatcttacacttcacacagcatccgttctgtccattagtgccagtgatcactggctagcgattggtgctgctgataattctatgtctctttttcatcggccacaagaaagattcggtggcttctcaaatgcaggatcaaaagttgcaggatggcagctttacagaactccccaaaaaactgctgcagtggtgagatgtatagcatctgacctggataggaaaagaatatgtagtggtggtcgcaacggactcctgcggctttgggatgcaactacaagcatctaggactgatagatgttcatgtgaaaaggcaattgacatgatgttgcatgccattttccttttagctaggaatttatgtgctatttagaggatgcgaaaggagccggactttgttctactgtttctttatcatctaaaaaaccctgcccagttgagtatatgtttgacgtcgtgtaaaattttgtttatattttcgggttcagatagccttacgtggctacgattttgtaagaactatgagaaacttgggaagttctgtactactaccagtgcaaatgtttgttttagtacaacattattttttatgtgcatattcatcgtatgaacctg

SEQ ID NO: 37268 - DNA, 2136 bp, Zea Mays
aaacacagaagcgaagaaaacgaacgaattgccgctgaatccttaagaacagacgacgatctgacccgcgggcctctcgtccccttcttcctgcacttcaggtctgcaaccatcatctatctggcttcctattccgcttggtcgcttccctccctccctcgtcctgctcgcgcgcggagtgagcctacaccacagggagaagcaggcgccaaccgtgacaccgagggtacctaactggaggccggtgatctccggttccggcggcggagatggggtcgtcgtcgcggatcttcgagtacttcgtagtgtgcgggctgggcccggagatccggtccctggatggcatcaagggtttccatggcgttgaggagatgtacatgtcggccttccttgaccagttcccgccgtccaaccacgctctgtaccctcctcctcctccgcagctccccacctgtgttttgccagcgggagtaagaatatattcttcagggctggacacagatgatgtctcaacttatccacgtagttatcctatagttttaacagagggagatggctcaaaaatttatgtcagttgtattgcatttcgggatcctatttgtgaagacataattgaggcttaccaaattccggcgaattcgtttgctgataaatgcatctgccttgtgtcccattctcctagtttccaagtccttcgtgatgcccttgaggaaatatttgttctttgtttttctccttcagggtgcagcaagcctttgtgggacataatatctcatatggtgtcacatgtgacattacccacaccaggaaagaatcgtgtcttatttgccattgagaattgtcttctttctgcggaagctcctccaaaagaatggcttccccatgctgatatatcattccagccattggtgcagtgtctggatgttgataaactaatacttctctttacagctgtcctgcttgaaagaaggatattgcttcgatcaaataagtatactctactgactctagtttcagaagccatttgccatttaatatacccaattaggtggcagcatgtctatattccaataatattctctagtggggttgattacattgatgccccgacaccctacatgatggggcttcattctggtgttgacacatctgcagtgacaatggatggtgctgatatttttgagattctttgcacagatcctgagtggttatcgtaacttcattgatactacttcagcgactggtttcaattctcaagcttttcttaaaaagcgttctcgagcaactaaccagcctgtcgactccatgtcaatgattatgcagtttttggagactcaagggttcttggattatctggagagatgcaacactgcagaagaaaatgcccacaaccttctcgataagttgcaggatgcaaccggaagaggacaaaaccctctaaccatatttccttctcaagtttctgatcctgagattataacaatagccaatcctgagattgaaggactagacaatagacactgctataagaggtttccagcaaatgcaagaacagaagaacaagaagaaaaacgtaagtcgattctagcgttagctagtggggctagtaagcaagtaccgagttctccttctatccgagtaaatgggggcccaaaggcagaaagtctgagcccaagagagagggcggctgagagagaaaggatggttctggacataaaagtgaagctccagggactctggcttcgtcttctgagactaggggcaactgaggatcctctctcatcttttgaatatggcaccatcctagctttgattgagtctgacgcagaaggcatcgggggaagtggctttgttgaatgcatcagagagcatattcattcgggctggcaatgtcgcttgactgatgaacaattcattgctgtaaaagaattgcttaagatggctataactcttgcgaactctcgcaacgacctggcgaccattagagatgctcttgaagtttctgctgaaatgtacagaaaagacccaaacaatgttcaagattatgttcagcgccatctattatcattgtcagtatgggaggagcttcggtatgtcatacttagtgtgaaaacgatcatttccgtattaaattga

SEQ ID NO: 37269 - DNA, 4135 bp, Zea Mays
cttccccacgcgcgccctgttctcttctccaccgagctctttatctgtgcgccacctccgctgtcgcctgctcctagccggtgtcctcggttggcccgagctccggtgacctgctcccacgactgcacccgagcccctccttctcctatgctgtgtgactgcatgcccgctcgcgagactgggtcgaaagcggttcaggccaggacgacttcatagggaaaacccccaaggcatctccatatagacttaaaaatccttgagtgttcatgagtgttgccctcttgcaagcgccaaactctaggttgtggttccttacccggctggagtctacgtctccgacatttggtgcgctaggtagcgggatgttaagtccctgtgagttttgtgccctccctctagtgcctccgatgggtgcattcggtcacccgaccggagtctacgtcaccgacattcgatgctacagggatgggggaatggaggtgtttcccctatgagccccttcctcgtcttggtagggagaatctcgaatatgattctcctagccaggcgttgaagttcctcctctgacgaccggtgcactccgtcgcccggccagcgagggctacgcctgcgacaacctcatctcgtcggaggtggcctacgggccatggggcccctgggggcacaccacgtgcactagtggggtttcaagagcagtgctaagacccacgtcgccccctacgtcggcctactactaggctctgtggcgccagacctaactcgtcgaccacaacaagagatatatggcatttgcaacgtctcgaatttctattttaggatttataaaagtcctaaaaagttttgagaataaaatgacttccaataacaatttcaatcctttatagagtatatctctctaaactaaaaaatatcaataactaaaaatttggtattcaaaacatagatccaaaacgtaaaacttaaagttgaagcaacaaataaaagagagactttcaatatatttcttgttccctttaaagcactctttaaaaatgttcaaacaaaaaaatatattaaaactagggagatttttaaataatgtggctaaatattttacataaattatttccattgttatataaaagtttagataattatttgaaagaaaaatttattggaatttggttctcttatgggaattatatatttgaaatttataggaaagtactaaataaattttctgcttttgcatatcatactggatttctatgtgtgcatttgaacttgagtgtataactcaaaacccaatttggatttaaacaaatagaaaataaaatagaaaacaaaaataaagaaaaaaggaaaaagtgaagcccttacctgggtcgagtcctattgctcccagcccatctcccccctctttcctccccgatgagcccacttttccctctcacttttcttttctccccgcaccgcgtatttgtgtcactggtggctggggcccgcctataaggtccatccccttcgtcatccccgagccgtagcgtgcgccaacagaccaccaaaatcggtgggaagctcggcctctgcgcggactccgttccttctgactgggctataaagttgagttctggggctcccctttgcccatcctgtctgtctgctaagcttgttccgtgtgtgtgccgccaccgaggaacataggggagatagagggagaaaagtgccgctgcaccataaatcatgcaccgccggtgtcgggccctcagtgaccggccacagaccacagtgcttcaccaagtcgcaagtagggtacttgtggccatgccgggtggagtagaagacgggaacccttgggattgctcactagagcaatttagccaccgtggatccgcccttcatcgatgattcgacgttcaggtgcatatctcacggtgtcgggcgcctttgctccggcaatgggccaccgcaggcgcgggcggcgccgtcgtcccgggtggccgggatggagatgatgttccccgtgccgtcggtttccggatgaacgaacgagattaggcggagggaaaatgattcggctaggtaactccagggcgttgactgcttgatcaacggtccagattagaaaaggaataacgattcgtgtgtgctgatcatggttgttggatcagatgtgattagatcctaggataacggttcggcaacgcgatctgatccccagatctagatcttgcggtccagctacgcgcatttgcataaaagacccggaatctttgtaaatcaacttacagtccgggttagtattaaaaccattgcagtagggtcttgaaatttgtagctaagttcctgagttattggagattattacccgtagtccatgaattaggatcaactctggaaaatgatttttatataaaaataaacttagaaatcttagataaatcataacttgaccattttaactccgatttagtccattccagttgcattagcttcgcaatatagttgcctaaacttttataacattatttggtcaagtaacatgttattagagaagtattggtttaacctatgcttagtagattaatctagctaaacaaagataatctatccgtatgttataacctgactaaaatatgatccctagtcaagttgtaacctagattaagattgaatagctatttcgttgtaacattttctcacatgatttatatcaatcaatatagaatataattttattaattaatcacctaagactttgaaaagccatatcttttaaaccgtaattctgatttagtggttctcaaacatatgacctcgtagcagcgtgtagaatattcttacgatatttgttcttatgtttggtttactattatatttatgtactccttgactatttatatgtattgctacgagtaacaatgaggtcacgagaaacttgaagattaacttggagaagtgcctatcaatctcgagtctaaggcaagttgtgcccttgatcacttttctttacctaataatgttctctattaatcactatgacatgctcaggataatttgatgggacctaataggtttccctagattttttatcccaccccttgcagacaaatgaattattgggtagacttgttattgctctacctggttttagaattaatgttacatttgaataatgatcatgttccaattatgttgttactttaattattgttcataacaagatcattatgttaattggaacatggagcttaacttgagataatagtgctaccacaagtgtggtatgagatgcccttggctgactaattaggaaagctagtggaggactaccttacccgaaaggggcaagggcggtataggagctgcggtatagggaggttctcggatcgatcatgctgcgatggcttttcggatgagtgattcctatattgcccttctcagaaacgtagcgggttttctgaagctagtggaactttgtaaaggcctcgtagtgctaccctgcctcatctcctcgacagagatgaatgggaagtcgcgatctcttggcaaatgggtaacatgacttgtgagtaaagggcacaacctctgcagagtgtaaaaccagtatattagtcgtgctcgcggtcaagggcgactgaggactctcgcatgattaatttatggaactaaactcaatatgtcatttgcattgcattgtgggtgttattattagttgtgatatcttatttaattgggttggtatctacttatacctagtaactactaataaaactttgactaactttaaaagcaatgctcaactttaactatctcctttgataagccttacacttcacatgagccccactgtaagtgagatcatacacattattccccacaacttgtcaagcgatgaacgtatgtgagctcacccttgatgtactcaaatcccccaggtcaaggacatgtactacaagatgaggagcaagaaggatgtcacgatgagattcgtgagaggtctaggccgtcgtctcctagtcaactatggttgctggatcgttgtcttcgtatgatgtaactatttaactattttgtatagaactgcattatatattaaagatatgacattcgtttctgtaccatgagtcatcatatgtgtgagacttgatcctag

SEQ ID NO: 37270 - DNA, 3066 bp, Zea Mays
cccattcggcaattccattcctcgaagccctcacacctgcacgcgcccacgccttcgccttgtctccctcctcgcgcacccgcacccgcacccgcaccgagacccacgcgccggcctgtccctgtcccagcacacacgcgcgacagggtgcgcgccgctcgggcgatggcctccgcccgcctcgtcgcgctcgctgcattcctccttctcctcctcttcgccctgggcccgggcgaggcgcgcgcggcggacgacggcgaggtgcgcgcgctgctggcgctgggggccgcgctggacccgacgggccgcctgctcccgtcgtgggcgcccggccgcgacccctgcgcgccggcgccgtccgggggattcgagggcgttgcgtgcgacgcccgcggcgccgtcgccaacgtctcgctgcaggggaaggggctcgccggcacgctcccgcccgccgtcgcggggctccgctccctgaccggcctctacctccactacaacgcgctccgcggcggcatcccgcgggagctggcggcgctcgccgctctcaccgacctctacctcgacgtcaacaacttctcgggacccatcccgtcggagatcggcgccatggcatcactgcaagtggtgcagctctgctacaaccagctcaccgggagcatccccacgcagctgggcaacctcaccaggctcaccgtgctggccctgcagtccaaccgcttcaacggcgccatccccgccagcctcggcgacctgccgctgctggcgcgcctggacctgagcttcaaccgtctcttcggctctatccccgtcaggctcgcgcagctgccctgcagccttgtggtgctcgacgtcaggaacaactcactcaccggcagcgtacccgccgaactggccgccaagctgcaggccggcttccagtacgggaacaacagcgacctgtgcggcgccgggctgcccgcgctccgcccgtgcaccccggcggacctcatcgaccccgacaggccccagcccttcagcgctggcatcgcgccgcaggtcacgccctccgacggccgcggcaacgggcgcgtgccatctaccagggcgctcgcggcagtggtcgtcgtcgccgtggccctccttttaaccacaggggtcggcctgttcgcgctctcgtggcgccggtggcaccggcagaaggtggcgggggcctcgccgtcgacgatctccggcggccggtgcagcactgaggtcgtgccttccgcggcgaaggcgtcgtcggctcgcaagagcgcgtcgtcggcgctggcgagcctcgagtactccaacgcctgggacccgctggccgacgcgcggggcgggctgggtttcgtctcgcaggacgtgcagctggcccagagcctgcggatcagcacggaggaggtggagtccgcgacgcgctacttctcggagctcaacctcctcggcgggcacggcaagaaggccggcggcctcgcggccacgtacaggggcacgctccgcgacggcacctcggtggccgtgaagcggctgggcaagacgtgctgccggcaggaggaggccgacttcctgagcgggctgaggctgctcgcggagctccggcacgacaatgtggtcgcgctgagggggttctgctgctccagggcgcgcggggagtgcttcctcgtgtacgacttcgtgcccaacggcagcctgtcgcagttcctcgacgccgacacaaccgccggcggcagcggccgtgtcctccagtggtccacgaggatctccatcatcaggggcatcgccaaaggtaggtaccgtaccctcacacgcactttccaatgttcatacttgttcacgtactacgagtctacgactagttgttttcttgataattttgcctgaaaacacatggtatgcatgcatgcaacatttggcaccgactgtacagatttgccaagttcgtgtgtgtcatgcatggccacattgattcatcagtgctgcgctggtcgctcacatggtgtgcagaaacctgtggccgtgagcagtccagggacgcagcaacagtcacattctgaagtctgaactttgtctgcactgaaaagctatgcatgacatgtctcattttttggtgctacttttttttttatcagagtaaccgttcctatcagtgtgagctatcggtattcggtaatttgtacttagcgctcgtaatcgtctacaagtcgtgcgtcttttttgtggtccaggaattgagtatctgcacagcacaaggacgaacaagccggccctcgttcaccagaacatctcggcggacaaggtcctgctggactacgcgtacaggcccctcgtctcagggtgcggcctgcacaagctcctcgtggacgacctcgtcttctcgacgctcaaggccagcgccgccatggggtacctcgcgccggagtacaccaccgtgggccgcctctcggagaagagcgacgtctacgctttcggggtcatcgtgctccaggtgctcacaggcaggaggaaggtgacggcgacggctcagctgctagcaggcaatgtcgatgacgatgagctcgtcgacggcaacctgcaggggagttactcggcggctgaggccgccatgctggcgaagatcggctcggcttgcaccagcgaggaccccgaccagaggccgacgatggcggagctgcttcaagaactggacaccatctgattctgatggcggtgcgaatgcgaacacccatccactgtaaccgtttcatgcaagagtcacatgcctgacagtttgccatgggcctgttgtaaccttcctagctacatgtctaggatcaccagtcagtaatcgctgatcttagaaacaacctgagctaggctctactaattagctagcaataatcactctagttaggaagcacatgcctaggatcatgaaatcttgtatgctaatgatgtgccgttaccaccgctctgaaaagcgtgcatcgtttggatgtgttctctacatggtagtaggccagtaggtgaatgtgaatgcagcagccatttcctgcaacacttttttgtgaagaccttgtgactccaaag

SEQ ID NO: 37271 - DNA, 1071 bp, Zea Mays
cgagcagtgtagcccaaacactcttctcttccacttgactcccagtctcccactgtgcgcagttcgcttggtccccggagccccaaaggcggcggctctagaaatggaccacaacagaagtacgtttcaggagcccagaatgcctgggatatgttctctgatgagctgtcacagaaacacatcactactggttctggtgacctcaatgacatacttggtggcgggattcactgcaaagaagttactgagatcggattcaactagcaatcaatgtacaaatcccagtggaatgtggtggccttggtgggaaagcagtttatatagatacagagggcagtttcatggttgaacgtgtctaccagattgctgaagggtgtattagggacatactggagcactttccgcacagccatgagaagtcctcttctgtccaaaaacaattacagcctgagcgtttcctggcggatatctattacttccggatatgcagttacaccgaacaaattgcagtcataaactacatggagaagttcctcagagagcataaagatgtgcgtatagttattattgatagtgttactttccactttcgacaagattttgaagatctggcactgaggaccagagtgctaagtggattatcattgaagttaatgaagattgcaaagacatataacttggcagttgtcttgttgaaccaagtcactactaaatttacagaagggtcatttcaattgactcttgctctaggtgacagctggtcccactcatgcacgaaccggttgattctgcactggaatgggaacgaacgatacgcacatcttgataagtctccttcacttccagtagcctcagcaccgtatgcagtgacaggcaaagggattagagatgctgtgagctcaaaccacaagcgagcccgagtaacgtagcattcttggtgtcaagcacttgtatgtccactacgctcctgcagctttcttcgccatggatcttttggactagtgagaacaatttaccattatggagtgacttcaagtgggtcttgagcccatctttctcgatgcaccttct

SEQ ID NO: 37272 - DNA, 1617 bp, Zea Mays
cgagcagtgtagcccaaacactcttctcttccacttgactcccagtctcccactgtgcgcagttcgcttggtccccggagccccaaaggcggcggtgagccggagcccggagacgacggcgcggcgcgactcccccctaagcgacagcggcggcgtcgacgtaagcggctgcgtggcgccaccgacggaggctacgagcggttgtggaggcagatatgagaggtggaggtggctacaacgggtcggcggctgtgagatactgaaatccgcactgcagttctcttcttcccccaatcagtaccacctctccaagtggcaatcaccatgggagatcaatctggctctagaaatggaccacaacagaagtacgtttcaggagcccagaatgcctgggatatgttctctgatgagctgtcacagaaacacatcactactggttctggtgacctcaatgacatacttggtggcgggattcactgcaaagaagttactgagatcggtggcgtcccaggggttggtaaaactcaactggggattcaactagcaatcaatgtacaaatcccagtggaatgtggtggccttggtgggaaagcagtttatatagagggcagtttcatggttgaacgtgtctaccagattgctgaagggtgtattagggacatactggagcactttccgcacagccatgagaagtcctcttctgtccaaaaacaattacagcctgagcgtttcctggcggatatctattacttccggatatgcagttacaccgaacaaattgcagtcataaactacatggagaagttcctcagagagcataaagatgtgcgtatagttattattgatagtgttactttccactttcgacaagattttgaagatctggcactgaggaccagagtgctaagtggattatcattgaagttaatgaagattgcaaagacatataacttggcagttgtcttgttgaaccaagtcactactaaatttacagaagggtcatttcaattgactcttgctctaggtgacagctggtcccactcatgcacgaaccggttgattctgcactggaatgggaacgaacgatacgcacatcttgataagtctccttcacttccagtagcctcagcaccgtatgcagtgacaggcaaagggattagagatgctgtgagctcaaaccacaagcgagcccgagtaacgtagcattcttggtgtcaagcacttgtatgtccactacgctcctgcagctttcttcgccatggatcttttggactagtgaggtgagactggagaatagtaccattttgttgattctcagttgctttgtgccgttggctaccaaccaaccttaagagagaagtaaatacaacagaacaggctaatatagtgttttgtatctgaacatctggcccatcgtacattcagtaaagcctataatagcgggcatatatgtgcttctctgatcaccgatcagcaaaaacagctgcagggtggccagtagccagttgacatggataacagttagaaaaaacgtgcggaagatggagtgttgctcactttcctagttctcattgctttacgatttgtgggcatatcaagatttgcacacttgtttgt

SEQ ID NO: 37273 - DNA, 1343 bp, Zea Mays
cgagcagtgtagcccaaacactcttctcttccacttgactcccagtctcccactgtgcgcagttcgcttggtccccggagccccaaaggcggcggctctagaaatggaccacaacagaagtacgtttcaggagcccagaatgcctgggatatgttctctgatgagctgtcacagaaacacatcactactggttctggtgacctcaatgacatacttggtggcgggattcactgcaaagaagttactgagatcggattcaactagcaatcaatgtacaaatcccagtggaatgtggtggccttggtgggaaagcagtttatatagatacagagggcagtttcatggttgaacgtgtctaccagattgctgaagggtgtattagggacatactggagcactttccgcacagccatgagaagtcctcttctgtccaaaaacaattacagcctgagcgtttcctggcggatatctattacttccggatatgcagttacaccgaacaaattgcagtcataaactacatggagaagttcctcagagagcataaagatgtgcgtatagttattattgatagtgttactttccactttcgacaagattttgaagatctggcactgaggaccagagtgctaagtggattatcattgaagttaatgaagattgcaaagacatataacttggcagttgtcttgttgaaccaagtcactactaaatttacagaagggtcatttcaattgactcttgctctaggtgacagctggtcccactcatgcacgaaccggttgattctgcactggaatgggaacgaacgatacgcacatcttgataagtctccttcacttccagtagcctcagcaccgtatgcagtgacaggcaaagggattagagatgctgtgagctcaaaccacaagcgagcccgagtaacgtagcattcttggtgtcaagcacttgtatgtccactacgctcctgcagctttcttcgccatggatcttttggactagtgaggtgagactggagaatagtaccattttgttgattctcagttgctttgtgccgttggctaccaaccaaccttaagagagaagtaaatacaacagaacaggctaatatagtgttttgtatctgaacatctggcccatcgtacattcagtaaagcctataatagcgggcatatatgtgcttctctgatcaccgatcagcaaaaacagctgcagggtggccagtagccagttgacatggataacagttagaaaaaacgtgcggaagatggagtgttgctcactttcctagttctcattgctttacgatttgtgggcatatcaagatttgcacacttgtttgt

SEQ ID NO: 37274 - DNA, 612 bp, Zea Mays
cgagcagtgtagcccaaacactcttctcttccacttgactcccagtctcccactgtgcgcagttcgcttggtccccggagccccaaaggcggcggctctagaaatggaccacaacagaagtacgtttcaggagcccagaatgcctgggatatgttctctgatgagctgtcacagaaacacatcactactggttctggtgacctcaatgacatacttggtggcgggattcactgcaaagaagttactgagatcggtggcgtcccaggggttggtaaaactcaactggggattcaactagcaatcaatgtacaaatcccagtggaatgtggtggccttggtgggaaagcagtttatatagatacagagggcagtttcatggttgaacgtgtctaccagattgctgaagggtgtattagggacatactggagcactttccgcacagccatgagaagtcctcttctgtccaaaaacaattacagcctgagcgtttcctggcggatatctattacttccggatatgcagttacaccgaacaaattgcagtcataaactacatggagaagttcctcagagagcataaagatgacatcataatgcatgctagttttgtt

SEQ ID NO: 37275 - DNA, 1170 bp, Zea Mays
atggcggtcggcgttgggtggaagaagaggggagagcaagggaaacgagtggagagtggaggaaatgaagtgctggacgaggcgtgcacgcgaggaggagcgatgtgcgcgctagggcgcgagcttctcgcgtcccagagggtgctacatggcgaacatggtctgcggctcttgcagacgcgaggtagtgcaaggcaactgtttcagcgccttcaaggaccgtttgaggaagggactctcaagacacactttgagaaaataatattgcttggtcaaaaattgcatcaaactcgtagaaaggatgagatccatgagctgaggcaaaaaaatccacttcatacttctcatggttttgcactttctcaagcatgtccagggaacttatctggtgtcattttgacgccacttgacctttgcgatggaccttcgaactcggatgcactttctattggttatacaggatccaacacaagtgggttaggtcttccgaacaataactgctctgttggtgctactcttcctacatcaaatatgaacttaagattaccaggttctcctggtatggttttgggaagcaattcaccattgcctttgaatgctccctctagaggtatggtgtgcctagaccaacctcgatacagggtgacgagcaatcaagaattcattataaccagatggtaaatggcagaaaccttcagcaacctggagttcctgttcctggtgtgttgccatctggtgttgatcagggtgcccgaatgatgccacctgcccatggtgttggaatcatggctggactaaatcgaggcacaccaattactaggccaggttttccaaggcttggttctcttggaaacatgtcacccaccaatggtcaaggcttaaaaaatactgtaaacgttcatcctggtgccatactgggacctggaagtactatgttgaggccacgtgacccaatgcagatgcttagagtaagcactcaatctgatatgcattaagatttttttagtctcgttatatattctttattctgctgtgtttatgatttggtaagtattcaatttgatttacacatgcacctatccacgcccgtccacgctatggcaaagttacacttgtgccttttgatccaaaaaacagcatgactggaactacccgccagctttaactgat

SEQ ID NO: 37276 - DNA, 3036 bp, Zea Mays
gaaatgaaactcgcgacagacaggtcgtcctctgctccgtggaccctattcctgcgattatctggttgctcacatggacggtgatccgtgatccccggtgaccaagggtgttgaatcctcatgcaggcagaggcagaaacactgcccgaggctgatgcctgatggtgcgatcccgttccctgtcgccatcgagttcgttttttcgttgcttgacagccttaaagcggcgcacgaatgccacgagccactgaggcggcttcccagttcactccaggcccagggcgcccggtcgccatgaactcccgctcctcctccggcggcgtgcggtccgagagctcgctgtcgttgggggagcgcctctgcgcggtcttcttccccgtcatcgccatcgccgaggccgttttcttcgccttcaccgactgcctcgcggacctctgcaccgactccggctcctcgcactcgcgccgcttcggcgcgggcgcgtcctcctccgccgccaggaacagtcggagcaaccattgccagccccaccacagacctttcctacgccgcgccactgcgggtggatggacctcccccaacctccgccagctcgcacgcctcgccgacgagtcccgatgcttctcggtgaacgaggtggaggcgctctttgagctctacaagaagatcagctgctccatcatcgacgacggcctcatccacaaggtgcatccaacaaaatccctcttcgattccctgtatctaccgtccatattcttgtcattcatgacgtgatttggggttaatttgaacatctatttctttgagtgaagtatttcttgctgtacttggaagatgcgattttttttgtttttttagcctgcggacaattgcctccttggctttaaatatggaagaaatagttacataagacctgggatagtgacactctgtcatccccgcatgattgacgagtatattaggccattgagggcgacgtgcaatttagtacacaaatccatctttaattttgcagggcatgcagtggattggattattttctgagggctggattggttaagacaatgtaatattcttctttttgagttgattggagaccgtcatgtgacaagcacacatgacaaaattttaaaagtttgtttgacagcccattaagattgctcgcctgaattttcccatattccgtgtgccattatatcctaggataacacctgcatctcggtatgcttggatccctgtatgcatgattgaagagtaggtgattgaggacgatgcttaacttagtacatagatccatgttgatttgttgcactacacgcaatggattggattatttcttgaggactgaattagctaagacgacatcttattcttctttttgagtcgattggagactgtcatgtgacaggccacatgagtgcattataaaactttgtttgacagcccataggatcacttgtctgaattttcccatgttgcgtgtgcaattgggtcgtaggataacacctgcatctcagtatgcttggttgtcatgttccttcctctgccataccaaggttgaaggttttgattggtgaagcatgtgatcacatttttttattaaactaacacagcagcaattttgtgtgcgtgtgatgcggttcaaaatcagagaaatatttttcagccttacattttcagcagcatcttctatgtgtgctgtgtgcacaatagtccaattagaaaataaaatatgaatgtccttgctcgttttgtatgcaactagacgaatggccaatgtcatattaatttttcttaaccattccactgctggatggttcttcatcaggaagaacttcagctggcactgttcaaaactccaagcggcgagaatctttttcttgatagagttttttatttgtttgatgagaagaaaaatggtgtgatcgagtttgatgagtttattcattccctaagtgtcttccaccccttggcaccaattgaagacaagatcgattcatgcatttcgtatgtttcagttgcatttaggttgtatgacttgagacaaactgggtttattgagcgtgaagaggttaagcaaatggtaattgctatattgatggaatctgatttaaaattatcagatgacttactcgaggccatcatagataagacatttgaagatgctgatgcggataaggatggaaaaataaataaagaggagtggaaggaatttgcgttacgccaccctaacctgttaaagaatatgacactgccttatctgagggacatcacaaccgtcttccctagtttcgtcttcaacacggcggtggaagattagtcgttcgaattgaaggcaataaagcagtattggggattgcttgaggtgcacaaggttcctgaaacctgacggctgttggtcgccttcaaccactgagaatccgatgtgttctgagcatcaaggcagccacccgaccatcactcctgctataaattataatataaattataaggctcatccggggtggcagatcggcagcgggaacttagggggtgtttgggaacaaagtttttctacagttttgaaagaatactgcagtattctcaaatactgcagtattatatacagaatggtgtttggcaagctagctaaaatctcagtttttaaaactgaagtattgcaaatactatagtagttttaagctattctaaacttaagtctggacctcagtttttaaaactgcggtattgtaaactgcggtattgtcatgactaaagtatactgtagtatttcaaaaactttgttcccaaacagggccttacctgatataatttcttgctgccgttttttgcgcagcaatggattgagagttggtagctgtagatacatctagcttccattctgtacgtagggatccaggaactgtaaatacgttctatggaattgtatcggaaagttcctagtacgccagccagatctagaataagccagagcttgtttcttgcagtggttttcttgccctcaatgctctcttctgaacacgaacatgcttatgc

SEQ ID NO: 37277 - DNA, 1853 bp, Zea Mays
gaaatgaaactcgcgacagacaggtcgtcctctgctccgtggaccctattcctgcgattatctggttgctcacatggacggtgatccgtgatccccggtgaccaagggtgttgaatcctcatgcaggcagaggcagaaacactgcccgaggctgatgcctgatggtgcgatcccgttccctgtcgccatcgagttcgttttttcgttgcttgacagccttaaagcggcgcacgaatgccacgagccactgaggcggcttcccagttcactccaggcccagggcgcccggtcgccatgaactcccgctcctcctccggcggcgtgcggtccgagagctcgctgtcgttgggggagcgcctctgcgcggtcttcttccccgtcatcgccatcgccgaggccgttttcttcgccttcaccgactgcctcgcggacctctgcaccgactccggctcctcgcactcgcgccgcttcggcgcgggcgcgtcctcctccgccgccaggaacagtcggagcaaccattgccagccccaccacagacctttcctacgccgcgccactgcgggtggatggacctcccccaacctccgccagctcgcacgcctcgccgacgagtcccgatgcttctcggtgaacgaggtggaggcgctctttgagctctacaagaagatcagctgctccatcatcgacgacggcctcatccacaaggttttttatttgtttgatgagaagaaaaatggtgtgatcgagtttgatgagtttattcattccctaagtgtcttccaccccttggcaccaattgaagacaagatcgattcatgcatttcgtatgtttcagttgcatttaggttgtatgacttgagacaaactgggtttattgagcgtgaagaggttaagcaaatggtaattgctatattgatggaatctgatttaaaattatcagatgacttactcgaggccatcatagataagacatttgaagatgctgatgcggataaggatggaaaaataaataaagaggagtggaaggaatttgcgttacgccaccctaacctgttaaagaatatgacactgccttatctgagggacatcacaaccgtcttccctagtttcgtcttcaacacggcggtggaagattagtcgttcgaattgaaggcaataaagcagtattggggattgcttgaggtgcacaaggttcctgaaacctgacggctgttggtcgccttcaaccactgagaatccgatgtgttctgagcatcaaggcagccacccgaccatcactcctgctataaattataatataaattataaggctcatccggggtggcagatcggcagcgggaacttagggggtgtttgggaacaaagtttttctacagttttgaaagaatactgcagtattctcaaatactgcagtattatatacagaatggtgtttggcaagctagctaaaatctcagtttttaaaactgaagtattgcaaatactatagtagttttaagctattctaaacttaagtctggacctcagtttttaaaactgcggtattgtaaactgcggtattgtcatgactaaagtatactgtagtatttcaaaaactttgttcccaaacagggccttacctgatataatttcttgctgccgttttttgcgcagcaatggattgagagttggtagctgtagatacatctagcttccattctgtacgtagggatccaggaactgtaaatacgttctatggaattgtatcggaaagttcctagtacgccagccagatctagaataagccagagcttgtttcttgcagtggttttcttgccctcaatgctctcttctgaacacgaacatgcttatgc

SEQ ID NO: 37278 - DNA, 3015 bp, Zea Mays
gaaatgaaactcgcgacagacaggtcgtcctctgctccgtggaccctattcctgcgattatctggttgctcacatggacggtgatccgtgatccccggtgaccaagggtgttgaatcctcatgcaggcagaggcagaaacactgcccgaggctgatgcctgatggtgcgatcccgttccctgtcgccatcgagttcgttttttcgttgcttgacagccttaaagcggcgcacgaatgccacgagccactgaggcggcttcccagttcactccaggcccagggcgcccggtcgccatgaactcccgctcctcctccggcggcgtgcggtccgagagctcgctgtcgttgggggagcgcctctgcgcggtcttcttccccgtcatcgccatcgccgaggccgttttcttcgccttcaccgactgcctcgcggacctctgcaccgactccggctcctcgcactcgcgccgcttcggcgcgggcgcgtcctcctccgccgccaggaacagtcggagcaaccattgccagccccaccacagacctttcctacgccgcgccactgcgggtggatggacctcccccaacctccgccagctcgcacgcctcgccgacgagtcccgatgcttctcggtgaacgaggtggaggcgctctttgagctctacaagaagatcagctgctccatcatcgacgacggcctcatccacaaggtgcatccaacaaaatccctcttcgattccctgtatctaccgtccatattcttgtcattcatgacgtgatttggggttaatttgaacatctatttctttgagtgaagtatttcttgctgtacttggaagatgcgattttttttgtttttttagcctgcggacaattgcctccttggctttaaatatggaagaaatagttacataagacctgggatagtgacactctgtcatccccgcatgattgacgagtatattaggccattgagggcgacgtgcaatttagtacacaaatccatctttaattttgcagggcatgcagtggattggattattttctgagggctggattggttaagacaatgtaatattcttctttttgagttgattggagaccgtcatgtgacaagcacacatgacaaaattttaaaagtttgtttgacagcccattaagattgctcgcctgaattttcccatattccgtgtgccattatatcctaggataacacctgcatctcggtatgcttggatccctgtatgcatgattgaagagtaggtgattgaggacgatgcttaacttagtacatagatccatgttgatttgttgcactacacgcaatggattggattatttcttgaggactgaattagctaagacgacatcttattcttctttttgagtcgattggagactgtcatgtgacaggccacatgagtgcattataaaactttgtttgacagcccataggatcacttgtctgaattttcccatgttgcgtgtgcaattgggtcgtaggataacacctgcatctcagtatgcttggttgtcatgttccttcctctgccataccaaggttgaaggttttgattggtgaagcatgtgatcacatttttttattaaactaacacagcagcaattttgtgtgcgtgtgatgcggttcaaaatcagagaaatatttttcagccttacattttcagcagcatcttctatgtgtgctgtgtgcacaatagtccaattagaaaataaaatatgaatgtccttgctcgttttgtatgcaactagacgaatggccaatgtcatattaatttttcttaaccattccactgctggatggttcttcatcaggaagaacttcagctggcactgttcaaaactccaagcggcgagaatctttttcttgatagagttttttatttgtttgatgagaagaaaaatggtgtgatcgagtttgatgagtttattcattccctaagtgtcttccaccccttggcaccaattgaagacaagatcgattttgcatttaggttgtatgacttgagacaaactgggtttattgagcgtgaagaggttaagcaaatggtaattgctatattgatggaatctgatttaaaattatcagatgacttactcgaggccatcatagataagacatttgaagatgctgatgcggataaggatggaaaaataaataaagaggagtggaaggaatttgcgttacgccaccctaacctgttaaagaatatgacactgccttatctgagggacatcacaaccgtcttccctagtttcgtcttcaacacggcggtggaagattagtcgttcgaattgaaggcaataaagcagtattggggattgcttgaggtgcacaaggttcctgaaacctgacggctgttggtcgccttcaaccactgagaatccgatgtgttctgagcatcaaggcagccacccgaccatcactcctgctataaattataatataaattataaggctcatccggggtggcagatcggcagcgggaacttagggggtgtttgggaacaaagtttttctacagttttgaaagaatactgcagtattctcaaatactgcagtattatatacagaatggtgtttggcaagctagctaaaatctcagtttttaaaactgaagtattgcaaatactatagtagttttaagctattctaaacttaagtctggacctcagtttttaaaactgcggtattgtaaactgcggtattgtcatgactaaagtatactgtagtatttcaaaaactttgttcccaaacagggccttacctgatataatttcttgctgccgttttttgcgcagcaatggattgagagttggtagctgtagatacatctagcttccattctgtacgtagggatccaggaactgtaaatacgttctatggaattgtatcggaaagttcctagtacgccagccagatctagaataagccagagcttgtttcttgcagtggttttcttgccctcaatgctctcttctgaacacgaacatgcttatgc

SEQ ID NO: 37279 - DNA, 1990 bp, Zea Mays
gaaatgaaactcgcgacagacaggtcgtcctctgctccgtggaccctattcctgcgattatctggttgctcacatggacggtgatccgtgatccccggtgaccaagggtgttgaatcctcatgcaggcagaggcagaaacactgcccgaggctgatgcctgatggtgcgatcccgttccctgtcgccatcgagttcgttttttcgttgcttgacagccttaaagcggcgcacgaatgccacgagccactgaggcggcttcccagttcactccaggcccagggcgcccggtcgccatgaactcccgctcctcctccggcggcgtggtaggtgccaggtggctgcaatgtccacccttctcccgcggtccgagagctcgctgtcgttgggggagcgcctctgcgcggtcttcttccccgtcatcgccatcgccgaggccgttttcttcgccttcaccgactgcctcgcggacctctgcaccgactccggctcctcgcactcgcgccgcttcggcgcgggcgcgtcctcctccgccgccaggaacagtcggagcaaccattgccagccccaccacagacctttcctacgccgcgccactgcgggtggatggacctcccccaacctccgccagctcgcacgcctcgccgacgagtcccgatgctgtaaaaaaaatcgatccaagcctactccaccttttgctcttccttggtttctccgcctccatctcgcaatgccgtttcatctgactctgtttcgattgaactgaattggactaaatgaagtctcggtgaacgaggtggaggcgctctttgagctctacaagaagatcagctgctccatcatcgacgacggcctcatccacaaggttttttatttgtttgatgagaagaaaaatggtgtgatcgagtttgatgagtttattcattccctaagtgtcttccaccccttggcaccaattgaagacaagatcgattttgcatttaggttgtatgacttgagacaaactgggtttattgagcgtgaagaggttaagcaaatggtaattgctatattgatggaatctgatttaaaattatcagatgacttactcgaggccatcatagataagacatttgaagatgctgatgcggataaggatggaaaaataaataaagaggagtggaaggaatttgcgttacgccaccctaacctgttaaagaatatgacactgccttatctgagggacatcacaaccgtcttccctagtttcgtcttcaacacggcggtggaagattagtcgttcgaattgaaggcaataaagcagtattggggattgcttgaggtgcacaaggttcctgaaacctgacggctgttggtcgccttcaaccactgagaatccgatgtgttctgagcatcaaggcagccacccgaccatcactcctgctataaattataatataaattataaggctcatccggggtggcagatcggcagcgggaacttagggggtgtttgggaacaaagtttttctacagttttgaaagaatactgcagtattctcaaatactgcagtattatatacagaatggtgtttggcaagctagctaaaatctcagtttttaaaactgaagtattgcaaatactatagtagttttaagctattctaaacttaagtctggacctcagtttttaaaactgcggtattgtaaactgcggtattgtcatgactaaagtatactgtagtatttcaaaaactttgttcccaaacagggccttacctgatataatttcttgctgccgttttttgcgcagcaatggattgagagttggtagctgtagatacatctagcttccattctgtacgtagggatccaggaactgtaaatacgttctatggaattgtatcggaaagttcctagtacgccagccagatctagaataagccagagcttgtttcttgcagtggttttcttgccctcaatgctctcttctgaacacgaacatgcttatgc

SEQ ID NO: 37280 - DNA, 3136 bp, Zea Mays
gaaatgaaactcgcgacagacaggtcgtcctctgctccgtggaccctattcctgcgattatctggttgctcacatggacggtgatccgtgatccccggtgaccaagggtgttgaatcctcatgcaggcagaggcagaaacactgcccgaggctgatgcctgatggtgcgatcccgttccctgtcgccatcgagttcgttttttcgttgcttgacagccttaaagcggcgcacgaatgccacgagccactgaggcggcttcccagttcactccaggcccagggcgcccggtcgccatgaactcccgctcctcctccggcggcgtgcggtccgagagctcgctgtcgttgggggagcgcctctgcgcggtcttcttccccgtcatcgccatcgccgaggccgttttcttcgccttcaccgactgcctcgcggacctctgcaccgactccggctcctcgcactcgcgccgcttcggcgcgggcgcgtcctcctccgccgccaggaacagtcggagcaaccattgccagccccaccacagacctttcctacgccgcgccactgcgggtggatggacctcccccaacctccgccagctcgcacgcctcgccgacgagtcccgatgcttctcggtgaacgaggtggaggcgctctttgagctctacaagaagatcagctgctccatcatcgacgacggcctcatccacaaggtgcatccaacaaaatccctcttcgattccctgtatctaccgtccatattcttgtcattcatgacgtgatttggggttaatttgaacatctatttctttgagtgaagtatttcttgctgtacttggaagatgcgattttttttgtttttttagcctgcggacaattgcctccttggctttaaatatggaagaaatagttacataagacctgggatagtgacactctgtcatccccgcatgattgacgagtatattaggccattgagggcgacgtgcaatttagtacacaaatccatctttaattttgcagggcatgcagtggattggattattttctgagggctggattggttaagacaatgtaatattcttctttttgagttgattggagaccgtcatgtgacaagcacacatgacaaaattttaaaagtttgtttgacagcccattaagattgctcgcctgaattttcccatattccgtgtgccattatatcctaggataacacctgcatctcggtatgcttggatccctgtatgcatgattgaagagtaggtgattgaggacgatgcttaacttagtacatagatccatgttgatttgttgcactacacgcaatggattggattatttcttgaggactgaattagctaagacgacatcttattcttctttttgagtcgattggagactgtcatgtgacaggccacatgagtgcattataaaactttgtttgacagcccataggatcacttgtctgaattttcccatgttgcgtgtgcaattgggtcgtaggataacacctgcatctcagtatgcttggttgtcatgttccttcctctgccataccaaggttgaaggttttgattggtgaagcatgtgatcacatttttttattaaactaacacagcagcaattttgtgtgcgtgtgatgcggttcaaaatcagagaaatatttttcagccttacattttcagcagcatcttctatgtgtgctgtgtgcacaatagtccaattagaaaataaaatatgaatgtccttgctcgttttgtatgcaactagacgaatggccaatgtcatattaatttttcttaaccattccactgctggatggttcttcatcaggaagaacttcagctggcactgttcaaaactccaagcggcgagaatctttttcttgatagagtgagtatttactgtgcttttctctttgtatttgttttcataataattcttgatttatttactacgccatacacagcgcttctccatttctttgctgattatcctcaaaatatttatatcgcatgctgtcaacatagataatggcacgaaactaagattgtctccgtgatccaggttttttatttgtttgatgagaagaaaaatggtgtgatcgagtttgatgagtttattcattccctaagtgtcttccaccccttggcaccaattgaagacaagatcgattgttaagcaaatggtaattgctatattgatggaatctgatttaaaattatcagatgacttactcgaggccatcatagataagacatttgaagatgctgatgcggataaggatggaaaaataaataaagaggagtggaaggaatttgcgttacgccaccctaacctgttaaagaatatgacactgccttatctgagggacatcacaaccgtcttccctagtttcgtcttcaacacggcggtggaagattagtcgttcgaattgaaggcaataaagcagtattggggattgcttgaggtgcacaaggttcctgaaacctgacggctgttggtcgccttcaaccactgagaatccgatgtgttctgagcatcaaggcagccacccgaccatcactcctgctataaattataatataaattataaggctcatccggggtggcagatcggcagcgggaacttagggggtgtttgggaacaaagtttttctacagttttgaaagaatactgcagtattctcaaatactgcagtattatatacagaatggtgtttggcaagctagctaaaatctcagtttttaaaactgaagtattgcaaatactatagtagttttaagctattctaaacttaagtctggacctcagtttttaaaactgcggtattgtaaactgcggtattgtcatgactaaagtatactgtagtatttcaaaaactttgttcccaaacagggccttacctgatataatttcttgctgccgttttttgcgcagcaatggattgagagttggtagctgtagatacatctagcttccattctgtacgtagggatccaggaactgtaaatacgttctatggaattgtatcggaaagttcctagtacgccagccagatctagaataagccagagcttgtttcttgcagtggttttcttgccctcaatgctctcttctgaacacgaacatgcttatgc

SEQ ID NO: 37281 - DNA, 2120 bp, Zea Mays
gaaatgaaactcgcgacagacaggtcgtcctctgctccgtggaccctattcctgcgattatctggttgctcacatggacggtgatccgtgatccccggtgaccaagggtgttgaatcctcatgcaggcagaggcagaaacactgcccgaggctgatgcctgatggtgcgatcccgttccctgtcgccatcgagttcgttttttcgttgcttgacagccttaaagcggcgcacgaatgccacgagccactgaggcggcttcccagttcactccaggcccagggcgcccggtcgccatgaactcccgctcctcctccggcggcgtgcggtccgagagctcgctgtcgttgggggagcgcctctgcgcggtcttcttccccgtcatcgccatcgccgaggccgttttcttcgccttcaccgactgcctcgcggacctctgcaccgactccggctcctcgcactcgcgccgcttcggcgcgggcgcgtcctcctccgccgccaggaacagtcggagcaaccattgccagccccaccacagacctttcctacgccgcgccactgcgggtggatggacctcccccaacctccgccagctcgcacgcctcgccgacgagtcccgatgctgtaaaaaaaatcgatccaagcctactccaccttttgctcttccttggtttctccgcctccatctcgcaatgccgtttcatctgactctgtttcgattgaactgaattggactaaatgaagtctcggtgaacgaggtggaggcgctctttgagctctacaagaagatcagctgctccatcatcgacgacggcctcatccacaagaaaaatggtgtgatcgagtttgatgagtttattcattccctaagtgtcttccaccccttggcaccaattgaagacaagatcgattgtatgtatgctaactgcagaaacggtggtcaatataataataataataatatgtaggcttttttatatttatatttgcagcatgcatttcgtatgtttcagttgcatttaggttgtatgacttgagacaaactgggtttattgagcgtgaagaggtaagctcgcaaagatgttctgtatctatgcataccttttatgtggattcttttctagtaaagtggctaattgccatgccttgccttataggttaagcaaatggtaattgctatattgatggaatctgatttaaaattatcagatgacttactcgaggccatcatagataagacatttgaagatgctgatgcggataaggatggaaaaataaataaagaggagtggaaggaatttgcgttacgccaccctaacctgttaaagaatatgacactgccttatctgagggacatcacaaccgtcttccctagtttcgtcttcaacacggcggtggaagattagtcgttcgaattgaaggcaataaagcagtattggggattgcttgaggtgcacaaggttcctgaaacctgacggctgttggtcgccttcaaccactgagaatccgatgtgttctgagcatcaaggcagccacccgaccatcactcctgctataaattataatataaattataaggctcatccggggtggcagatcggcagcgggaacttagggggtgtttgggaacaaagtttttctacagttttgaaagaatactgcagtattctcaaatactgcagtattatatacagaatggtgtttggcaagctagctaaaatctcagtttttaaaactgaagtattgcaaatactatagtagttttaagctattctaaacttaagtctggacctcagtttttaaaactgcggtattgtaaactgcggtattgtcatgactaaagtatactgtagtatttcaaaaactttgttcccaaacagggccttacctgatataatttcttgctgccgttttttgcgcagcaatggattgagagttggtagctgtagatacatctagcttccattctgtacgtagggatccaggaactgtaaatacgttctatggaattgtatcggaaagttcctagtacgccagccagatctagaataagccagagcttgtttcttgcagtggttttcttgccctcaatgctctcttctgaacacgaacatgcttatgc

SEQ ID NO: 37282 - DNA, 3053 bp, Zea Mays
gaaatgaaactcgcgacagacaggtcgtcctctgctccgtggaccctattcctgcgattatctggttgctcacatggacggtgatccgtgatccccggtgaccaagggtgttgaatcctcatgcaggcagaggcagaaacactgcccgaggctgatgcctgatggtgcgatcccgttccctgtcgccatcgagttcgttttttcgttgcttgacagccttaaagcggcgcacgaatgccacgagccactgaggcggcttcccagttcactccaggcccagggcgcccggtcgccatgaactcccgctcctcctccggcggcgtggtaggtgccaggtggctgcaatgtccacccttctcccgcggtccgagagctcgctgtcgttgggggagcgcctctgcgcggtcttcttccccgtcatcgccatcgccgaggccgttttcttcgccttcaccgactgcctcgcggacctctgcaccgactccggctcctcgcactcgcgccgcttcggcgcgggcgcgtcctcctccgccgccaggaacagtcggagcaaccattgccagccccaccacagacctttcctacgccgcgccactgcgggtggatggacctcccccaacctccgccagctcgcacgcctcgccgacgagtcccgatgcttctcggtgaacgaggtggaggcgctctttgagctctacaagaagatcagctgctccatcatcgacgacggcctcatccacaaggtgcatccaacaaaatccctcttcgattccctgtatctaccgtccatattcttgtcattcatgacgtgatttggggttaatttgaacatctatttctttgagtgaagtatttcttgctgtacttggaagatgcgattttttttgtttttttagcctgcggacaattgcctccttggctttaaatatggaagaaatagttacataagacctgggatagtgacactctgtcatccccgcatgattgacgagtatattaggccattgagggcgacgtgcaatttagtacacaaatccatctttaattttgcagggcatgcagtggattggattattttctgagggctggattggttaagacaatgtaatattcttctttttgagttgattggagaccgtcatgtgacaagcacacatgacaaaattttaaaagtttgtttgacagcccattaagattgctcgcctgaattttcccatattccgtgtgccattatatcctaggataacacctgcatctcggtatgcttggatccctgtatgcatgattgaagagtaggtgattgaggacgatgcttaacttagtacatagatccatgttgatttgttgcactacacgcaatggattggattatttcttgaggactgaattagctaagacgacatcttattcttctttttgagtcgattggagactgtcatgtgacaggccacatgagtgcattataaaactttgtttgacagcccataggatcacttgtctgaattttcccatgttgcgtgtgcaattgggtcgtaggataacacctgcatctcagtatgcttggttgtcatgttccttcctctgccataccaaggttgaaggttttgattggtgaagcatgtgatcacatttttttattaaactaacacagcagcaattttgtgtgcgtgtgatgcggttcaaaatcagagaaatatttttcagccttacattttcagcagcatcttctatgtgtgctgtgtgcacaatagtccaattagaaaataaaatatgaatgtccttgctcgttttgtatgcaactagacgaatggccaatgtcatattaatttttcttaaccattccactgctggatggttcttcatcaggaagaacttcagctggcactgttcaaaactccaagcggcgagaatctttttcttgatagagttttttatttgtttgatgagaagaaaaatggtgtgatcgagtttgatgagtttattcattccctaagtgtcttccaccccttggcaccaattgaagacaagatcgattttgcatttaggttgtatgacttgagacaaactgggtttattgagcgtgaagaggttaagcaaatggtaattgctatattgatggaatctgatttaaaattatcagatgacttactcgaggccatcatagataagacatttgaagatgctgatgcggataaggatggaaaaataaataaagaggagtggaaggaatttgcgttacgccaccctaacctgttaaagaatatgacactgccttatctgagggacatcacaaccgtcttccctagtttcgtcttcaacacggcggtggaagattagtcgttcgaattgaaggcaataaagcagtattggggattgcttgaggtgcacaaggttcctgaaacctgacggctgttggtcgccttcaaccactgagaatccgatgtgttctgagcatcaaggcagccacccgaccatcactcctgctataaattataatataaattataaggctcatccggggtggcagatcggcagcgggaacttagggggtgtttgggaacaaagtttttctacagttttgaaagaatactgcagtattctcaaatactgcagtattatatacagaatggtgtttggcaagctagctaaaatctcagtttttaaaactgaagtattgcaaatactatagtagttttaagctattctaaacttaagtctggacctcagtttttaaaactgcggtattgtaaactgcggtattgtcatgactaaagtatactgtagtatttcaaaaactttgttcccaaacagggccttacctgatataatttcttgctgccgttttttgcgcagcaatggattgagagttggtagctgtagatacatctagcttccattctgtacgtagggatccaggaactgtaaatacgttctatggaattgtatcggaaagttcctagtacgccagccagatctagaataagccagagcttgtttcttgcagtggttttcttgccctcaatgctctcttctgaacacgaacatgcttatgc

SEQ ID NO: 37283 - DNA, 1549 bp, Zea Mays
ggtaacaccagaactgtgtaatcaccagcaacattaaccaggctattgaagcaattatagaaaaaaatcgttattgtgacatcatcttgtttgtttccaaaattttggcatagtagttattgctatttgatgagttgaggtcctgcatgcttgttatgtcgagtcttgcatatatattctatgagctgttagatgtcattagcaaattatcagagtatgtagcagttggttttttcttgtatgtggtcgtttaagttcctgttgcttgatatatgattttgcagtaccatttcttaaagtgccacattatatttgacatgaatgcactctatataaacctcctttgggtgatctatttttaattatatgcagagaaagtgaaggccagtttgagtatggcaactacaggaaggaggctgacgatttgcattctgttgtattgtatctgtgtcaaaaaagttatgatatagcagctgttgttggtcatagcaaaggaggagatgtggtgattctatatgcttctgtccatgatgatgtgggcacaattgttaatttatcgggccggtttgatttaagaaaaggcattgaagaacggataggggaagggtctatcgataaaataaacaaagaaggctaccttgatgtcaaggataaatctgaaaatgccagctacagggtaaccaaagaaagtttgatggaacggcttaatactgatatgcgcgctgcaagtgtttccataagcaagggatgcaggttcttaacagtccatggctcagctgataagaccatacccgtagaagatgcccatgagtttgcgaagcatatacccaaccatgaactgcgtgtcatagaaggagcaaatcataactacacctcacatcgcaaagaagttgctgatgcagtagtagatttcatcacgtccaatgtaaccgtataataaggctgggggatgaatgtcattccagaccacttggtcatgcacctatcgatcccctccatcatggggcaatactggtactaggtgtctattatcttctgaaccgaaaaccccatgtcatgcaggtttgatatgatgatgttgctcgtatgtgctcttaagaattactgtaaatattgaactcctggtagacttgtatgccgcagctcgcagtttatataggctcatatctctatagtttttttttctttcttctttgttcgagggctctattcccttgctcttttttgcctggttcatgtaagttttcttccttgtaccctatagttatttaatttatttaaatttggcactgtggactattttgtacaagaagtcttagtacaaacgtacaagcaggcctattggttcttttagatcgtgatctaatcatagttgtacattttagtacttaaaacctgccccaccaacaggtatataagtattgggcaacaatctgcgtgagctggtggaggatttaaacacacaagaccatttcaacacacgtgaataaattttactctaaaccatttcgacatggtttgttcactagtgcaaaaagaaaagaaaaga

SEQ ID NO: 37284 - DNA, 1626 bp, Zea Mays
aactttctttcgtgcgcgcctgtcatcgtccggctcagagccgccacagcctcgccgtcgattctctcccctccccttcgtcctcacgagcgacgaacgtcacgaacccctcctccacctcctgctactatcggcgccggagccctcctctggtctcaccgtgcaaatccccaaccccgaggcagacgcaggccagcccctgtgatggcacagaccaacggcaacgaccccttcagtccccctgtttcccaagaaagggttgtgataacaaacaagcatggtgagaggcttgtggggctgctgcatcacaccgcttcaaacaagattgtggtcttgtgccatggttttatagctaccaagaatgacagcctcattcttgacctggcggaagcgttgacaaaggaagggatcagtgtcttccgcttcgatttcagtggaaatgggtaacaccagaactgtagaaagtgaaggccagtttgagtatggcaactacaggaaggaggctgacgatttgcattctgttgtattgtatctgtgtcaaaaaagttatgatatagcagctgttgttggtcatagcaaaggaggagatgtggtgattctatatgcttctgtccatgatgatgtgggcacaattgttaatttatcgggccggtttgatttaagaaaaggcattgaagaacggataggggaagggtctatcgataaaataaacaaagaaggctaccttgatgtcaaggataaatctgctacagggtaaccaaagaaagtttgatggaacggcttaatactgatatgcgcgctgcaagtgtttccataagcaagggatgcaggttcttaacagtccatggctcagctgataagaccatacccgtagaagatgcccatgagtttgcgaagcatatacccaaccatgaactgcgtgtcatagaaggagcaaatcataactacacctcacatcgcaaagaagttgctgatgcagtagtagatttcatcacgtccaatgtaaccgtataataaggctgggggatgaatgtcattccagaccacttggtcatgcacctatcgatcccctccatcatggggcaatactggtactaggtgtctattatcttctgaaccgaaaaccccatgtcatgcaggtttgatatgatgatgttgctcgtatgtgctcttaagaattactgtaaatattgaactcctggtagacttgtatgccgcagctcgcagtttatataggctcatatctctatagtttttttttctttcttctttgttcgagggctctattcccttgctcttttttgcctggttcatgtaagttttcttccttgtaccctatagttatttaatttatttaaatttggcactgtggactattttgtacaagaagtcttagtacaaacgtacaagcaggcctattggttcttttagatcgtgatctaatcatagttgtacattttagtacttaaaacctgccccaccaacaggtatataagtattgggcaacaatctgcgtgagctggtggaggatttaaacacacaagaccatttcaacacacgtgaataaattttactctaaaccatttcgacatggtttgttcactagtgcaaaaagaaaagaaaaga

SEQ ID NO: 37285 - DNA, 1665 bp, Zea Mays
agaaaaagcggagccattggcgaaaataactttctttcgtgcgcgcctgtcatcgtccggctcagagccgccacagcctcgccgtcgattctctcccctccccttcgtcctcacgagcgacgaacgtcacgaacccctcctccacctcctgctactatcggcgccggagccctcctctggtctcaccgtgcaaatccccaaccccgaggcagacgcaggccagcccctgtgatggcacagaccaacggcaacgaccccttcagtccccctgtttcccaagaaagggttgtgataacaaacaagcatggtgagaggcttgtggggctgctgcatcacaccgcttcaaacaagattgtggtcttgtgccatggttttatagctaccaagaatgacagcctcattcttgacctggcggaagcgttgacaaaggaagggatcagtgtcttccgcttcgatttcagtggaaatggagaaagtgaaggccagtttgagtatggcaactacaggaaggaggctgacgatttgcattctgttgtattgtatctgtgtcaaaaaagttatgatatagcagctgttgttggtcatagcaaaggaggagatgtggtgattctatatgcttctgtccatgatgatgtgggcacaattgttaatttatcgggccggtttgatttaagaaaaggcattgaagaacggataggggaagggtctatcgataaaataaacaaagaaggctaccttgatgtcaaggataaatctggtatgaatgggggcttagaaaatgccagctacagggtaaccaaagaaagtttgatggaacggcttaatactgatatgcgcgctgcaagtgtttccataagcaagggatgcaggttcttaacagtccatggctcagctgataagaccatacccgtagaagatgcccatgagtttgcgaagcatatacccaaccatgaactgcgtgtcatagaaggagcaaatcataactacacctcacatcgcaaagaagttgctgatgcagtagtagatttcatcacgtccaatgtaaccgtataataaggctgggggatgaatgtcattccagaccacttggtcatgcacctatcgatcccctccatcatggggcaatactggtactaggtgtctattatcttctgaaccgaaaaccccatgtcatgcaggtttgatatgatgatgttgctcgtatgtgctcttaagaattactgtaaatattgaactcctggtagacttgtatgccgcagctcgcagtttatataggctcatatctctatagtttttttttctttcttctttgttcgagggctctattcccttgctcttttttgcctggttcatgtaagttttcttccttgtaccctatagttatttaatttatttaaatttggcactgtggactattttgtacaagaagtcttagtacaaacgtacaagcaggcctattggttcttttagatcgtgatctaatcatagttgtacattttagtacttaaaacctgccccaccaacaggtatataagtattgggcaacaatctgcgtgagctggtggaggatttaaacacacaagaccatttcaacacacgtgaataaattttactctaaaccatttcgacatggtttgttcactagtgcaaaaagaaaagaaaaga

SEQ ID NO: 37286 - DNA, 1631 bp, Zea Mays
agaaaaagcggagccattggcgaaaataactttctttcgtgcgcgcctgtcatcgtccggctcagagccgccacagcctcgccgtcgattctctcccctccccttcgtcctcacgagcgacgaacgtcacgaacccctcctccacctcctgctactatcggcgccggagccctcctctggtctcaccgtgcaaatccccaaccccgaggcagacgcaggccagcccctgtgatggcacagaccaacggcaacgaccccttcagtccccctgtttcccaagaaagggttgtgataacaaacaagcatggtgagaggcttgtggggctgctgcatcacaccgcttcaaacaagattgtggtcttgtgccatggttttatagctaccaagaatgacagcctcattcttgacctggcggaagcgttgacaaaggaagggatcagtgtcttccgcttcgatttcagtggaaatggagaaagtgaaggccagtttgagtatggcaactacaggaaggaggctgacgatttgcattctgttgtattgtatctgtgtcaaaaaagttatgatatagcagctgttgttggtcatagcaaaggaggagatgtggtgattctatatgcttctgtccatgatgatgtgggcacaattgttaatttatcgggccggtttgatttaagaaaaggcattgaagaacggataggggaagggtctatcgataaaataaacaaagaaggctaccttgatgtcaaggataaatctgggtaaccaaagaaagtttgatggaacggcttaatactgatatgcgcgctgcaagtgtttccataagcaagggatgcaggttcttaacagtccatggctcagctgataagaccatacccgtagaagatgcccatgagtttgcgaagcatatacccaaccatgaactgcgtgtcatagaaggagcaaatcataactacacctcacatcgcaaagaagttgctgatgcagtagtagatttcatcacgtccaatgtaaccgtataataaggctgggggatgaatgtcattccagaccacttggtcatgcacctatcgatcccctccatcatggggcaatactggtactaggtgtctattatcttctgaaccgaaaaccccatgtcatgcaggtttgatatgatgatgttgctcgtatgtgctcttaagaattactgtaaatattgaactcctggtagacttgtatgccgcagctcgcagtttatataggctcatatctctatagtttttttttctttcttctttgttcgagggctctattcccttgctcttttttgcctggttcatgtaagttttcttccttgtaccctatagttatttaatttatttaaatttggcactgtggactattttgtacaagaagtcttagtacaaacgtacaagcaggcctattggttcttttagatcgtgatctaatcatagttgtacattttagtacttaaaacctgccccaccaacaggtatataagtattgggcaacaatctgcgtgagctggtggaggatttaaacacacaagaccatttcaacacacgtgaataaattttactctaaaccatttcgacatggtttgttcactagtgcaaaaagaaaagaaaaga

SEQ ID NO: 37287 - DNA, 2969 bp, Zea Mays
gacaatatttcgtcgaaacctcccccgtatttccacgtcatgcaaccaccacaccaccctccacctcctccgcgtctgtgtacccaggcaaaagatcgcacgcacccaagttcaagttcgacccaaactgtttccacagcacagtgcaggccgggagggggaaaaaaaagaagggatcgagtcgagagacactggcctctgctttccgtgtgtgggggttctcctctctcttgatgctttttctccgccgcacttcctacgtccatgcaacaagtcgcctcaacccgctcggtttctttgcctcctccgtggcaatcggagagcactcgccctcgcactcgcccaactcatggtggattgacggcatggagggaggcgaggctggaggcttgagattcctcctccggttcgacccggcaaggcccgggctcgaccgcgcgctgctcggcttctccttctccgccctcttcagccgcctcgtcgttggatggagcaagcatggccagacgggaggaggaggaggaggagggtttccggcgatcgcggcggagggtgagggtggggagggctccgggaacgccgccgtgtccgtggccgcgcttgccgccgccgccgccgccgcttctctctgcctcgcggcgatgtacgcgtccgatcagcggcggcctcgccatgctcgcgctcgacggctgccggcgctggcttcagctccgcggtcccgtgcgctgcatgctcctcatgatgggctcaggattctgtcgtcagacgacccaaacgacgaatctccggacaaggtgatccacggcgcgtcgatcggcgccggagacgacgagccggatatcgtcgcgcgagtggagatggacgctaccccgccggcagttcccgtgccaaatgccgacgacgacgacgacgacgacgaaaccgaaacggaagcagaggaggaggaagaagaagaggagcggcaggagctccagcggctgagggagctgtggctgtcgctggaggagcgggagcagaggctggagctccgcctgcaggagctggagggcctccggtcgcaggaggccgccgcgcgggagctcgaggcccgcgtcgccgccgccgacgcggaggtgcggatcctgcagctcagtgtctccgcgctgcaggaggagaacgggaggctcagggcgcgggcggaggacctggacgccgcccgcgctgagctggcgcgcgccaaggagaagctgcgcgcggtcaaggcgcgcgtgcagggcgagcaggaggcggcggcggcggcgctccggaggaaggtggaggagctcgagagcggcgggcgggagagggtcggcgcgctggtggcggaggtcgcggagctgcgcaaggcgaacgccgcgctggaggcggacaatatggagctcgccctcaggctgcaggacgcagagcagcaggctgcatccggcgcctctgctagtaatctggcccctgaggagggcatgattcaggagatgacgtacctgagggagagcaacgagcgactgacgaggcagatcgagcaactgcacaacgaccactgcgcgcacgtcgaggagctcgtctacctcaagtgggtcaacgcctgcctccgccatgagctccgtgaccatgacggccagcccaccgccgagcaacaaggccccagcgccggctccagagacctgtcggccctggagctgagcaagagcatgagcttccggtccagcgagagggccaagcagctcatgctgaggtacggtagccccggcctggaccgcttcgaccctgccctcttctccccgctgcacgagtcagtcgacggcgacggctacggctacgagcggtcgccggcgcacagctacgagcccgagcggagcccttgcgctaggcccgcgacggcgacggcctcgtcctcccccgccgcagcaccggggaagaaagcggggccgcgcaggctcaagcttctcggtaacatcaagaagctgctgccggcggtcggcaagagaagccactcaaaccacgggcacgggcacgccggccacgatggcaggaaggcgccggcgccggctccggctcggagggacgagtacctcgacaaggccatgcagtggctgtcggcccacgacgtgctcgacggcgaccactcgtacgtgagcacgccgctgtcgtcgtgcgagaggacgccgctgagcagcgccacgaccagcacgaccgcggactcacgcgcccgctgcggcgacggtggtggtggccgcagcgagcgcggggaggcgacgcggccggaggcggagccgaccttggcgagatcgaagagcgacgccggcggagcgtacgggcgggaggcgagcaggtaccacgcgctcagacctgaacacccgggcagagaggcggacgagcccgacgggttccgtgcgccggagaagcgggaggcaaggaggcagtcggcggaggagctgaggactccggcggtggcgtagtacttgatggccccattgcagttaacggattaattgacaggaacgactgttagtctgttatgcagtgatgcacaaggctgtttttttttttgtgtgtgtgtgtgtgaatatttgtactcatgtatggttaggggcagatctagctgtaggacggatggagcttgattagcccacccctactgcctctcaaacaaaagccctccttgaaccccctccgtagctttttattaggaagaagaaagaagaataatggagagaaagagagaggaaggaaggagtccctgctaggttcatgctctgcgtccgtacccatgtatgggtgaatcaagatacagagtttaattccctttgtattatcatcaagcttttcacaaatcctggtaattcaagagctcaggagacgatggcaaaagcatggacgcccctcaaactagagaacggcagcttaccaatgatgtgatggccagggacaaaatagacaaccctttgaattttgat

SEQ ID NO: 37288 - DNA, 3015 bp, Zea Mays
gacaatatttcgtcgaaacctcccccgtatttccacgtcatgcaaccaccacaccaccctccacctcctccgcgtctgtgtacccaggcaaaagatcgcacgcacccaagttcaagttcgacccaaactgtttccacagcacagtgcaggccgggagggggaaaaaaaagaagggatcgagtcgagagacactggcctctgctttccgtgtgtgggggttctcctctctcttgatgctttttctccgccgcacttcctacgtccatgcaacaagtgcacgagctgacatatatacccccacggggccgtcgccgccgcagtcgcctcaacccgctcggtttctttgcctcctccgtggcaatcggagagcactcgccctcgcactcgcccaactcatggtggattgacggcatggagggaggcgaggctggaggcttgagattcctcctccggttcgacccggcaaggcccgggctcgaccgcgcgctgctcggcttctccttctccgccctcttcagccgcctcgtcgttggatggagcaagcatggccagacgggaggaggaggaggaggagggtttccggcgatcgcggcggagggtgagggtggggagggctccgggaacgccgccgtgtccgtggccgcgcttgccgccgccgccgccgccgcttctctctgcctcgcggcgatgtacgcgtccgatcagcggcggcctcgccatgctcgcgctcgacggctgccggcgctggcttcagctccgcggtcccgtgcgctgcatgctcctcatgatgggctcaggattctgtcgtcagacgacccaaacgacgaatctccggacaaggtgatccacggcgcgtcgatcggcgccggagacgacgagccggatatcgtcgcgcgagtggagatggacgctaccccgccggcagttcccgtgccaaatgccgacgacgacgacgacgacgacgaaaccgaaacggaagcagaggaggaggaagaagaagaggagcggcaggagctccagcggctgagggagctgtggctgtcgctggaggagcgggagcagaggctggagctccgcctgcaggagctggagggcctccggtcgcaggaggccgccgcgcgggagctcgaggcccgcgtcgccgccgccgacgcggaggtgcggatcctgcagctcagtgtctccgcgctgcaggaggagaacgggaggctcagggcgcgggcggaggacctggacgccgcccgcgctgagctggcgcgcgccaaggagaagctgcgcgcggtcaaggcgcgcgtgcagggcgagcaggaggcggcggcggcggcgctccggaggaaggtggaggagctcgagagcggcgggcgggagagggtcggcgcgctggtggcggaggtcgcggagctgcgcaaggcgaacgccgcgctggaggcggacaatatggagctcgccctcaggctgcaggacgcagagcagcaggctgcatccggcgcctctgctagtaatctggcccctgaggagggcatgattcaggagatgacgtacctgagggagagcaacgagcgactgacgaggcagatcgagcaactgcacaacgaccactgcgcgcacgtcgaggagctcgtctacctcaagtgggtcaacgcctgcctccgccatgagctccgtgaccatgacggccagcccaccgccgagcaacaaggccccagcgccggctccagagacctgtcggccctggagctgagcaagagcatgagcttccggtccagcgagagggccaagcagctcatgctgaggtacggtagccccggcctggaccgcttcgaccctgccctcttctccccgctgcacgagtcagtcgacggcgacggctacggctacgagcggtcgccggcgcacagctacgagcccgagcggagcccttgcgctaggcccgcgacggcgacggcctcgtcctcccccgccgcagcaccggggaagaaagcggggccgcgcaggctcaagcttctcggtaacatcaagaagctgctgccggcggtcggcaagagaagccactcaaaccacgggcacgggcacgccggccacgatggcaggaaggcgccggcgccggctccggctcggagggacgagtacctcgacaaggccatgcagtggctgtcggcccacgacgtgctcgacggcgaccactcgtacgtgagcacgccgctgtcgtcgtgcgagaggacgccgctgagcagcgccacgaccagcacgaccgcggactcacgcgcccgctgcggcgacggtggtggtggccgcagcgagcgcggggaggcgacgcggccggaggcggagccgaccttggcgagatcgaagagcgacgccggcggagcgtacgggcgggaggcgagcaggtaccacgcgctcagacctgaacacccgggcagagaggcggacgagcccgacgggttccgtgcgccggagaagcgggaggcaaggaggcagtcggcggaggagctgaggactccggcggtggcgtagtacttgatggccccattgcagttaacggattaattgacaggaacgactgttagtctgttatgcagtgatgcacaaggctgtttttttttttgtgtgtgtgtgtgtgaatatttgtactcatgtatggttaggggcagatctagctgtaggacggatggagcttgattagcccacccctactgcctctcaaacaaaagccctccttgaaccccctccgtagctttttattaggaagaagaaagaagaataatggagagaaagagagaggaaggaaggagtccctgctaggttcatgctctgcgtccgtacccatgtatgggtgaatcaagatacagagtttaattccctttgtattatcatcaagcttttcacaaatcctggtaattcaagagctcaggagacgatggcaaaagcatggacgcccctcaaactagagaacggcagcttaccaatgatgtgatggccagggacaaaatagacaaccctttgaattttgat

SEQ ID NO: 37289 - DNA, 1089 bp, Zea Mays
cttgaaacctgcacttgtacttaatgcttattgagatatatgaaaagcttctcactagtaggagggacactgaggacgatgatcaggagcatgagctacaaaaagctaaaaaactatccttgaagaaaaaaggtgctggctcagaagcgagtgctgagaggatgtccaaagcagatgctaatttgcagctactaaatccagctgaacaagagagacatttgcaaaaacagaaaaaacgtcggctccaaggccgtgaagatgagactctagcgaagttacagaagttcaagtcttctttcctcagtaagaatcttgctaccaatcatgtcgaagagaagaatccttctactgataaggcggaaaaggaagatgaagaggaggatgactacaaagggtggcacacaaacctactgtctttcttacccagttcttccaaggatggaatgactaggaaagatgatccagatgactatgtagtggtagacccacttctggagaaaggaaaagaaaaattcaacaagatgcaagcaaagcttaagcggagagagcgcgaatgggcaggcagatctctcacctgattggaaagcttaactcaaattatgtcaatgctccttacgtccttacctaccctggacggttggaaacactggaaatgatgcagttttggcatggtcttgggactgcgcgcagatgattggtagtgaccgtttgtggactagtgttttcctttttggcatgtgtcatgattgcttacactgtaaatgcaattgtacaatagattggttataagctcactgtgaaagcagctctctgtatcactagctatttaatatccgtttcttcaaggagccgattggctgaagttgacactatagcttttgtctcaatttccttatttttattaagaagcggaatagacagtaattggccttcctagtttgttaggtagtgtttggttctggagctaatttggatggagtcgctatgtccgagagattttgaggagtcccgagagattttgaggagccggatggtttattatttgagtataattttttaagtcattctatcttacatgaaattaatcca

SEQ ID NO: 37290 - DNA, 1413 bp, Zea Mays
ctaacgggagataatcgagaagaatcaggattctgagaatacacaagaaccaaacaccctctatatcacactttcttggtacttaagtcctgtttgctgggtgaacttcttgtgggcaggcatccccttagttggtttagggtgcgatctgcatctttttatctgtccaaggagcaagaggagatgaaaaaggttactgttcaaactgtcagggatgctttgatctcaaagaaagttgaatcaagggagcaagataatgctccattatctgatgattttcctgaagacgagaatgaagaggattttgataacaggatgcgcgcacaaatccttaaaaaacgtagagagcttggtgatgtttgccctcatgaaacctctaaagcaggagggacactgaggacgatgatcaggagcatgagctacaaaaagctaaaaaactatccttgaagaaaaaaggtgctggctcagaagcgagtgctgagaggatgtccaaagcagatgctaatttgcagctactaaatccagctgaacaagagagacatttgcaaaaacagaaaaaacgtcggctccaaggccgtgaagatgagactctagcgaagttacagaagttcaagtcttctttcctcagtaagaatcttgctaccaatcatgtcgaagagaagaatccttctactgataaggcggaaaaggaagatgaagaggaggatgactacaaagggtggcacacaaacctactgtctttcttacccagttcttccaaggatggaatgactaggaaagatgatccagatgactatgtagtggtagacccacttctggagaaaggaaaagaaaaattcaacaagatgcaagcaaagcttaagcggagagagcgcgaatgggcaggcagatctctcacctgattggaaagcttaactcaaattatgtcaatgctccttacgtccttacctaccctggacggttggaaacactggaaatgatgcagttttggcatggtcttgggactgcgcgcagatgattggtagtgaccgtttgtggactagtgttttcctttttggcatgtgtcatgattgcttacactgtaaatgcaattgtacaatagattggttataagctcactgtgaaagcagctctctgtatcactagctatttaatatccgtttcttcaaggagccgattggctgaagttgacactatagcttttgtctcaatttccttatttttattaagaagcggaatagacagtaattggccttcctagtttgttaggtagtgtttggttctggagctaatttggatggagtcgctatgtccgagagattttgaggagtcccgagagattttgaggagccggatggtttattatttgagtataattttttaagtcattctatcttacatgaaattaatcca

SEQ ID NO: 37291 - DNA, 2120 bp, Zea Mays
ctgacttccgaaaaagctccgccacgcccggccggaggtccgaccgacgcctagaccgttccaaagggaagggagcacgcgcgcgcgaggtagagcagcggcggcggcggcaggagtgaggcaggatgtcttcggtatacgtgcttgagcccccgacgaaggggaaggtggtggtgcagacgacggccggcccgctcgatatcgagctgtggcccaaggaggcccccaaggcggcgcgcaacttcgtgcagctctgcctcgagggctactacgacggcaccctcttccaccgcgtcatcaagaatttcctcgttcagggtggcgaccccactggctccggcactgggggtgagagcatctatggggctccatttgcggatgagttccactcgcggctgaggtttaaccacaggggtttagtggcttgtgccaatgctggtacatctcattctaatgggagccaattctttatcacccttgaccgttgtgattggcttgataagaagaacaccatctttgggaaggttactggtgattctattttcaaccttctttccttggccgacgttgagactgataaggatgatcgacctgtgtacgtgcagaagattctttcagtcgaggttctctgggacccatttgaggatattgttccaaggcaacttaagaaggctgaatctgttgctaaggctgatgctgaggtgaaacccaagaagaaggcagttaagcaacttaacgtcctctcgtttggtgatgaagtagaagaggaggagaatgaagcagctacctctgttcaggccaaaataaaaagtattcatgatgtgttggacgatccccgttttcttaaaggggaaccggaggatgtacagttgtccaaggagcaagaggagatgaaaaaggttactgttcaaactgtcagggatgctttgatctcaaagaaagttgaatcaagggagcaagataatgctccattatctgatgattttcctgaagacgagaatgaagaggattttgataacaggatgcgcgcacaaatccttaaaaaacgtagagagcttggtgatgtttgccctcatgaaacctctaaagcaggagggacactgaggacgatgatcaggagcatgagctacaaaaagctaaaaaactatccttgaagaaaaaaggtgctggctcagaagcgagtgctgagaggatgtccaaagcagatgctaatttgcagctactaaatccagctgaacaagagagacatttgcaaaaacagaaaaaacgtcggctccaaggccgtgaagatgagactctagcgaagttacagaagttcaagtcttctttcctcagtaagaatcttgctaccaatcatgtcgaagagaagaatccttctactgataaggcggaaaaggaagatgaagaggaggatgactacaaagggtggcacacaaacctactgtctttcttacccagttcttccaaggatggaatgactaggaaagatgatccagatgactatgtagtggtagacccacttctggagaaaggaaaagaaaaattcaacaagatgcaagcaaagcttaagcggagagagcgcgaatgggcaggcagatctctcacctgattggaaagcttaactcaaattatgtcaatgctccttacgtccttacctaccctggacggttggaaacactggaaatgatgcagttttggcatggtcttgggactgcgcgcagatgattggtagtgaccgtttgtggactagtgttttcctttttggcatgtgtcatgattgcttacactgtaaatgcaattgtacaatagattggttataagctcactgtgaaagcagctctctgtatcactagctatttaatatccgtttcttcaaggagccgattggctgaagttgacactatagcttttgtctcaatttccttatttttattaagaagcggaatagacagtaattggccttcctagtttgttaggtagtgtttggttctggagctaatttggatggagtcgctatgtccgagagattttgaggagtcccgagagattttgaggagccggatggtttattatttgagtataattttttaagtcattctatcttacatgaaattaatcca

SEQ ID NO: 37292 - DNA, 2373 bp, Zea Mays
cctgacttccgaaaaagctccgccacgcccggccggaggtccgaccgacgcctagaccgttccaaagggaagggagcacgcgcgcgcgaggtagagcagcggcggcggcggcaggagtgaggcaggatgtcttcggtatacgtgcttgagcccccgacgaaggggaaggtggtggtgcagacgacggccggcccgctcgatatcgagctgtggcccaaggaggcccccaaggcggcgcgcaacttcgtgcagctctgcctcgagggctactacgacggcaccctcttccaccgcgtcatcaagaatttcctcgttcagggtggcgaccccactggctccggcactgggggtgagagcatctatggggctccatttgcggatgagttccactcgcggctgaggtttaaccacaggggtttagtggcttgtgccaatgctggtacatctcattctaatgggagccaattctttatcacccttgaccgttgtgattggcttgataagaagaacaccatctttgggaaggttactggtgattctattttcaaccttctttccttggccgacgttgagactgataaggatgatcgacctgtgtacgtgcagaagattctttcagtcgaggttctctgggacccatttgaggatattgttccaaggcaacttaagaaggctgaatctgttgctaaggctgatgctgaggtgaaacccaagaagaaggcagcaacttaacgtcctctcgtttggtgatgaagtagaagaggaggagaatgaagcagctacctctgttcaggccaaaataaaaagtattcatgatgtgttggacgatccccgttttcttaaaggggaaccggaggatgtacagttgataatggttatctgtgctatgctgcggatccctgctaacgggagataatcgagaagaatcaggattctgagaatacacaagaaccaaacaccctctatatcacactttcttggtacttaagtcctgtttgctgggtgaacttcttgtgggcaggcatccccttagttggtttagggtgcgatctgcatctttttatctgtccaaggagcaagaggagatgaaaaaggttactgttcaaactgtcagggatgctttgatctcaaagaaagttgaatcaagggagcaagataatgctccattatctgatgattttcctgaagacgagaatgaagaggattttgataacaggatgcgcgcacaaatccttaaaaaacgtagagagcttggtgatgtttgccctcatgaaacctctaaagcagataaacctcatcataaggataaggaattatcagaccgcaggtccaatattgaacataggagggacactgaggacgatgatcaggagcatgagctacaaaaagctaaaaaactatccttgaagaaaaaaggtgctggctcagaagcgagtgctgagaggatgtccaaagcagatgctaatttgcagctactaaatccagctgaacaagagagacatttgcaaaaacagaaaaaacgtcggctccaaggccgtgaagatgagactctagcgaagttacagaagttcaagtcttctttcctcagtaagaatcttgctaccaatcatgtcgaagagaagaatccttctactgataaggcggaaaaggaagatgaagaggaggatgactacaaagggtggcacacaaacctactgtctttcttacccagttcttccaaggatggaatgactaggaaagatgatccagatgactatgtagtggtagacccacttctggagaaaggaaaagaaaaattcaacaagatgcaagcaaagcttaagcggagagagcgcgaatgggcaggcagatctctcacctgattggaaagcttaactcaaattatgtcaatgctccttacgtccttacctaccctggacggttggaaacactggaaatgatgcagttttggcatggtcttgggactgcgcgcagatgattggtagtgaccgtttgtggactagtgttttcctttttggcatgtgtcatgattgcttacactgtaaatgcaattgtacaatagattggttataagctcactgtgaaagcagctctctgtatcactagctatttaatatccgtttcttcaaggagccgattggctgaagttgacactatagcttttgtctcaatttccttatttttattaagaagcggaatagacagtaattggccttcctagtttgttaggtagtgtttggttctggagctaatttggatggagtcgctatgtccgagagattttgaggagtcccgagagattttgaggagccggatggtttattatttgagtataattttttaagtcattctatcttacatgaaattaatcca

SEQ ID NO: 37293 - DNA, 2388 bp, Zea Mays
cttgggcgtacctgacttccgaaaaagctccgccacgcccggccggaggtccgaccgacgcctagaccgttccaaagggaagggagcacgcgcgcgcgaggtagagcagcggcggcggcggcaggagtgaggcaggatgtcttcggtatacgtgcttgagcccccgacgaaggggaaggtggtggtgcagacgacggccggcccgctcgatatcgagctgtggcccaaggaggcccccaaggcggcgcgcaacttcgtgcagctctgcctcgagggctactacgacggcaccctcttccaccgcgtcatcaagaatttcctcgttcagggtggcgaccccactggctccggcactgggggtgagagcatctatggggctccatttgcggatgagttccactcgcggctgaggtttaaccacaggggtttagtggcttgtgccaatgctggtacatctcattctaatgggagccaattctttatcacccttgaccgttgtgattggcttgataagaagaacaccatctttgggaaggttactggtgattctattttcaaccttctttccttggccgacgttgagactgataaggatgatcgacctgtgtacgtgcagaagattctttcagtcgaggttctctgggacccatttgaggatattgttccaaggcaacttaagaaggctgaatctgttgctaaggctgatgctgaggtgaaacccaagaagaaggcagttaagcaacttaacgtcctctcgtttggtgatgaagtagaagaggaggagaatgaagcagctacctctgttcaggccaaaataaaaagtattcatgatgtgttggacgatccccgttttcttaaaggggaaccggaggatgtacagttgataatggttatctgtgctatgctgcggatccctgctaacgggagataatcgagaagaatcaggattctgagaatacacaagaaccaaacaccctctatatcacactttcttggtacttaagtcctgtttgctgggtgaacttcttgtgggcaggcatccccttagttggtttagggtgcgatctgcatctttttatctgtccaaggagcaagaggagatgaaaaaggttactgttcaaactgtcagggatgctttgatctcaaagaaagttgaatcaagggagcaagataatgctccattatctgatgattttcctgaagacgagaatgaagaggattttgataacaggatgcgcgcacaaatccttaaaaaacgtagagagcttggtgatgtttgccctcatgaaacctctaaagcagataaacctcatcataaggataaggaattatcagaccgcaggtccaatattgaacataggagggacactgaggacgatgatcaggagcatgagctacaaaaagctaaaaaactatccttgaagaaaaaaggtgctggctcagaagcgagtgctgagaggatgtccaaagcagatgctaatttgcagctactaaatccagctgaacaagagagacatttgcaaaaacagaaaaaacgtcggctccaaggccgtgaagatgagactctagcgaagttacagaagttcaagtcttctttcctcagtaagaatcttgctaccaatcatgtcgaagagaagaatccttctactgataaggcggaaaaggaagatgaagaggaggatgactacaaagggtggcacacaaacctactgtctttcttacccagttcttccaaggatggaatgactaggaaagatgatccagatgactatgtagtggtagacccacttctggagaaaggaaaagaaaaattcaacaagatgcaagcaaagcttaagcggagagagcgcgaatgggcaggcagatctctcacctgattggaaagcttaactcaaattatgtcaatgctccttacgtccttacctaccctggacggttggaaacactggaaatgatgcagttttggcatggtcttgggactgcgcgcagatgattggtagtgaccgtttgtggactagtgttttcctttttggcatgtgtcatgattgcttacactgtaaatgcaattgtacaatagattggttataagctcactgtgaaagcagctctctgtatcactagctatttaatatccgtttcttcaaggagccgattggctgaagttgacactatagcttttgtctcaatttccttatttttattaagaagcggaatagacagtaattggccttcctagtttgttaggtagtgtttggttctggagctaatttggatggagtcgctatgtccgagagattttgaggagtcccgagagattttgaggagccggatggtttattatttgagtataattttttaagtcattctatcttacatgaaattaatcca

SEQ ID NO: 37294 - DNA, 2347 bp, Zea Mays
cttgggcgtacctgacttccgaaaaagctccgccacgcccggccggaggtccgaccgacgcctagaccgttccaaagggaagggagcacgcgcgcgcgaggtagagcagcggcggcggcggcaggagtgaggcaggatgtcttcggtatacgtgcttgagcccccgacgaaggggaaggtggtggtgcagacgacggccggcccgctcgatatcgagctgtggcccaaggaggcccccaaggcggcgcgcaacttcgtgcagctctgcctcgagggctactacgacggcaccctcttccaccgcgtcatcaagaatttcctcgttcagggtggcgaccccactggctccggcactgggggtgagagcatctatggggctccatttgcggatgagttccactcgcggctgaggtttaaccacaggggtttagtggcttgtgccaatgctggtacatctcattctaatgggagccaattctttatcacccttgaccgttgtgattggcttgataagaagaacaccatctttgggaaggttactggtgattctattttcaaccttctttccttggccgacgttgagactgataaggatgatcgacctgtgtacgtgcagaagattctttcagtcgaggttctctgggacccatttgaggatattgttccaaggcaacttaagaaggctgaatctgttgctaaggctgatgctgaggtgaaacccaagaagaaggcagttaagcaacttaacgtcctctcgtttggtgatgaagtagaagaggaggagaatgaagcagctacctctgttcaggccaaaataaaaagtattcatgatgtgttggacgatccccgttttcttaaaggggaaccggaggatgtacagttgataatggttatctgtgctatgctgcggatccctgctaacgggagataatcgagaagaatcaggattctgagaatacacaagaaccaaacaccctctatatcacactttcttggtacttaagtcctgtttgctgggtgaacttcttgtgggcaggcatccccttagttggtttagggtgcgatctgcatctttttatctgtccaaggagcaagaggagatgaaaaaggttactgttcaaactgtcagggatgctttgatctcaaagaaagttgaatcaagggagcaagataatgctccattatctgatgattttcctgaagacgagaatgaagaggattttgataacaggatgcgcgcacaaatccttaaaaaacgtagagagcttggtgatgtttgccctcatgaaacctctaaagcagataaacctcatcataaggataaggaattatcagaccgcaggtccaatattgaacataggagggacactgaggacgatgatcaggagcatgagctacaaaaagctaaaaaactatccttgaagaaaaaaggtgctggctcagaagcgagtgctgagaggatgtccaaagcagatgctaatttgcagctactaaatccagctgaacaagagagacatttgcaaaaacagaaaaaacgtcggctccaaggccgtgaagatgagtaagaatcttgctaccaatcatgtcgaagagaagaatccttctactgataaggcggaaaaggaagatgaagaggaggatgactacaaagggtggcacacaaacctactgtctttcttacccagttcttccaaggatggaatgactaggaaagatgatccagatgactatgtagtggtagacccacttctggagaaaggaaaagaaaaattcaacaagatgcaagcaaagcttaagcggagagagcgcgaatgggcaggcagatctctcacctgattggaaagcttaactcaaattatgtcaatgctccttacgtccttacctaccctggacggttggaaacactggaaatgatgcagttttggcatggtcttgggactgcgcgcagatgattggtagtgaccgtttgtggactagtgttttcctttttggcatgtgtcatgattgcttacactgtaaatgcaattgtacaatagattggttataagctcactgtgaaagcagctctctgtatcactagctatttaatatccgtttcttcaaggagccgattggctgaagttgacactatagcttttgtctcaatttccttatttttattaagaagcggaatagacagtaattggccttcctagtttgttaggtagtgtttggttctggagctaatttggatggagtcgctatgtccgagagattttgaggagtcccgagagattttgaggagccggatggtttattatttgagtataattttttaagtcattctatcttacatgaaattaatcca

SEQ ID NO: 37295 - DNA, 397 bp, Zea Mays
atcgcagagggcaggaagggcagcaggagcagcgcgaacaggagcacgaggacccagacctttgggcccccggcgcccgccgcattgtcgtcggcgtcggcgtagcgggcgtgcgcgtccgcgctaccgctcgtgctgggcccgccgtcgtccgcggcggaggaagcaggactcctcctcacctggccctccatccgatctcctccaccgcgtctccgtcgttggttggccggcggcgtcgttggctggccgggaaaaagggcaaagcgcactctccgccctccctatcccttttggtctgtgacggttgctgttggctttttgggcgatgtttctctcgctgttgtagtagctaggtaggctgctttctttctgtctccctgacctcacaggcaaa

SEQ ID NO: 37296 - DNA, 78 bp, Zea Mays
cttcctgctccggtattacatccactgcgtcggagttccacctcctgctttttaccggcgccaccgccgcctcctgtt

SEQ ID NO: 37297 - DNA, 5393 bp, Zea Mays
catttcaggaccagagcagaattcctcgtttctttcaaaccgcaagaaaactaagcagcacataattaccatttctgccctccgtcccctctcaactccgtcgtcgcgacctgccgcgccgtcatcgccggcggcgaccagcacgtgcagtggaccagtcgcgaagcaaccgcgcagaagagaagggtaaaaacaggactgttggaagtcgagtcgagaagcaacagcaagcagcagcttggggggtaggtggggcaacgcagcagagatagtccaattcgccgccttgccggccactgacctcgccggcggcggggtcccctctgttggagccgacggatccgttgccccctcctatccgaacctgatccacccatgggaactccagttaatatcatcgttggttctcatgtttgggtggaagacccaaatctagcttggatagatggagaagttattagcataaaaaacaatgaagtacatgtgcagacatcgaatgggaaaaagacaggtcaaaagtatttcccaaggatatggaagctccaccaggaggagttgatgatatgacaagactttcatacttacatgaacctggtgttctacagaatcttgctacccgctatgaactgaatgaaatatatacttacacaggcagcattttgattgctgtaaatccatttcaaagattgccacatctttatgatacccacatgatggaacagtacaagggtgcagattttggggaattgagtccccatgtctttgctatcgcggatgttgcttacagggcaatgataaatgaagggaaaagcaactctatattggtcagtggtgaaagtggtgctgggaagactgagacaacgaagatgcttatgagatatttagcacatttaggtgggcgatctggagtagaaggacgtacagtggaacaacaagttttagagtccaacccagttcttgaagcttttggtaatgctaaaactgtgcgaaataacaactcaagtcgctttggcaagtttgttgagatccaatttgacaagactggacggatctcaggagctgctatcagaacttacttgctggaaagatcacgtgtgtgccaaattaattctccagaaagaaattaccattgcttttattttctttgtgccgcaccacctgagtacactcagaggtacaagctgtctgatcctagatctttccattacctcaatcagtcgagctgtattgaggtggatggaatcaatgatgctgaagagtatttagcaacacgaagagctatggatatagttggaatcaatgaggaagagcaggaaggtatattccgggttgtagctgctgtacttcatcttggaaatataaattttgccaagggaacagaaatcgattcttctgtaatcaaggatgataaatccaggttccaccttaatatcgcagcagaacttttgaaatgtgattgccagaatttagagaaggcgctgataacacgagttatagtcacgcctgaagaagttatcactagaacacttgatcctgcttctgcagttgctagcagagacgcattagctaaaataatatactcccgattgtttgattggattgtggaaaaaattaatgtctcaattggacaggacccaaactcaaaacagttaattggagttcttgatatctatggttttgagagcttcaaagttaacagttttgaacagctatgtatcaattatacaaatgaaaagctgcaacaacattttaaccagcacgtgttcaaaatggaacaagaagagtataccagagaagagataaactggagttacatcgagtttgttgataatcaagatgtgctagacttgatagagaagaaaggtggattgattgcacttctggatgaagcatgtatgtttcctagatctacacatgagacgtttgcgcagaagctatatacaacatttaagaataacaagcggtttgccaagccaaagctttcacgcactgattttacagtagtccattatgctggcgatgtgacataccaggctgattatttcttagacaagaacaaagattatgtagtggctgaacatcaggatctgctgaatgcttcttcatgcctattcgtagctggtttattccctcctctcccacaggagacagcaaagtcttcaaaattttcatccattggatcacgttttaagcttcaacttcaatccctcatggaaactttgagctctaccgaaccccactatattagatgtgtgaagccaaataatctccttaagccagctatttttgagaatacaaatgttatacaacaactaagatgtggaggtgttctcgaagctatcaggatcagctgtgctggatatcccacaagaaaaacattttatgaatttgtcaatcgttttggtgtccttgctcctgaagttttagaagggagcaatgatgataagattgcgtgccaaaagattttggaaaaaatgggtctggagaattaccagattggaaaaacaaaggtgtttctaagagctggacagatggctgatttggatgctcgtagagctgaagtattaggaagagcagcaagaatcatacagaggcaaatacgtacatatattgcaaggaaacagtttgctgagcttaaaagatcagcaacacagctgcaatcttttgtcagaggaaccttggctcgtaagttgtatgagtgcatgaggcaggaagcagcagcagtgaaaatacaaaagaatatgcgacgccacaaagcacgggaatcttatttacaattgcaagcagctgcaatcacattgcagacaggtttaagggcaatgtctgctcgcaaagaattcaggttcagaaaggaaacaaaagctgctgtccacatccaagctcaatggcgccgccacagagactactcacattacaagaatctgcaaggagcagctcttacttaccagtgtgcctggaggcaaaggcttgccagaagggagctcaggaagctcaagatggcggcaagagaaacaggagccctaaaagaggccaaggataaacttgagaagcgtgttgaagaactcacctggcgcttaggattggagaagcgattaaggactgaccttgaggaagcaaaagcccaggaaattgctaagctgcaagagacgttgcatgatatgcagcttcaagttgaagagtcaaaggccatggtagttaaggagagggaagctgctagaaaggcaattgaagaagcacctccagtaattaaagagactcctgtgctagtcgaagacacagaaaagattaactcactgacgaccgaagttgaacaactgaaggctttgctgctaactgaaagacaagcaacagaagctgcaaaaagagaacacgctgaatctgaactgagaaatgaagaactaattaagaaatttgagagcgcagagaaaaagattgagcaacttcaggaaactgtccataggctggaggagaaagcaaccaacatggagtctgagaacaaagtgctccgtcaacaagctgttgcaatttctcctacgtcaaaatcattagctgcatatcctaagtctcctttccagctgaaaactccggagaatgggaatgctctaaatggagaagtgaagtcatcaccagatatcacccctatcttaccaaaccccaaggagcttgaggctgaagagaagccacaaaaatcacttaatgaaaagcagcaggaaaatcaagacctactgatcaagtgtgtatcacaagatctgggattctccagtggcaaacctattgcagcttgccttatctacaggtgtcttctacactggagatcattcgaagttgaaagaactggtgtttttgaccgtattattcaaacaattggctctgctattgagtcccaggacaacaatgacaagttggcatattggctctcgaattcatccacactgctgctgctgctgcaacgaacactgaaaacaactggagcagctggattcactcctcaaaggcgcaggtcatctgctgcatcttttgggagggtgttttcggggatgcgagcctcaccacaaagtgctgggcgtgcttttatgggaagtcgcttgattggaggtctaggtgaccttcgtcaagttgaagccaagtaccctgccctgcttttcaagcaacagctcacagctttccttgagaagatctatggaatgataagagacaatttgaaaaaggagatatctcctttgcttggcctttgcatccaggcaccaagaacatcccgtgcaagcctaattaaagggtcacgttcccaagcaaatgccttagctcagcaaactctgattgcacattggcagagcattgtgaaaatattgacaaattacttgaatgttttaaaagcaaattatgtcccttcagtcttaatcagcaaagtgttcactcaaatcttttcatttattaatgttcagttatttaatagtcttcttcttcgacgggagtgctgttcatttagcaacggagaatatgtgaaagctggattggcagaattagagcagtggtgcatttatgcaacagaagagtatgcaggttcttcctgggaagaattaaaacatattaggcaggctgttggattccttgtgattcatcaaaagccaaagaaaacattgaaagaaattaccaacgatctgtgccctgtccttagcatacaacagctatatcgaatcagtacaatgtactgggatgataagtacggtacccacactgtttcatcagatgtcatctcaagtatgagagtaatgatgacagaagattctaataacgcggtcagcagttcgttcctgttggatgatgattccagcattccgttttcggtggacgacatctcgaagtcgatgacagaaatcgaggtaacagatgtcgacatgccacctctgatccgggagaattctggcttcaccttcctacaccaaagaaaggactaacagggtggtccttccagctgcatgtccctttttgcacattctttttctccgctcaacctgtgcataactcatgtacatacgctcgtgccttttgctctctggtcagggcttgttagatgtattgtctttggtttgattggttggttggttctttcctcgatcctctcccaattttgttgggcgaagggtccacaatctatgtttctccatactgtagtgaaaaggggccggatgcccctggtctccccgagctgcttttggaaaagctcgtggtcattaagcagttaagcttgtggaaaaggttctccacatctaccgagtcgttcgttgtgtcgccttcttcatatggatcatcgccatattgtaaattgcaaatacgattatagttgaaaaaagagatattacagtgatagcagtgttctggagtttggatctcat

SEQ ID NO: 37298 - DNA, 5402 bp, Zea Mays
catttcaggaccagagcagaattcctcgtttctttcaaaccgcaagaaaactaagcagcacataattaccatttctgccctccgtcccctctcaactccgtcgtcgcgacctgccgcgccgtcatcgccggcggcgaccagcacgtgcagtggaccagtcgcgaagcaaccgcgcagaagagaagggtaaaaacaggactgttggaagtcgagtcgagaagcaacagcaagcagcagcttggggggtaggtggggcaacgcagcagagatagtccaattcgccgccttgccggccactgacctcgccggcggcggggtcccctctgttggagccgacggatccgttgccccctcctatccgaacctgatccacccatgggaactccagttaatatcatcgttggttctcatgtttgggtggaagacccaaatctagcttggatagatggagaagttattagcataaaaaacaatgaagtacatgtgcagacatcgaatgggaaaaaggttaccacagacaggtcaaaagtatttcccaaggatatggaagctccaccaggaggagttgatgatatgacaagactttcatacttacatgaacctggtgttctacagaatcttgctacccgctatgaactgaatgaaatatatacttacacaggcagcattttgattgctgtaaatccatttcaaagattgccacatctttatgatacccacatgatggaacagtacaagggtgcagattttggggaattgagtccccatgtctttgctatcgcggatgttgcttacagggcaatgataaatgaagggaaaagcaactctatattggtcagtggtgaaagtggtgctgggaagactgagacaacgaagatgcttatgagatatttagcacatttaggtgggcgatctggagtagaaggacgtacagtggaacaacaagttttagagtccaacccagttcttgaagcttttggtaatgctaaaactgtgcgaaataacaactcaagtcgctttggcaagtttgttgagatccaatttgacaagactggacggatctcaggagctgctatcagaacttacttgctggaaagatcacgtgtgtgccaaattaattctccagaaagaaattaccattgcttttattttctttgtgccgcaccacctgagtacactcagaggtacaagctgtctgatcctagatctttccattacctcaatcagtcgagctgtattgaggtggatggaatcaatgatgctgaagagtatttagcaacacgaagagctatggatatagttggaatcaatgaggaagagcaggaaggtatattccgggttgtagctgctgtacttcatcttggaaatataaattttgccaagggaacagaaatcgattcttctgtaatcaaggatgataaatccaggttccaccttaatatcgcagcagaacttttgaaatgtgattgccagaatttagagaaggcgctgataacacgagttatagtcacgcctgaagaagttatcactagaacacttgatcctgcttctgcagttgctagcagagacgcattagctaaaataatatactcccgattgtttgattggattgtggaaaaaattaatgtctcaattggacaggacccaaactcaaaacagttaattggagttcttgatatctatggttttgagagcttcaaagttaacagttttgaacagctatgtatcaattatacaaatgaaaagctgcaacaacattttaaccagcacgtgttcaaaatggaacaagaagagtataccagagaagagataaactggagttacatcgagtttgttgataatcaagatgtgctagacttgatagagaagaaaggtggattgattgcacttctggatgaagcatgtatgtttcctagatctacacatgagacgtttgcgcagaagctatatacaacatttaagaataacaagcggtttgccaagccaaagctttcacgcactgattttacagtagtccattatgctggcgatgtgacataccaggctgattatttcttagacaagaacaaagattatgtagtggctgaacatcaggatctgctgaatgcttcttcatgcctattcgtagctggtttattccctcctctcccacaggagacagcaaagtcttcaaaattttcatccattggatcacgttttaagcttcaacttcaatccctcatggaaactttgagctctaccgaaccccactatattagatgtgtgaagccaaataatctccttaagccagctatttttgagaatacaaatgttatacaacaactaagatgtggaggtgttctcgaagctatcaggatcagctgtgctggatatcccacaagaaaaacattttatgaatttgtcaatcgttttggtgtccttgctcctgaagttttagaagggagcaatgatgataagattgcgtgccaaaagattttggaaaaaatgggtctggagaattaccaattggaaaaacaaaggtgtttctaagagctggacagatggctgatttggatgctcgtagagctgaagtattaggaagagcagcaagaatcatacagaggcaaatacgtacatatattgcaaggaaacagtttgctgagcttaaaagatcagcaacacagctgcaatcttttgtcagaggaaccttggctcgtaagttgtatgagtgcatgaggcaggaagcagcagcagtgaaaatacaaaagaatatgcgacgccacaaagcacgggaatcttatttacaattgcaagcagctgcaatcacattgcagacaggtttaagggcaatgtctgctcgcaaagaattcaggttcagaaaggaaacaaaagctgctgtccacatccaagctcaatggcgccgccacagagactactcacattacaagaatctgcaaggagcagctcttacttaccagtgtgcctggaggcaaaggcttgccagaagggagctcaggaagctcaagatggcggcaagagaaacaggagccctaaaagaggccaaggataaacttgagaagcgtgttgaagaactcacctggcgcttaggattggagaagcgattaaggactgaccttgaggaagcaaaagcccaggaaattgctaagctgcaagagacgttgcatgatatgcagcttcaagttgaagagtcaaaggccatggtagttaaggagagggaagctgctagaaaggcaattgaagaagcacctccagtaattaaagagactcctgtgctagtcgaagacacagaaaagattaactcactgacgaccgaagttgaacaactgaaggctttgctgctaactgaaagacaagcaacagaagctgcaaaaagagaacacgctgaatctgaactgagaaatgaagaactaattaagaaatttgagagcgcagagaaaaagattgagcaacttcaggaaactgtccataggctggaggagaaagcaaccaacatggagtctgagaacaaagtgctccgtcaacaagctgttgcaatttctcctacgtcaaaatcattagctgcatatcctaagtctcctttccagctgaaaactccggagaatgggaatgctctaaatggagaagtgaagtcatcaccagatatcacccctatcttaccaaaccccaaggagcttgaggctgaagagaagccacaaaaatcacttaatgaaaagcagcaggaaaatcaagacctactgatcaagtgtgtatcacaagatctgggattctccagtggcaaacctattgcagcttgccttatctacaggtgtcttctacactggagatcattcgaagttgaaagaactggtgtttttgaccgtattattcaaacaattggctctgctattgagtcccaggacaacaatgacaagttggcatattggctctcgaattcatccacactgctgctgctgctgcaacgaacactgaaaacaactggagcagctggattcactcctcaaaggcgcaggtcatctgctgcatcttttgggagggtgttttcggggatgcgagcctcaccacaaagtgctgggcgtgcttttatgggaagtcgcttgattggaggtctaggtgaccttcgtcaagttgaagccaagtaccctgccctgcttttcaagcaacagctcacagctttccttgagaagatctatggaatgataagagacaatttgaaaaaggagatatctcctttgcttggcctttgcatccaggcaccaagaacatcccgtgcaagcctaattaaagggtcacgttcccaagcaaatgccttagctcagcaaactctgattgcacattggcagagcattgtgaaaatattgacaaattacttgaatgttttaaaagcaaattatgtcccttcagtcttaatcagcaaagtgttcactcaaatcttttcatttattaatgttcagttatttaatagtcttcttcttcgacgggagtgctgttcatttagcaacggagaatatgtgaaagctggattggcagaattagagcagtggtgcatttatgcaacagaagagtatgcaggttcttcctgggaagaattaaaacatattaggcaggctgttggattccttgtgattcatcaaaagccaaagaaaacattgaaagaaattaccaacgatctgtgccctgtccttagcatacaacagctatatcgaatcagtacaatgtactgggatgataagtacggtacccacactgtttcatcagatgtcatctcaagtatgagagtaatgatgacagaagattctaataacgcggtcagcagttcgttcctgttggatgatgattccagcattccgttttcggtggacgacatctcgaagtcgatgacagaaatcgaggtaacagatgtcgacatgccacctctgatccgggagaattctggcttcaccttcctacaccaaagaaaggactaacagggtggtccttccagctgcatgtccctttttgcacattctttttctccgctcaacctgtgcataactcatgtacatacgctcgtgccttttgctctctggtcagggcttgttagatgtattgtctttggtttgattggttggttggttctttcctcgatcctctcccaattttgttgggcgaagggtccacaatctatgtttctccatactgtagtgaaaaggggccggatgcccctggtctccccgagctgcttttggaaaagctcgtggtcattaagcagttaagcttgtggaaaaggttctccacatctaccgagtcgttcgttgtgtcgccttcttcatatggatcatcgccatattgtaaattgcaaatacgattatagttgaaaaaagagatattacagtgatagcagtgttctggagtttggatctcat

SEQ ID NO: 37299 - DNA, 780 bp, Zea Mays
cagaaattcgtccccgagagtgtagatgatggattcccgaccatcaccttccattttgaggatgatcttgcactgcatgtgtatccacatgagtactttttcccaaatgggaatgacatatactgtgtgggattccaaaatggtgcattacaatcaaaagatgggaaggacattgtgcttatgggagatcttgtgctttcaaacaagttggttgtctatgacttggaaaatcaagtcatcgggtggactgactataactgttcgtcgagcattaaaattaaggacgacaagacaggcacaacctatactgtcgaatcacatgacatatcctccggatggaaattccactggcacaagtccctggttctgttgttggtaacaatggtgtggagctatttatagtacactaactctattgtacaacacgaacacgcacttaccgaaattcatttgattcgtattcttttcacaaaaaagaatatctagggttttaacttgcgttctctgaccacggaaaacgatgaaaacaaaaacgttgtgtgccatacaatgagcctgtgtgtcactagtgttatgctgagacaagtgttgatcccacttttgggcaggcggacggtccagccctgtagtctggacggtccgcggtggtggcgtggatggttcgcgcgtgcgcagaattaattagggtttcgagtttttgcgagatttattagctaaatttatgggattaactcgggaaacgacttgtaggtgcagacctcccttttatatagataaatg

SEQ ID NO: 37300 - DNA, 2065 bp, Zea Mays
gttttccggtgccttgcttgttctagtagccggttctcaatcctcacccaagcgcctctaggccgaggctcggaggccacggcgaggaggagcagcagctgccagcaggggaggacacggatagtagccggcctcccgccgcccgaggcccaaccgcccccgcaattactgttgttgctgcgtgcagagcggttttgaattgccgtctcctacccaggaataatccatggccccgcctccgccatggcttgccgccctcctcttcctcctcctacccgcgctgctgccggcggtcggctccgtctccggcgcggcggctgccggcatcttccgggtgcggcgtaagttaccagccggagttggaggggacactggcgccaacatcagcgcccttcgtgcccacgacggtcgccgccacggccgccttctcgcggctgccgacctcccgctcggtggcctaggtctccccactgacaccgggctctacttcacggagatcaagctcgggacgccgcccaagcgctactacgtccaggtcgacactggcagcgacatcctgtgggttaactgcatctcctgctcaaaatgcccccgcaagagcggactcgggttagacttgacgttctatgaccccaaggcgtcctcgagcgggagcacggtgtcctgcgatcagggattctgcgcggccacctatggggggaagctgccagggtgcactgccaatgtgccctgcgagtacagcgtcatgtacggtgatggtagctcaacgactgggttcttcatcaccgatgcgctgcagtttgatcaggtgactggggatggacagacacagcctggcaatgctaccatcacattcgggtgtggtgctcagcaaggtggggatttgggcaactcaaaccaagctcttgatggaattcttggttttggtcaggcaaatacgtcaatgttatcacagctagctgctgctggtaaagcgaagaagatatttgctcattgcttggataccataaagggtggtggaatttttgctattggaaatgttgttcagccaaaagtaaaaacaacaccgttagtagctgacatgccgcactacaatgtgaaccttaagtcaattgatgttggtggcactacattacagctcccggctcatgtttttgaaacaggagagaaaaaaggcaccataatcgacagtggtactaccttgacataccttccagaattggttttcaaacaagtatttagcaagcatcgagatatagccttccataatttgcaagattttttgtgtttccaatattctggaagtgtagatgatggattcccgaccatcaccttccattttgaggatgatcttgcactgcatgtgtatccacatgagtactttttcccaaatgggaatgacatatactgtgtgggattccaaaatggtgcattacaatcaaaagatgggaaggacattgtgcttatgggagatcttgtgctttcaaacaagttggttgtctatgacttggaaaatcaagtcatcgggtggactgactataactgttcgtcgagcattaaaattaaggacgacaagacaggcacaacctatactgtcgaatcacatgacatatcctccggatggaaattccactggcacaagtccctggttctgttgttggtaacaatggtgtggagctatttatagtacactaactctattgtacaacacgaacacgcacttaccgaaattcatttgattcgtattcttttcacaaaaaagaatatctagggttttaacttgcgttctctgaccacggaaaacgatgaaaacaaaaacgttgtgtgccatacaatgagcctgtgtgtcactagtgttatgctgagacaagtgttgatcccacttttgggcaggcggacggtccagccctgtagtctggacggtccgcggtggtggcgtggatggttcgcgcgtgcgcagaattaattagggtttcgagtttttgcgagatttattagctaaatttatgggattaactcgggaaacgacttgtaggtgcagacctcccttttatatagataaatg

SEQ ID NO: 37301 - DNA, 2081 bp, Zea Mays
cccgttttcgttttccggtgccttgcttgttctagtagccggttctcaatcctcacccaagcgcctctaggccgaggctcggaggccacggcgaggaggagcagcagctgccagcaggggaggacacggatagtagccggcctcccgccgcccgaggcccaaccgcccccgcaattactgttgttgctgcgtgcagagcggttttgaattgccgtctcctacccaggaataatccatggccccgcctccgccatggcttgccgccctcctcttcctcctcctacccgcgctgctgccggcggtcggctccgtctccggcgcggcggctgccggcatcttccgggtgcggcgtaagttaccagccggagttggaggggacactggcgccaacatcagcgcccttcgtgcccacgacggtcgccgccacggccgccttctcgcggctgccgacctcccgctcggtggcctaggtctccccactgacaccgggctctacttcacggagatcaagctcgggacgccgcccaagcgctactacgtccaggtcgacactggcagcgacatcctgtgggttaactgcatctcctgctcaaaatgcccccgcaagagcggactcgggttagacttgacgttctatgaccccaaggcgtcctcgagcgggagcacggtgtcctgcgatcagggattctgcgcggccacctatggggggaagctgccagggtgcactgccaatgtgccctgcgagtacagcgtcatgtacggtgatggtagctcaacgactgggttcttcatcaccgatgcgctgcagtttgatcaggtgactggggatggacagacacagcctggcaatgctaccatcacattcgggtgtggtgctcagcaaggtggggatttgggcaactcaaaccaagctcttgatggaattcttggttttggtcaggcaaatacgtcaatgttatcacagctagctgctgctggtaaagcgaagaagatatttgctcattgcttggataccataaagggtggtggaatttttgctattggaaatgttgttcagccaaaagtaaaaacaacaccgttagtagctgacatgccgcactacaatgtgaaccttaagtcaattgatgttggtggcactacattacagctcccggctcatgtttttgaaacaggagagaaaaaaggcaccataatcgacagtggtactaccttgacataccttccagaattggttttcaaacaagtaatggatgtggtatttagcaagcatcgagatatagccttccataatttgcaagattttttgtgtttccaatattctggaagatgatggattcccgaccatcaccttccattttgaggatgatcttgcactgcatgtgtatccacatgagtactttttcccaaatgggaatgacatatactgtgtgggattccaaaatggtgcattacaatcaaaagatgggaaggacattgtgcttatgggagatcttgtgctttcaaacaagttggttgtctatgacttggaaaatcaagtcatcgggtggactgactataactgttcgtcgagcattaaaattaaggacgacaagacaggcacaacctatactgtcgaatcacatgacatatcctccggatggaaattccactggcacaagtccctggttctgttgttggtaacaatggtgtggagctatttatagtacactaactctattgtacaacacgaacacgcacttaccgaaattcatttgattcgtattcttttcacaaaaaagaatatctagggttttaacttgcgttctctgaccacggaaaacgatgaaaacaaaaacgttgtgtgccatacaatgagcctgtgtgtcactagtgttatgctgagacaagtgttgatcccacttttgggcaggcggacggtccagccctgtagtctggacggtccgcggtggtggcgtggatggttcgcgcgtgcgcagaattaattagggtttcgagtttttgcgagatttattagctaaatttatgggattaactcgggaaacgacttgtaggtgcagacctcccttttatatagataaatg

SEQ ID NO: 37302 - DNA, 2016 bp, Zea Mays
ccccgttttcgttttccggtgccttgcttgttctagtagccggttctcaatcctcacccaagcgcctctaggccgaggctcggaggccacggcgaggaggagcagcagctgccagcaggggaggacacggatagtagccggcctcccgccgcccgaggcccaaccgcccccgcaattactgttgttgctgcgtgcagagcggttttgaattgccgtctcctacccaggaataatccatggccccgcctccgccatggcttgccgccctcctcttcctcctcctacccgcgctgctgccggcggtcggctccgtctccggcgcggcggctgccggcatcttccgggtgcggcgtaagttaccagccggagttggaggggacactggcgccaacatcagcgcccttcgtgcccacgacggtcgccgccacggccgccttctcgcggctgccgacctcccgctcggtggcctaggtctccccactgacaccgggctctacttcacggagatcaagctcgggacgccgcccaagcgctactacgtccaggtcgacactggcagcgacatcctgtgggttaactgcatctcctgctcaaaatgcccccgcaagagcggactcgggttagacttgacgttctatgaccccaaggcgtcctcgagcgggagcacggtgtcctgcgatcagggattctgcgcggccacctatggggggaagctgccagggtgcactgccaatgtgccctgcgagtacagcgtcatgtacggtgatggtagctcaacgactgggttcttcatcaccgatgcgctgcagtttgatcaggtgactggggatggacagacacagcctggcaatgctaccatcacattcgggtgtggtgctcagcaaggtggggatttgggcaactcaaaccaagctcttgatggaattcttggttttggtcaggcaaatacgtcaatgttatcacagctagctgctgctggtaaagcgaagaagatatttgctcattgcttggataccataaagggtggtggaatttttgctattggaaatgttgttcagccaaaagtaaaaacaacaccgttagtagctgacatgccgcactacaatgtgaaccttaagtcaattgatgttggtggcactacattacagctcccggctcatgtttttgaaacaggagagaaaaaaggcaccataatcgacagtggtactaccttgacataccttccagaattggttttcaaacaagtaatggatgtgtgtagatgatggattcccgaccatcaccttccattttgaggatgatcttgcactgcatgtgtatccacatgagtactttttcccaaatgggaatgacatatactgtgtgggattccaaaatggtgcattacaatcaaaagatgggaaggacattgtgcttatgggagatcttgtgctttcaaacaagttggttgtctatgacttggaaaatcaagtcatcgggtggactgactataactgttcgtcgagcattaaaattaaggacgacaagacaggcacaacctatactgtcgaatcacatgacatatcctccggatggaaattccactggcacaagtccctggttctgttgttggtaacaatggtgtggagctatttatagtacactaactctattgtacaacacgaacacgcacttaccgaaattcatttgattcgtattcttttcacaaaaaagaatatctagggttttaacttgcgttctctgaccacggaaaacgatgaaaacaaaaacgttgtgtgccatacaatgagcctgtgtgtcactagtgttatgctgagacaagtgttgatcccacttttgggcaggcggacggtccagccctgtagtctggacggtccgcggtggtggcgtggatggttcgcgcgtgcgcagaattaattagggtttcgagtttttgcgagatttattagctaaatttatgggattaactcgggaaacgacttgtaggtgcagacctcccttttatatagataaatg

SEQ ID NO: 37303 - DNA, 3840 bp, Zea Mays
ctttcctccccgttttcgttttccggtgccttgcttgttctagtagccggttctcaatcctcacccaagcgcctctaggccgaggctcggaggccacggcgaggaggagcagcagctgccagcaggggaggacacggatagtagccggcctcccgccgcccgaggcccaaccgcccccgcaattactgttgttgctgcgtgcagagcggttttgaattgccgtctcctacccaggaataatccatggccccgcctccgccatggcttgccgccctcctcttcctcctcctacccgcgctgctgccggcggtcggctccgtctccggcgcggcggctgccggcatcttccgggtgcggcgtaagttaccagccggagttggaggggacactggcgccaacatcagcgcccttcgtgcccacgacggtcgccgccacggccgccttctcgcggctgccgacctcccgctcggtggcctaggtctccccactgacaccgggctctacttcacggagatcaagctcgggacgccgcccaagcgctactacgtccaggtcgacactggcagcgacatcctgtgggttaactgcatctcctgctcaaaatgcccccgcaagagcggactcgggttagacttgacgttctatgaccccaaggcgtcctcgagcgggagcacggtgtcctgcgatcagggattctgcgcggccacctatggggggaagctgccagggtgcactgccaatgtgccctgcgagtacagcgtcatgtacggtgatggtagctcaacgactgggttcttcatcaccgatgcgctgcagtttgatcaggtgactggggatggacagacacagcctggcaatgctaccatcacattcgggtgtggtgctcagcaaggtggggatttgggcaactcaaaccaagctcttgatggaattcttggttttggtcaggcaaatacgtcaatgttatcacagctagctgctgctggtaaagcgaagaagatatttgctcattgcttggataccataaagggtggtggaatttttgctattggaaatgttgttcagccaaaatgctactttgtgttcttttttgcccatggcctcttgaacatacccctgtttttgcttgtcatgattttactttccaggccgcactacaatgtgaaccttaagtcaattgatgttggtggcactacattacagctcccggctcatgtttttgaaacaggagagaaaaaaggcaccataatcgacagtggtactaccttgacataccttccagaattggttttcaaacaagtaatggatgtggtatttagcaagcatcgagatatagccttccataatttgcaagattttttgtgtttccaatattctggaagtgtagatgatggattcccgaccatcaccttccattttgaggatgatcttgcactgcatgtgtatccacatgagtactttttcccaaatggggtaacatgaaatttctctcgtagcccagctgtgcactgttataattcgccaattgcatggattcagcttgattctagcttatagcacttaaaagtggcttcagtgccttctttttcctttcaccccttttgcataaacttcatgataatttttaaaataaaggacttctgaaatttgtaatatcatgttggccattggtaatcaatatgaaaaacaatcactaaatatagtacaacgttttcaactcgtttagttgaccctagttgctatggcactgatcaggtcaactaattgtgactaattgtagtgcataactgatcacatagcactgatacactcgactaattgtaattattcgaatgacttgataaccttgatttagtatatgtgaatatatgaagcacctaccttgtgctctccttttctgctacatttttctttgttaggattttggctttccaaaaacttctcaatcattccatatcaaactccaggttccatatcaaactccaggctggtttttcttttcgtctgaatttttctgaactcgagagagatattcttttggatgaagatgtcgatttaaactgcgcgaaatttgcaaaaaaataaataaatctaaacctacattgctaaaatggcgttgatctatcactatgatagtgtgcagcctggtccagagtgtcatagacacactcgatggagtgttggcaaaagtgtaatttcagtaacggtatgacgtcaactccccaaacactagtattacatgattaaccatggtcatcacccatcaatacttaattttgcttcaaaattagtaaacttgggtactgctgacaaaccacaagtacatttgcagcacatctagctttatgtgtacttcaagatcacatgtcaaagttcatacacactgtacagaagttaaagaaaaatagcacacatttatgttgccaaattggattacatgtacttgcctcgtctgcctttaaactttctgatacttctcatcctctttttggattataccgctattttgcttataaagagaaaataggctgccatttttgtatatgtatacattccctttattatatgtttatagctggaaggtctttctttttcgggaataatttcttttttaacctttgcgcatacatgacattgaaacatctgtacagtaaagcctctataccacactctacaggataagatatagacatatagctattttcagtaagttgttaattagtccatttctaaaaaaagctcgaggtaagacaaccctctgacattgaataaaaaatagatcgtttcttataggtcaagaaaactcttgaaccctaccattacccatacacagcggcaacatagtccatatgagaacaaccagtcaaccacgggcagtgccaggccttaggcttgtgctttgtcgtaagacagatgaggggatatttttaaacccagcctgaaattcgtttttacgggagtcgaactcagggcttgaagagtagtgctactcagaaacacctaaccaactcatctagaggctctttcgcaattagttcatttctgatattttgattcaagcacaacaatggtgaaatagtggtgttattagcatgcaagctccatttacgagtgcataaaaagtacatggtcatgactcttatggtccacgtttttcgttcattggagcagaatgacatatactgtgtgggattccaaaatggtgcattacaatcaaaagatgggaaggacattgtgcttatgggagatcttgtgctttcaaacaagttggttgtctatgacttggaaaatcaagtcatcgggtggactgactataactgttcgtcgagcattaaaattaaggacgacaagacaggcacaacctatactgtcgaatcacatgacatatcctccggatggaaattccactggcacaagtccctggttctgttgttggtaacaatggtgtggagctatttatagtacactaactctattgtacaacacgaacacgcacttaccgaaattcatttgattcgtattcttttcacaaaaaagaatatctagggttttaacttgcgttctctgaccacggaaaacgatgaaaacaaaaacgttgtgtgccatacaatgagcctgtgtgtcactagtgttatgctgagacaagtgttgatcccacttttgggcaggcggacggtccagccctgtagtctggacggtccgcggtggtggcgtggatggttcgcgcgtgcgcagaattaattagggtttcgagtttttgcgagatttattagctaaatttatgggattaactcgggaaacgacttgtaggtgcagacctcccttttatatagataaatg

SEQ ID NO: 37304 - DNA, 2132 bp, Zea Mays
cagaaaccctcccgaccccactacccactcccagctagctttcctccccgttttcgttttccggtgccttgcttgttctagtagccggttctcaatcctcacccaagcgcctctaggccgaggctcggaggccacggcgaggaggagcagcagctgccagcaggggaggacacggatagtagccggcctcccgccgcccgaggcccaaccgcccccgcaattactgttgttgctgcgtgcagagcggttttgaattgccgtctcctacccaggaataatccatggccccgcctccgccatggcttgccgccctcctcttcctcctcctacccgcgctgctgccggcggtcggctccgtctccggcgcggcggctgccggcatcttccgggtgcggcgtaagttaccagccggagttggaggggacactggcgccaacatcagcgcccttcgtgcccacgacggtcgccgccacggccgccttctcgcggctgccgacctcccgctcggtggcctaggtctccccactgacaccgggctctacttcacggagatcaagctcgggacgccgcccaagcgctactacgtccaggtcgacactggcagcgacatcctgtgggttaactgcatctcctgctcaaaatgcccccgcaagagcggactcgggttagacttgacgttctatgaccccaaggcgtcctcgagcgggagcacggtgtcctgcgatcagggattctgcgcggccacctatggggggaagctgccagggtgcactgccaatgtgccctgcgagtacagcgtcatgtacggtgatggtagctcaacgactgggttcttcatcaccgatgcgctgcagtttgatcaggtgactggggatggacagacacagcctggcaatgctaccatcacattcgggtgtggtgctcagcaaggtggggatttgggcaactcaaaccaagctcttgatggaattcttggttttggtcaggcaaatacgtcaatgttatcacagctagctgctgctggtaaagcgaagaagatatttgctcattgcttggataccataaagggtggtggaatttttgctattggaaatgttgttcagccaaaagtaaaaacaacaccgttagtagctgacatgccgcactacaatgtgaaccttaagtcaattgatgttggtggcactacattacagctcccggctcatgtttttgaaacaggagagaaaaaaggcaccataatcgacagtggtactaccttgacataccttccagaattggttttcaaacaagtaatggatgtggtatttagcaagcatcgagatatagccttccataatttgcaagattttttgtgtttccaatattctggaagtgtagatgatggattcccgaccatcaccttccattttgaggatgatcttgcactgcatgtgtatccacatgagtactttttcccaaatgggaatgacatatactgtgtgggattccaaaatggtgcattacaatcaaaagatgggaaggacattgtgcttatgggagatcttgtgctttcaaacaagttggttgtctatgacttggaaaatcaagtcatcgggtggactgactataactgttcgtcgagcattaaaattaaggacgacaagacaggcacaacctatactgtcgaatcacatgacatatcctccggatggaaattccactggcacaagtccctggttctgttgttggtaacaatggtgtggagctatttatagtacactaactctattgtacaacacgaacacgcacttaccgaaattcatttgattcgtattcttttcacaaaaaagaatatctagggttttaacttgcgttctctgaccacggaaaacgatgaaaacaaaaacgttgtgtgccatacaatgagcctgtgtgtcactagtgttatgctgagacaagtgttgatcccacttttgggcaggcggacggtccagccctgtagtctggacggtccgcggtggtggcgtggatggttcgcgcgtgcgcagaattaattagggtttcgagtttttgcgagatttattagctaaatttatgggattaactcgggaaacgacttgtaggtgcagacctcccttttatatagataaatg

SEQ ID NO: 37305 - DNA, 1323 bp, Zea Mays
caaacgcgggggatggaggggttcgatcgctgcgccgccgattctcctggtccttaggttcattgtgaagttgaggtgggtggtataagcatcgaagagagcatgagcactgccagtggtacaaggcgtgcaccaagaagacagtcgcaagatgggtctgctgataaagtagtggtgatcatcgaagcaacctccccggtggtggggagccgtcgtggaccaccgacccctgttcctggcgcccaaaactcacccattgatgtggaggccatcgaagatgaagttcagacagtatctccttcgcgagtgcccccaccgaggagggacaggagaaccaggagggaacctataacagtggttgacttggaggttgacgctagccaggaagaagagattttggctgcagcaaacgcaaactgtagccaatggccagctcccgagattgatcttctggagagaacaagcaatgagaggatatatgcagaaatgttcttgcctagcattggatggtcttcgccatcaaggatccagccactgcttgcagccattaatagctgcaagattccagagttcagttacgatctatcttggctaaaccatggttctcacatgggcaagcagatccaggatcagaagaagttacttgaggagtgcttggcgagatacttgaccgaatcagcccggctgttagatgaaagccaggtggtcaccgaagtgaatgttatggtgcagaattgtgttggccttgaactccgggattcgtcttactatctcgctcccagatgggtggcgatcttccatcgtatttacaactggaggctagcaaagctctctaccggaaagttctcagaagcttatgttctgactcagcacctgtatcaggctcctgcagcagctggctcaaacggtaccacacaagggcttactgctaacaccgccagcagcgatgctgtggatcacatcatgatgcctgccgtttcaaccggcatcacactagacgaaatcatcgagatcagttgtgacctcgatgttgttgatgcgcagccagtaactctgccaccacgactgcctgtgcatgttcatgaagaacctcaggcacttgctgacaacaacgacgtgcatggagttgatgaaatgtacataccaagaagagtagagttgggggaggtgatgcccatcgacacagacgacaagctttctcggctaagagtagagttgggggaggtgatgcccatcgagacggacgacaagctttcccggttactggagcaatgcaccaagctgcaggacaggatcgatgagacactttccatatacttttga

SEQ ID NO: 37306 - DNA, 941 bp, Zea Mays
caaagataagcccctgaactaccagtggccacacacagattccttcgattcccgctgacagcgaagctgaggagaatcccaagaaacagagctggtgaaattgcattgtcgcaacaggcaagagaagaggagaagaaagaaatggctgcaatacctgcagcgatcccgggctgctgctcttcgtctcgcctgcctcagcttgctggcctccctgcctccacaagcagaaggcgcttcaaggtcacggccatggcgcccaaaaagaaggtgaaccgctacgacgagagctggtcgaagcagtggttcggcgcgggcatcttcgcggagggcagcgaggaggtgtccgtggacgtgttcaagaagctggagcggcgcaaggtgctgagcaccgtggagaaggccggcctgctgtccaaggccgaggagctgggcctgacgctctcctcgctggagaagctgggcctgctctccaaggccgaggacctgggcctgctcagcctcgtcgagaccgcggcggggacgtccccgtccgtcctcgcctccatctcgctgccgctcctcgtggccgccgtcgccgcggtggtcgtcgtgcccgacgactccgtcgcgctcgtcgccctacaggccgtcgtcgcggcggtgctcgcggcgggagccgccgggctgttcgtgggctctgtcgtgctcgctggcctgcaggagtcggattgatgcattgatctgcagctgcgcaaggtagaaccaagctgtgtacgtacgtcgacagtaccgccttgtgtagtaggatcgatcttgttagcagagcagaactcgttactaaaaaaatctatagtgtctgtaatataatataatactttagctttttgataacttgccgtgcaaatgtggtaacatattatgaagaaaattgcgatcaaatggacggttaactcggattcaac

SEQ ID NO: 37307 - DNA, 1292 bp, Zea Mays
gtgagatgggagcaaccctaaccggaggatatatgggctgcctgcctggtgggctgggccatctcttctaccccttccttctttttttctttctccctttttctttttcttcctcatatatgttgttgttctgtcttttctttaattggtaaggcgtcatcttgctcgccttagtaagcgcctaggcgtcgcctaggcatccaggcgatggcccaactccttgtctcgtcttaccgccttaagaactatgtcttcaaactaccaaagacggcataatatccaagaaagtatgtattccagaataaaaaaaattccagtacaaacagcccccccccccacacacacacacacatacacagtaccacttggttttgctcataacacaccatcttaattggctcacatgcttactaagccatttcagttggctgggagaatccaacatgttgaccatcatggctggccactgcccgccactaacctttggaggtatacagacaacttctctcatctacacatctcatctcctctgagccagcatcagcaactggtcaggttgtgaatgaaacgagcagaaatggtgcatccagattcaacaatgtgtcgtagtacatgcttcaaggttcacctttgccaatctggttgcagcggtaactgaatcaagctatcagcaaggtgattaaggatatctggatatgtgtgcaatttgatggggagagtcaaatggacaggagactatcaatttgagaagaaatggcaatgatttatggcttagctgcaaggtgcattagggaaatatagtaacagaggagactaggaagaaatgactgttcatgacttcatggaatgggctttaaatagtccctccgtcccaaaacgataagcgtattttgataaggggaaattaacacaaaatacattttgacccttaatttctcttataatagtcatgtgagcaaaaaacagtatcacctcagaggcgccttgcatacaaatctattgatgcaggttctgtccttaacttgtacagaatttgaataattctcggtcaaggtttataatattttcacatacaagatatgcttatcattccaggaaggagagagtatttattattttaattgggtgtacaagtcaacgcacaagtgtattcctacatagaaaagcaaccgacaaaaactgttataacttaaagaaaatcagtcacccaagcaccgcctgccacctaatacctgataagaacatagcctacctatctatgattaggcactaaaccatataatataatgcat

SEQ ID NO: 37308 - DNA, 921 bp, Zea Mays
agccactctgttttttttttaagaaaaacggagacaagatccaccaataacattaacttttaaaaaccagcactggagggaggcacatgtaagatccagagacaataaaaatgcataagcacaacaggtctgaatatggcgccattcaccaagatcactaacatcctagtcagagggacatgcaccgatcctgcacaagacgcttcccagatcctccacaagacggctccaaggaccaccgagcggaccgaggaagggatgttgattgccacggagccacgccgttatcggcataattcacctcccactttaattctctgtccaattctcctttattgcagttagtctacttccttacgcaccgtttgaactcacttgtgctttgtgtttccacccgagactcgatttagtgtgtttcttcctcgcggtcggtgttagcgccgctggagttcacctcgccgtggccagaccagcacgcggcgctgtcgatgaacgtcgccgtggcccactccaacatcgacaacctgtgttaagacaattggtcacccttgcaacatcccaaacacctagaagaagtgaaagttgaagtggaagaggaatcagttccttaatctgaaggtctttctgagggtcctcctgaaggtgctcctgtgggctacgtagctaactgtgatattatggtagaagagcctgactctcctctcaaaggggaggtgcatgacactttttacttctgttagactagcccttggaggtcttttggttatgtttatgttcttgttgctcttttgggaagttgtggccttcccctatattgtaataagtgggcactttcatactacccaggcatgtaataatcactactttggtattttgtaaatctaagtatgcttatgtacattatgttattgtaaagtcttc

SEQ ID NO: 37309 - DNA, 2015 bp, Zea Mays
ggcctccacccagcgtacatgcgctgcggtcgtctgttgccatctcgcgttcggtggtgactccgggctccgggcgccctgcgcccctggatttcgaaccgagaaagaaagctgctgcccaccgtttcccaagtcccatcgccgcccaagaaccggagccacgccgcagatccgccaaaatcacacctcctagcccgtcctccgtcccaatctcttctcgggccagggaggcggcgggacttggtgcctgcatccgagccctagacatggatcaacctgaggaaaaccctgaattcccaagctgtgatgcctactttgaagctatccagtccaagaagaagttgccactgactttgcaagaatcactaactgctgcctttgctcagattccagtctcatccttccctgaggttccagctggtcgagtaattgaaattcctggtgatacttctgttattgatgctgtaaggactctctctgaacagaacataagggcagcaccagtactgaatccagaacctggggctcctactgattggcaggggaggtaccttggtgtcatcgattactcggcaatcatcctttgggtactagaaaatgctgagcttgctgctgttgcactctcggctgcatcggcaactgctgctggagttggcatgggtgctgttggtgctgttggggtggcagctttgggaacaactggcccagctgctgtagctggcttaactgcagctgcaattggggcttctgttgctggtggattaactgctgaaaagggtgtggcgaaggatgggctaactgctgcagatcatttaggggaggatttctacaaagttttacttcagcaggaacctttcagatcaacaacagttcgatcgattgttgagtcgtaccgctggtctccttttgtccccattacactggacacttccatgctgactgtacttctgttgctctctaagtacagattgcgaaatgtccctgtgattgagcctgaaaagcctatcatcaggaatttcattactcagactggtgttgtcaaagggctgcagcaatgtaaaggaagggactggtttgactacatttctgcacttcctctttcagacttaggacttccatttatgtccattgatgaggttatcaccgtcaacagtgatgatcttatcttagaagctttcaagtgcatgaaggataacaagattggtggtgtcccagtagtagaaggccccaaaagaaaacttgttggcagtgttagcataagggacatccgctttctgttgcttagacccaacttattttcaaatttcaggcagttgacagtcattgaattcatgaagactctaggctccactcttcctgattcagagagcaattgcctggtgaagccaccacccacttgcactcctgacgcttcccttggtagtgttattgacagcattgcatcaagaataacacacaggatatatgtagtggatgatgaccttgaggttgttggtgttgtgactctgcgtgatgtgatctcatgctttattcatgagccacccggttattgcgacaactatttggcttcagcgatggagaagcttgaggggaaaggagtcagatcagtggagaaaatttgagcttttctgtagcgtgaatgttgataataacagaacacctagaagaagtgaaagttgaagtggaagaggaatcagttccttaatctgaaggtctttctgagggtcctcctgaaggtgctcctgtgggctacgtagctaactgtgatattatggtagaagagcctgactctcctctcaaaggggaggtgcatgacactttttacttctgttagactagcccttggaggtcttttggttatgtttatgttcttgttgctcttttgggaagttgtggccttcccctatattgtaataagtgggcactttcatactacccaggcatgtaataatcactactttggtattttgtaaatctaagtatgcttatgtacattatgttattgtaaagtcttc

SEQ ID NO: 37310 - DNA, 1926 bp, Zea Mays
ggcctccacccagcgtacatgcgctgcggtcgtctgttgccatctcgcgttcggtggtgactccgggctccgggcgccctgcgcccctggatttcgaaccgagaaagaaagctgctgcccaccgtttcccaagtcccatcgccgcccaagaaccggagccacgccgcagatccgccaaaatcacacctcctagcccgtcctccgtcccaatctcttctcgggccagggaggcggcgggacttggtgcctgcatccgagccctaggtgatacaaacttgtgctctggcgatgcaccttgctacatggatcaacctgaggaaaaccctgaattcccaagctgtgatgcctactttgaagctatccagtccaagaagaagttgccactgactttgcaagaatcactaactgctgcctttgctcagattccagtctcatccttccctgaggttccagctggtcgagtaattgaaattcctggtgatacttctgttattgatgctgtaaggactctctctgaacagaacataagggcagcaccagtactgaatccagaacctggggctcctactgattggcaggggaggtaccttggtgtcatcgattactcggcaatcatcctttgggtactagaaaatgctgagcttgctgctgttgcactctcggctgcatcggcaactgctgctggagttggcatgggtgctgttggtgctgttggggtggcagctttgggaacaactggcccagctgctgtagctggcttaactgcagctgcaattggggcttctgttgctggtggattaactgctgaaaagggtgtggcgaaggatgggctaactgctgcagatcatttaggggaggatttctacaaagttttacttcagcaggaacctttcagatcaacaacagttcgatcgattgttgagtcgtaccgctggtctccttttgtccccattacactggacacttccatgctgactgtacttctgttgctctctaagtacagattgcgaaatgtccctgtgattgagcctgaaaagcctatcatcaggaatttcattactcagactggtgttgtcaaagggctgcagcaatgtaaaggaagggactggtttgactacatttctgcacttcctctttcagacttaggacttccatttatgtccattgatgaggttatcaccgtcaacagtgatgatcttatcttagaagctttcaagtgcatgaaggataacaagattggtggtgtcccagtagtagaaggccccaaaagaaaacttgttggcagtgttagcataagggacatccgctttctgttgcttagacccaacttattttcaaatttcaggcagttgacagtcattgaattcatgaagactctaggctccactcttcctgattcagagagcaattgcctggtgaagccaccacccacttgcactcctgacgcttcccttggtagtgttattgacagcattgcatcaagaataacacacaggatatatgtagtggatgatgaccttgaggttgttggtgttgtgactctgcgtgatgtgatctcatgctttattcatgagccacccggttattgcgacaactatttggcttcagcgatggagaagcttgaggggaaaggagtcagatcagtggagaaaatttgagcttttctgtagcgtgaatgttgataataacaggtcagtatgtgaggaaggtttatttggttggaacggtgcattcgtgtcgtgttaatccagcaaatcctgtgtaggttaagtaacaaggcttctgtgctgttaaaaatattttactatgtcatttctttggacggttttctgaacaaatgtgtggtaaccattaggccttgttcggttattcctacaccaaatggattggatgtgattgaaaaaaaaatagtagagatttttgact

SEQ ID NO: 37311 - DNA, 1709 bp, Zea Mays
ggcctccacccagcgtacatgcgctgcggtcgtctgttgccatctcgcgttcggtggtgactccgggctccgggcgccctgcgcccctggatttcgaaccgagaaagaaagctgctgcccaccgtttcccaagtcccatcgccgcccaagaaccggagccacgccgcagatccgccaaaatcacacctcctagcccgtcctccgtcccaatctcttctcgggccagggaggcggcgggacttggtgcctgcatccgagccctagattccagtctcatccttccctgaggttccagctggtcgagaacataagggcagcaccagtactgaatccagaacctggggctcctactgattggcaggggaggtaccttggtgtcatcgattactcggcaatcatcctttgggtactagaaaatgctgagcttgctgctgttgcactctcggctgcatcggcaactgctgctggagttggcatgggtgctgttggtgctgttggggtggcagctttgggaacaactggcccagctgctgtagctggcttaactgcagctgcaattggggcttctgttgctggtggattaactgctgaaaagggtgtggcgaaggatgggctaactgctgcagatcatttaggggaggatttctacaaagttttacttcagcaggaacctttcagatcaacaacagttcgatcgattgttgagtcgtaccgctggtctccttttgtccccattacactggacacttccatgctgactgtacttctgttgctctctaagtacagattgcgaaatgtccctgtgattgagcctgaaaagcctatcatcaggaatttcattactcagactggtgttgtcaaagggctgcagcaatgtaaaggaagggactggtttgactacatttctgcacttcctctttcagacttaggacttccatttatgtccattgatgaggttatcaccgtcaacagtgatgatcttatcttagaagctttcaagtgcatgaaggataacaagattggtggtgtcccagtagtagaaggccccaaaagaaaacttgttggcagtgttagcataagggacatccgctttctgttgcttagacccaacttattttcaaatttcaggcagttgacagtcattgaattcatgaagactctaggctccactcttcctgattcagagagcaattgcctggtgaagccaccacccacttgcactcctgacgcttcccttggtagtgttattgacagcattgcatcaagaataacacacaggatatatgtagtggatgatgaccttgaggttgttggtgttgtgactctgcgtgatgtgatctcatgctttattcatgagccacccggttattgcgacaactatttggcttcagcgatggagaagcttgaggggaaaggagtcagatcagtggagaaaatttgagcttttctgtagcgtgaatgttgataataacaggtcagtatgtgaggaaggtttatttggttggaacggtgcattcgtgtcgtgttaatccagcaaatcctgtgtaggttaagtaacaaggcttctgtgctgttaaaaatattttactatgtcatttctttggacggttttctgaacaaatgtgtggtaaccattaggccttgttcggttattcctacaccaaatggattggatgtgattgaaaaaaaaatagtagagatttttgact

SEQ ID NO: 37312 - DNA, 1244 bp, Zea Mays
ggcctccacccagcgtacatgcgctgcggtcgtctgttgccatctcgcgttcggtggtgactccgggctccgggcgccctgcgcccctggatttcgaaccgagaaagaaagctgctgcccaccgtttcccaagtcccatcgccgcccaagaaccggagccacgccgcagatccgccaaaatcacacctcctagcccgtcctccgtcccaatctcttctcgggccagggaggcggcgggacttggtgcctgcatccgagccctagacatggatcaacctgaggaaaaccctgaattcccaagctgtgatgcctactttgaagctatccagtccaagaagaagttgccactgactttgcaagaatcactaactgctgccattactcagactggtgttgtcaaagggctgcagcaatgtaaaggaagggactggtttgactacatttctgcacttcctctttcagacttaggacttccatttatgtccattgatgaggttatcaccgtcaacagtgatgatcttatcttagaagctttcaagtgcatgaaggataacaagattggtggtgtcccagtagtagaaggccccaaaagaaaacttgttggcagtgttagcataagggacatccgctttctgttgcttagacccaacttattttcaaatttcagttgacagtcattgaattcatgaagactctaggctccactcttcctgattcagagagcaattgcctggtgaagccaccacccacttgcactcctgacgcttcccttggtagtgttattgacagcattgcatcaagaataacacacaggatatatgtagtggatgatgaccttgaggttgttggtgttgtgactctgcgtgatgtgatctcatgctttattcatgagccacccggttattgcgacaactatttggcttcagcgatggagaagcttgaggggaaaggagtcagatcagtggagaaaatttgagcttttctgtagcgtgaatgttgataataacaggtcagtatgtgaggaaggtttatttggttggaacggtgcattcgtgtcgtgttaatccagcaaatcctgtgtaggttaagtaacaaggcttctgtgctgttaaaaatattttactatgtcatttctttggacggttttctgaacaaatgtgtggtaaccattaggccttgttcggttattcctacaccaaatggattggatgtgattgaaaaaaaaatagtagagatttttgact

SEQ ID NO: 37313 - DNA, 1615 bp, Zea Mays
aaactgttgagagtgagaaggccgaggccgacgtgccacgctcggatctcacaactagtcacaagctgcttctccatattccacaatccacacatccggaccgagcgcgaccccacctcccagatctcatctgcgacgacctcctccctcccgatcccgctccgtctccccccaccgccaccgctgccgctgccgcctcccccaccgaggtcttgtcttcggcgatccagccggagcccgcggcggcgacgatgtacgggtgggagatgctgtcgttcaacatacacgatgggttcctggaggccatcgtgcggggcaaccgctcgggcctcctcaccgccgccgactacaacaacctctgccagtgcgagaccctcgacgacatcaagatgcacctcaccgccaccgagtacgggccctacctccagaacgaaccttcacccttgcacacaacgacaattgtggagaagtgcactcttaaactagtcgatgagtacaagcacatgctgtgccaggccactgaaccactatctacgtttttgcagtatataacttatggccacatgattgacaatgttgtccttattgtaactgggacactgcatgagagagatgttaacgaacttttggagaaatgccacccattgggcatgtttgacagcattgcatcacttgctgttgctcaaaacatgcgtgagctttatagattggttctagtcgatacaccactggccccttacttctcagagtgcattacatctgaggatttggatgacatgaatattgagattatgaggaacactctctacaaagcatatcttgaggacttctacaaattttgccagaaactaggtggtgcaacagctgagatcatgtgtgatctcctttcatttgaagctgacagaagagctgttaacattacaataaatagtattggtactgagttgacaagagatgaccgcaggaagctgtactccaactttggtttattgtatccatatggccacgaagaattggccgtttgtgaagatgttgaccaggttcgtggtgcaatggagaagtacccaccataccagtctatattttccaggatttcatatggagaaagtcagatgttggataaggcattttatgaggaggaagtcaagaggctatgcttgtcctttgagcagcagttccactacgctgttttcttcgcttacatcaggctccgcgagcaggagatcaggaacctgatgtggatctctgaatgtgtcgctcagaaccagaagtcccgggtccatgacagtgtcgtcttcatattctgagaacccccgccactatatatacgccggcgtaaaaaatgccagacctggagttgatgtattatttgttttgtagtcaaataaaggtgtgattatctggcacacaaaataaaatcttgtgtattttggaacagaccttcatcgtcaatgcacagtatgctgtcaatgcacaatatgtgtgtgcaaaagcaaaatagatatatcatgcacacatgtagggggagatatctctacgccttgagtttcaatatggatgatctatctcacaaatgggacttcaaagctagtggaattgaggtattgagtaattc

SEQ ID NO: 37314 - DNA, 1540 bp, Zea Mays
gatcaactacacgattaaggcccaaggtgccgaaacaaactgttgagagtgagaaggccgaggccgacgtgccacgctcggatctcacaactagtcacaagctgcttctccatattccacaatccacacatccggaccgagcgcgaccccacctcccagatctcatctgcgacgacctcctccctcccgatcccgctccgtctccccccaccgccaccgctgccgctgccgcctcccccaccgaggtcttgtcttcggcgatccagccggagcccgcggcggcgacgatgtacgggtgggagatgctgtcgttcaacatacacgatgggttcctggaggccatcgtgcggggcaaccgctcgggcctcctcaccgccgccgactacaacaacctctgccagtgcgagaccctcgacgacatcaagatgcacctcaccgccaccgagtacgggccctacctccagaacgaaccttcacccttgcacacaacgacaattgtggagaagtgcactcttaaactagtcgatgagtacaagcacatgctgtgccaggccactgaaccactatctacgtttttgcagtatataacttatggccacatgattgacaatgttgtccttattgtaactgggacactgcatgagagagatgttaacgaacttttggagaaatgccacccattgggcatgtttgacagcattgcatcacttgctgttgctcaaaacatgcgtgagctttatagattggttctagtcgatacaccactggccccttacttctcagagtgcattacatctgaggatttggatgacatgaatattgagattatgaggaacactctctacaaagcatatcttgaggacttctacaaattttgccagaaactaggtggtgcaacagctgagatcatgtgtgatctcctttcatttgaagctgacagaagagctgttaacattacaataaatagtattggtactgagttgacaagagatgaccgcaggaagctgtactccaactttggtttattgtatccatatggccacgaagaattggccgtttgtgaagatgttgaccaggttcgtggtgcaatggagaagtacccaccataccagtctatattttccaggatttcatatggagaaagtcagatgttggataaggcattttatgaggaggaagtcaagaggctatgcttgtcctttgagcagcagttccactacgctgttttcttcgcttacatcaggctccgcgagcaggagatcaggaacctgatgtggatctctgaatgtgtcgctcagaaccagaagtcccgggtccatgacagtgtcgtcttcatattctgagaacccccgccactatatataccttcatcgtcaatgcacagtatgctgtcaatgcacaatatgtgtgtgcaaaagcaaaatagatatatcatgcacacatgtagggggagatatctctacgccttgagtttcaatatggatgatctatctcacaaatgggacttcaaagctagtggaattgaggtattgagtaattc

SEQ ID NO: 37315 - DNA, 1830 bp, Zea Mays
cttctaagtttcatattgcaagtcttcctcttcttctctggtggtctccgacggcatagcaccaatggaggcctgcggcttcttatttggttggcgtatttgatggctgactttgttgcagtttacacccttggccagttatcccgtcaaaagacagatgcgactagacttggagaacctcaccagctcacgttcttgtggacgcctttccttctcattcatcttggtgggcaggacacggtaactgcgttttctgtcgaagataatgagctgtggctcagacacctgctcaatttactgacccaagttggtctggccttgtatgtgttctggaagtcagcagcacacagttggtttctagcctcagccatctttgcctttgttgctggaattatcaagtatggagagaggatatgggcactcaagtctgcgagccagaaagccctcaggagctccaccaagtcagtaatagatcaatttcctgagctggaagaagatgaacaagagttaggatactttaccatggtcaagtttgctctttctacctcaccgggtgtcagaaacgtattcgttggacgcaaactcgaacagatggaggtagacatacaggccgcatttactggcagccaaatggggaaaaacatacaaggtgcatttatctgcttaagcatctataacgaaaaccaaaatggtgagcttgttttcaaggttatagagattgagcagggaatcatgtacgagaacctctacactaaggcaatggtgctccgtacatgggctggcgccatgcttcggtgtgtcacgctcatctcccttgtggttgcttttgcactctttgtcgcagataacaagcggtggcatcgtcacagcagaatcgatgtagcggtaactcttacactagtcacaggagcattctgcctggaaatctgtgccgtcgttgttatggttttggcgtcaccgtggacatgggctatcctcaggtcctgcaagtgccgcaagctctcccgtgctgcatggtgtattttcaagagtgtaaggccggagtctaggccgttatggtcgaactcgatggggcagtacaatttcatcagctcctgcttctctgacagtgtggttggaaagttgatgagtctcgttggtgccaagcagctctggaggaacttcctgcacaccaagtacgtggatgtcaaaccagatatgaagaagctcctgtttgaagaccagtgcttccaagcggtttttggtacaagcatatcgccaggcctttgcgcgaatccaacatcaggagtcggttcagcattggatattatgctgcgtaaaccgttcgaggaggccatcctgtctctacatatctacacagacatattcctttaccgttgcaagaaccccacgggtgctaccagctgtgagtacacagatgagaagcggctactgatgcacaggtgcaggacgctatccgagtacgtttgctacctgttggtcgtccatcctgagatgctgccagtgagtggcagtgtcactgacgtactccagaaagcttcggataccgtggccacagccagccagccaggtctacggctccaaccaagaataaacttctggagaagctggcagcgcacggtgaccgtaatcgcctagacgatcctgtgcttgcagctgcgtctcttttccgagggcttgcggaagaagccgtgcactctcacgaatcgctgcaggttcttgtgcgtgcatggatggggatcctcctctacgccgccggcaaatctcgtggagacgtgcacgcgcggcagctcaataagggcggcagtgaggcaatgtttgctaaccttg

SEQ ID NO: 37316 - DNA, 1992 bp, Zea Mays
cgactgtcctgacagctgccgccctttgcctagctcgccgtgcctgccgtcgaatccatcgttctcggcgtgctcaagctactgtttacacccttggccagttatcccgtcaaaagacagatgcgactagacttggagaacctcaccagctcacgttcttgtggacgcctttccttctcattcatcttggtgggcaggacacggtaactgcgttttctgtcgaagataatgagctgtggctcagacacctgctcaatttactgacccaagttggtctggccttgtatgtgttctggaagtcagcagcacacagttggtttctagcctcagccatctttgcctttgttgctggaattatcaagtatggagagaggatatgggcactcaagtctgcgagccagaaagccctcaggagctccaccaagtcagtaatagatcaatttcctgagctggaagaagatgaacaagagttaggatactttaccatggtcaagtttgctctttctacctcaccgggtgtcagaaacgtattcgttggacgcaaactcgaacagatggaggtagacatacaggccgcatttactggcagccaaatggggaaaaacatacaaggtgcatttatctgcttaagcatctataacgaaaaccaaaatgataacaagcggtggcatcgtcacagcagaatcgatgtagcggtaactcttacactagtcacaggagcattctgcctggaaatctgtgccgtcgttgttatggttttggcgtcaccgtggacatgggctatcctcaggtcctgcaagtgccgcaagctctcccgtgctgcatggtgtattttcaagagtgtaaggccggagtctaggccgttatggtcgaactcgatggggcagtacaatttcatcagctcctgcttctctgacagtgtggttggaaagttgatgagtctcgttggtgccaagcagctctggaggaacttcctgcacaccaagtacgtggatgtcaaaccagatatgaagaagctcctgtttgaagaccagtgcttccaagcggtttttggtacaagcatatcgccaggcctttgcgcgaatccaacatcaggagtcggttcagcattggatattatgctgcgtaaaccgttcgaggaggccatcctgtctctacatatctacacagacatattcctttaccgttgcaagaaccccacgggtgctaccagctgtgagtacacagatgagaagcggctactgatgcacaggtgcaggacgctatccgagtacgtttgctacctgttggtcgtccatcctgagatgctgccagtgagtggcagtgtcactgacgtactccagaaagcttcggataccgtggccacagccagccagccaggtctacggctccaaccaagaataaacttctggagaagctggcagcgcacggtgaccgtaatcgcctagacgatcctgtgcttgcagctgcgtctcttttccgagggcttgcggaagaagccgtgcactctcacgaatcgctgcaggttcttgtgcgtgcatggatggggatcctcctctacgccgccggcaaatctcgtggagacgtgcacgcgcggcagctcaataagggcggtgagttgctcacctttctctggttgcatttggcgcataacggccatggagatctgggtagcttccagattgaactcgttcgactgagtgccgtaaatgagggaggacgtaaaatttttgtttggggttatcagcgtccttggtgaaggataaccttgtctatccttactcatcccattgttctttctcgacaaggtatttatattgtccgatgcatgttgtgctatgctagaaaacatgatattatggctcctgagatgattttcattttcgggttctccacatatttaaacagaagccgtatcaaacactgtagcagcttattagttctgctgattttcagaatgagtcaagaagcagaagcagaagcagttttttc

SEQ ID NO: 37317 - DNA, 2414 bp, Zea Mays
gttttttcagctttcttagcatgtaagcaacgaatcgtaatgtggctttagcttcaatactgtcctcctcctccaccaccgccgccgactgtcctgacagctgccgccctttgcctagctcgccgtgcctgccgtcgaatccatcgttctcggcgtgctcaagctactggtaggctctgtgcgactgtacctgaacttgtggtgcgtgggcgcgtggcttctgagagtgttctgctggtgctcctgcgggtggtgtgcactgtgttgggttgctgcgtgcagctcgctgcttgcttctcggcaactgagggcagccaaggacagaatagaatatggacaacagagcaaggagccaaggagaggaagagcgaagggggaccatttcatatcctccgtaatttcgtgaccacactcgaatgtgttgaggaaactatatgcactgcttgaaacctacaaagatggcaacattgttgcaactatggaatgattgggaactacaggccttgtttacacccttggccagttatcccgtcaaaagacagatgcgactagacttggagaacctcaccagctcacgttcttgtggacgcctttccttctcattcatcttggtgggcaggacacggtaactgcgttttctgtcgaagataatgagctgtggctcagacacctgctcaatttactgacccaagttggtctggccttgtatgtgttctggaagtcagcagcacacagttggtttctagcctcagccatctttgcctttgttgctggaattatcaagtatggagagaggatatgggcactcaagtctgcgagccagaaagccctcaggagctccaccaagtcagtaatagatcaatttcctgagctggaagaagatgaacaagagttaggatactttaccatggtcaagtttgctctttctacctcaccgggtgtcagaaacgtattcgttggacgcaaactcgaacagatggaggtagacatacaggccgcatttactggcagccaaatggggaaaaacatacaaggtgcatttatctgcttaagcatctataacgaaaaccaaaatgataacaagcggtggcatcgtcacagcagaatcgatgtagcggtaactcttacactagtcacaggagcattctgcctggaaatctgtgccgtcgttgttatggttttggcgtcaccgtggacatgggctatcctcaggtcctgcaagtgccgcaagctctcccgtgctgcatggtgtattttcaagagtgtaaggccggagtctaggccgttatggtcgaactcgatggggcagtacaatttcatcagctcctgcttctctgacagtgtggttggaaagttgatgagtctcgttggtgccaagcagctctggaggaacttcctgcacaccaagtacgtggatgtcaaaccagatatgaagaagctcctgtttgaagaccagtgcttccaagcggtttttggtacaagcatatcgccaggcctttgcgcgaatccaacatcaggagtcggttcagcattggatattatgctgcgtaaaccgttcgaggaggccatcctgtctctacatatctacacagacatattcctttaccgttgcaagaaccccacgggtgctaccagctgtgagtacacagatgagaagcggctactgatgcacaggtgcaggacgctatccgagtacgtttgctacctgttggtcgtccatcctgagatgctgccagtgagtggcagtgtcactgacgtactccagaaagcttcggataccgtggccacagccagccagccaggtctacggctccaaccaagaataaacttctggagaagctggcagcgcacggtgaccgtaatcgcctagacgatcctgtgcttgcagctgcgtctcttttccgagggcttgcggaagaagccgtgcactctcacgaatcgctgcaggttcttgtgcgtgcatggatggggatcctcctctacgccgccggcaaatctcgtggagacgtgcacgcgcggcagctcaataagggcggtgagttgctcacctttctctggttgcatttggcgcataacggccatggagatctgggtagcttccagattgaactcgttcgactgagtgccgtaaatgagggaggacgtaaaatttttgtttggggttatcagcgtccttggtgaaggataaccttgtctatccttactcatcccattgttctttctcgacaaggtatttatattgtccgatgcatgttgtgctatgctagaaaacatgatattatggctcctgagatgattttcattttcgggttctccacatatttaaacagaagccgtatcaaacactgtagcagcttattagttctgctgattttcagaatgagtcaagaagcagaagcagaagcagttttttc

SEQ ID NO: 37318 - DNA, 813 bp, Zea Mays
gttttttcagctttcttagcatgtaagcaacgaatcgtaatgtggctttagcttcaatactgtcctcctcctccaccaccgccgccgactgtcctgacagctgccgccctttgcctagctcgccgtgcctgccgtcgaatccatcgttctcggcgtgctcaagctactggtaggctctgtgcgactgtacctgaacttgtggtgcgtgggcgcgtggcttctgagagtgttctgctggtgctcctgcgggtggtgtgcactgtgttgggttgctgcgtgcagctcgctgcttgcttctcggcaactgagggcagccaaggacagaatagaatatggacaacagagcaaggagccaaggagaggaagagcgaagggggaccatttcatatcctccgtaatttcgtgaccacactcgaatggaaatgtagatgacacaaataggaattgggagaagcatcttttatttgagcacatttactatctaacacttaattagattttagtttggttattagacttattaatgatagttgaactggttgtttggttcttaaaattgaggcaatcttgtggaggtgtttctactttcattatgtttcagtgatggtcattttttattactatgctactccgatgcttactatgtcagattgctcaaggatgttccatttacaaaacagacttccaaaaaaattcaataattctcagtctttgttttgtgtttcatgtacattccatgtttatggaaacctggggtgtacaccatgatacaagttggcatgagcactggtttctgatattctgataaatatt

SEQ ID NO: 37319 - DNA, 1639 bp, Zea Mays
ctcgcctgttttttcagctttcttagcatgtaagcaacgaatcgtaatgtggctttagcttcaatactgtcctcctcctccaccaccgccgccgactgtcctgacagctgccgccctttgcctagctcgccgtgcctgccgtcgaatccatcgttctcggcgtgctcaagctactggtaggctctgtgcgactgtacctgaacttgtggtgcgtgggcgcgtggcttctgagagtgttctgctggtgctcctgcgggtggtgtgcactgtgttgggttgctgcgtgcagctcgctgcttgcttctcggcaactgagggcagccaaggacagaatagaatatggacaacagagcaaggagccaaggagaggaagagcgaagggggaccatttcatatcctccgtaatttcgtgaccacactcgaatggtaacctctaattaatcctaggttcacgagtttcttatgagagccatcagtaattatgctaatttattaaacgaatttctggaagcatttggtgcatactttcagattttccctaaaacagaagttgcggatctggctgatatctttccagtagagctggtttcgctcagattcaaatagcagtttagaaataatggtcaaaaactcaaaataatgctgctgtccggctaggtttagtttgtactaaaatctagttgtcttgttttggcgtagtcagaggcagaaatcgtcctggccacccaaggaaaagttgtaagaaaatttccatagatacccaagatatattagttgctacatttagttaaagcagattaagataagggtagaacagtgaacaacactggttttagcgttttttcgataatgtctgaatttacttagtgtttcatgaagagattaattcaaggaattctgaaacagacgcgattgttgttgactagttcttaagtgtagttttttgtccacgggtttcggagctgtcgaaggcatgatgctgtgttctcatcaaggttaagactagtgcattgtgaacttgggttacgacattgcatgctggttgtggtttgattatgttcttccatcgttccgataggaaataggaatttttggtgtgtatgcttttctacattgtgtttgctttggttcctatttcctatctaatggatgcgtgtatgcttttctagttccatattgtgtttgctgaatatttttgctcacccttgttttttttttcttggtgtttttcttgtttttatgtaggaaatgtagatgacacaaataggaattgggagaagcatcttttatttgagcacatttactatctaacacttaattagattttagtttggttattagacttattaatgatagttgaactggttgtttggttcttaaaattgaggcaatcttgtggaggtgtttctactttcattatgtttcagtgatggtcattttttattactatgctactccgatgcttactatgtcagattgctcaaggatgttccatttacaaaacagacttccaaaaaaattcaataattctcagtctttgttttgtgtttcatgtacattccatgtttatggaaacctggggtgtacaccatgatacaagttggcatgagcactggtttctgatattctgataaatatt

SEQ ID NO: 37320 - DNA, 1551 bp, Zea Mays
tttatatgtaacatatatgctattgttatcttattttttcatttctatcagttaatccatgttagtgtttctgttcttgttatgatagatacagtgtgatgttttaacacatgtggtacagtcacttctattttggtcatcacatgtgcatgagcactttggttttggttaacataagtggtatggacaccttaactgaccagggcattgtttgtcacaaagtttcccactgtgtgagggaatatttttttggtcaatagatagcatttactaacatcttgatctggtactttggtatgtaggaattcacgaggaaatgactaagagtcattgcctctaccatgggccattagaatgaaaattgctcttggtgctgcgaaaggcctcgcttttcttcatgaagaagctgaaagaccagtaatctatcgggacttcaaaacctccaatattcttttagatgcggactataacgcaaaactctctgattttggacttgctaaagatggccctgagggtgataaaacacatgtgtcaactagggtcatgggaacatatggatatgctgcacctgaatatgtaatgacaggtcacctgacatcgaagagtgacgtatatagctttggagttgtactactagagatgatgactggtagaaggtcaatggacaagaacaggccaaacggagaacacaacctggttgaatgggcacgcccttatctgggagaaagacgcagattctataagcttgtagaccctcgtttggatgggaacttctccataaaaggcgcccagaagacggctcagctggcccatgcctgcctcagccgtgaccccaaggctaggcctctgatgagccaggtggtggaggtgctgaagcctctccagaacctcaaggacatggccagctcttcctactacttccagtccatgcaacatgagcgtcgcacagcacttgccaacccatatggcagtcaaagcatgaaagcgcagagcacctttgcgcggaacgggcagcagcccatgaggagcctctcgtatggccctcatgcttccccgtatcgccagtcgccaagacttgacagcaagcggcaatgagtcatggtgcttgtctgtcgaccataacatattttcaagactgaagttgtaaccagaactggtgtatgaactcagccatccaacaagcatctgagctatctattattgtggatgaagcagcaacattgattcgaatttgcatatcatctgcgagtgaatttttctctcttgttatcgcttacattttagctgtactgtctttacggctctagataccttgacttgaaaggtggaactaaacagggttttgatcggtctttgaaacaatgctcaggcagcaaatgcttggaatttgttccttcctggaaaccagcagtaggcaagtctgatatatgttacatagttgtcctaaggctgttcataatctatggtttcttgtcacaatatccaaatttgccacgtcacatattactttaaaaggtatatttgtcccaatacatagtattatgttgtttt

SEQ ID NO: 37321 - DNA, 1725 bp, Zea Mays
aggatccaaggatttatattacacgaaaccaaaccatctactgatgatgcttgccaggaccaatcagtaccaccagcctctggttccgcaacaaccagtaacactggaagtatctcaccttcttccatagttggagaggagctaaaactagctttccaactgcgtagatttacttttagtgaactgaaatgtgccacgagaaacttccgacctgagagtcttcttggcgagggaggttttggctgtgtctttaaaggatggattgaggagaatggaactgctcctgttaagccaggcaccggattaactgttgctgtcaagacactcaaccatgatgggttgcaggggcataaagagtgggtggcagaagttgattttcttggaaaccttcagcatccacatctagtgaaattggttggctactgcattgaagatgaccagaggttgcttgtgtatgaatttatgccccgtggaagtttggagaatcatctttttagaaagtcattgcctctaccatgggccattagaatgaaaattgctcttggtgctgcgaaaggcctcgcttttcttcatgaagaagctgaaagaccagtaatctatcgggacttcaaaacctccaatattcttttagatgcggactataacgcaaaactctctgattttggacttgctaaagatggccctgagggtgataaaacacatgtgtcaactagggtcatgggaacatatggatatgctgcacctgaatatgtaatgacaggtcacctgacatcgaagagtgacgtatatagctttggagttgtactactagagatgatgactggtagaaggtcaatggacaagaacaggccaaacggagaacacaacctggttgaatgggcacgcccttatctgggagaaagacgcagattctataagcttgtagaccctcgtttggatgggaacttctccataaaaggcgcccagaagacggctcagctggcccatgcctgcctcagccgtgaccccaaggctaggcctctgatgagccaggtggtggaggtgctgaagcctctccagaacctcaaggacatggccagctcttcctactacttccagtccatgcaacatgagcgtcgcacagcacttgccaacccatatggcagtcaaagcatgaaagcgcagagcacctttgcgcggaacgggcagcagcccatgaggagcctctcgtatggccctcatgcttccccgtatcgccagtcgccaagacttgacagcaagcggcaatgagtcatggtgcttgtctgtcgaccataacatattttcaagactgaagttgtaaccagaactggtgtatgaactcagccatccaacaagcatctgagctatctattattgtggatgaagcagcaacattgattcgaatttgcatatcatctgcgagtgaatttttctctcttgttatcgcttacattttagctgtactgtctttacggctctagataccttgacttgaaaggtggaactaaacagggttttgatcggtctttgaaacaatgctcaggcagcaaatgcttggaatttgttccttcctggaaaccagcagtaggcaagtctgatatatgttacatagttgtcctaaggctgttcataatctatggtttcttgtcacaatatccaaatttgccacgtcacatattactttaaaaggtatatttgtcccaatacatagtattatgttgtttt

SEQ ID NO: 37322 - DNA, 1858 bp, Zea Mays
cttcgttccgttttactttccaacgctggtagataagctgacgtgatgtctgctgcctgctgcgtgctcttgtctagtatctggactgctgccattgatgggcctggaccaataggcgtgggggttgcttcagtgctgggcgattttaaatggttcaaaaaccaaaccatctactgatgatgcttgccaggaccaatcagtaccaccagcctctggttccgcaacaaccagtaacactggaagtatctcaccttcttccatagttggagaggagctaaaactagctttccaactgcgtagatttacttttagtgaactgaaatgtgccacgagaaacttccgacctgagagtcttcttggcgagggaggttttggctgtgtctttaaaggatggattgaggagaatggaactgctcctgttaagccaggcaccggattaactgttgctgtcaagacactcaaccatgatgggttgcaggggcataaagagtgggtggcagaagttgattttcttggaaaccttcagcatccacatctagtgaaattggttggctactgcattgaagatgaccagaggttgcttgtgtatgaatttatgccccgtggaagtttggagaatcatctttttagaaagtcattgcctctaccatgggccattagaatgaaaattgctcttggtgctgcgaaaggcctcgcttttcttcatgaagaagctgaaagaccagtaatctatcgggacttcaaaacctccaatattcttttagatgcggactataacgcaaaactctctgattttggacttgctaaagatggccctgagggtgataaaacacatgtgtcaactagggtcatgggaacatatggatatgctgcacctgaatatgtaatgacaggtcacctgacatcgaagagtgacgtatatagctttggagttgtactactagagatgatgactggtagaaggtcaatggacaagaacaggccaaacggagaacacaacctggttgaatgggcacgcccttatctgggagaaagacgcagattctataagcttgtagaccctcgtttggatgggaacttctccataaaaggcgcccagaagacggctcagctggcccatgcctgcctcagccgtgaccccaaggctaggcctctgatgagccaggtggtggaggtgctgaagcctctccagaacctcaaggacatggccagctcttcctactacttccagtccatgcaacatgagcgtcgcacagcacttgccaacccatatggcagtcaaagcatgaaagcgcagagcacctttgcgcggaacgggcagcagcccatgaggagcctctcgtatggccctcatgcttccccgtatcgccagtcgccaagacttgacagcaagcggcaatgagtcatggtgcttgtctgtcgaccataacatattttcaagactgaagttgtaaccagaactggtgtatgaactcagccatccaacaagcatctgagctatctattattgtggatgaagcagcaacattgattcgaatttgcatatcatctgcgagtgaatttttctctcttgttatcgcttacattttagctgtactgtctttacggctctagataccttgacttgaaaggtggaactaaacagggttttgatcggtctttgaaacaatgctcaggcagcaaatgcttggaatttgttccttcctggaaaccagcagtaggcaagtctgatatatgttacatagttgtcctaaggctgttcataatctatggtttcttgtcacaatatccaaatttgccacgtcacatattactttaaaaggtatatttgtcccaatacatagtattatgttgtttt

SEQ ID NO: 37323 - DNA, 2144 bp, Zea Mays
cgttccaggtcgtggtctttgccaaattcccacgcccctgcccaccctgcccgaatcctctcgccctttacccccgcccgcgaccccattcacactctcgctgctccactccgctccgctcagctcgtcgggacgcgcccccgcctcccatcccatgcccgcccccgcgctcgtcggaggccgctcgcggcggcctcccatcccgccgcgctgacgagagggcctctcggtgggggcgcttcgggtgttcattttgtccgttcggggaaggggagtgcggcgatggggaagcagcaggaggggaagcggcggcgcggggagaaggacgggaagcggaaggggagggggaagacagctgcagcggcggtgccggaggacgcggcgccagtggccgggtgctggatccgcttcccgcgcctccgcggctgcatgccgtcgcgcgccaaggtcgactcctccaccagcgcgcgtggcggcggccgggaaaccaaaccatctactgatgatgcttgccaggaccaatcagtaccaccagcctctggttccgcaacaaccagtaacactggaagtatctcaccttcttccatagttggagaggagctaaaactagctttccaactgcgtagatttacttttagtgaactgaaatgtgccacgagaaacttccgacctgagagtcttcttggcgagggaggttttggctgtgtctttaaaggatggattgaggagaatggaactgctcctgttaagccaggcaccggattaactgttgctgtcaagacactcaaccatgatgggttgcaggggcataaagagtgggtggcagaagttgattttcttggaaaccttcagcatccacatctagtgaaattggttggctactgcattgaagatgaccagaggttgcttgtgtatgaatttatgccccgtggaagtttggagaatcatctttttagaaagtcattgcctctaccatgggccattagaatgaaaattgctcttggtgctgcgaaaggcctcgcttttcttcatgaagaagctgaaagaccagtaatctatcgggacttcaaaacctccaatattcttttagatgcgatggccctgagggtgataaaacacatgtgtcaactagggtcatgggaacatatggatatgctgcacctgaatatgtaatgacaggtcacctgacatcgaagagtgacgtatatagctttggagttgtactactagagatgatgactggtagaaggtcaatggacaagaacaggccaaacggagaacacaacctggttgaatgggcacgcccttatctgggagaaagacgcagattctataagcttgtagaccctcgtttggatgggaacttctccataaaaggcgcccagaagacggctcagctggcccatgcctgcctcagccgtgaccccaaggctaggcctctgatgagccaggtggtggaggtgctgaagcctctccagaacctcaaggacatggccagctcttcctactacttccagtccatgcaacatgagcgtcgcacagcacttgccaacccatatggcagtcaaagcatgaaagcgcagagcacctttgcgcggaacgggcagcagcccatgaggagcctctcgtatggccctcatgcttccccgtatcgccagtcgccaagacttgacagcaagcggcaatgagtcatggtgcttgtctgtcgaccataacatattttcaagactgaagttgtaaccagaactggtgtatgaactcagccatccaacaagcatctgagctatctattattgtggatgaagcagcaacattgattcgaatttgcatatcatctgcgagtgaatttttctctcttgttatcgcttacattttagctgtactgtctttacggctctagataccttgacttgaaaggtggaactaaacagggttttgatcggtctttgaaacaatgctcaggcagcaaatgcttggaatttgttccttcctggaaaccagcagtaggcaagtctgatatatgttacatagttgtcctaaggctgttcataatctatggtttcttgtcacaatatccaaatttgccacgtcacatattactttaaaaggtatatttgtcccaatacatagtattatgttgtttt

SEQ ID NO: 37324 - DNA, 2137 bp, Zea Mays
cgttccaggtcgtggtctttgccaaattcccacgcccctgcccaccctgcccgaatcctctcgccctttacccccgcccgcgaccccattcacactctcgctgctccactccgctccgctcagctcgtcgggacgcgcccccgcctcccatcccatgcccgcccccgcgctcgtcggaggccgctcgcggcggcctcccatcccgccgcgctgacgagagggcctctcggtgggggcgcttcgggtgttcattttgtccgttcggggaaggggagtgcggcgatggggaagcagcaggaggggaagcggcggcgcggggagaaggacgggaagcggaaggggagggggaagacagctgcagcggcggtgccggaggacgcggcgccagtggccgggtgctggatccgcttcccgcgcctccgcggctgcatgccgtcgcgcgccaaggtcgactcctccaccagcgcgcgtggcggcggccgggaaaccaaaccatctactgatgatgcttgccaggaccaatcagtaccaccagcctctggttccgcaacaaccagtaacactggaagtatctcaccttcttccatagttggagaggagctaaaactagctttccaactgcgtagatttacttttagtgaactgaaatgtgccacgagaaacttccgacctgagagtcttcttggcgagggaggttttggctgtgtctttaaaggatggattgaggagaatggaactgctcctgttaagccaggcaccggattaactgttgctgtcaagacactcaaccatgatgggttgcaggggcataaagagtgggtggcagaagttgattttcttggaaaccttcagcatccacatctagtgaaattggttggctactgcattgaagatgaccagaggttgcttgtagtcattgcctctaccatgggccattagaatgaaaattgctcttggtgctgcgaaaggcctcgcttttcttcatgaagaagctgaaagaccagtaatctatcgggacttcaaaacctccaatattcttttagatgcggactataacgcaaaactctctgattttggacttgctaaagatggccctgagggtgataaaacacatgtgtcaactagggtcatgggaacatatggatatgctgcacctgaatatgtaatgacaggtcacctgacatcgaagagtgacgtatatagctttggagttgtactactagagatgatgactggtagaaggtcaatggacaagaacaggccaaacggagaacacaacctggttgaatgggcacgcccttatctgggagaaagacgcagattctataagcttgtagaccctcgtttggatgggaacttctccataaaaggcgcccagaagacggctcagctggcccatgcctgcctcagccgtgaccccaaggctaggcctctgatgagccaggtggtggaggtgctgaagcctctccagaacctcaaggacatggccagctcttcctactacttccagtccatgcaacatgagcgtcgcacagcacttgccaacccatatggcagtcaaagcatgaaagcgcagagcacctttgcgcggaacgggcagcagcccatgaggagcctctcgtatggccctcatgcttccccgtatcgccagtcgccaagacttgacagcaagcggcaatgagtcatggtgcttgtctgtcgaccataacatattttcaagactgaagttgtaaccagaactggtgtatgaactcagccatccaacaagcatctgagctatctattattgtggatgaagcagcaacattgattcgaatttgcatatcatctgcgagtgaatttttctctcttgttatcgcttacattttagctgtactgtctttacggctctagataccttgacttgaaaggtggaactaaacagggttttgatcggtctttgaaacaatgctcaggcagcaaatgcttggaatttgttccttcctggaaaccagcagtaggcaagtctgatatatgttacatagttgtcctaaggctgttcataatctatggtttcttgtcacaatatccaaatttgccacgtcacatattactttaaaaggtatatttgtcccaatacatagtattatgttgtttt

SEQ ID NO: 37325 - DNA, 1898 bp, Zea Mays
gctcaagctcaggcaagcggcagcaaggcgttggcaatcccagtccagtcgtcggagcactcgcaatttcccgtcacagctggccaccgccccaccctcacggcctcacctcctcccgctacacgcacgcgcccacctacccaaaacgaccgcgcgcggcgccctcctcccgcggtgccaccaccaccaccacctcgtcggaccatcaccacgccgatcggcagctaagcagctcccgcccccagcaccgcgagctgcgatggcaatggacgcggccgtggccgtgaagagcggcggtggcggcgccggatcgaccggggtcaccgcggcggcctcgcagtccccgcaggcggcgactaacggcggcgagcggcggtcccggttccagcgcatctgcgtgtactgcggcagcgccaagggccggaagcctagctaccaggacgccgccgtcgagctgggcaaggagctggtggagaggggcatagacctggtctacgggggcggttccatcggcctcatggggctggtctcgcatgcagttcatgacggagggcgccatgtgattgggtcactggcgagcctgttggggaagtaagggccgtctccggcatgcacgagaggaaggccgagatggcccgcttcgccgatgccttcatagcgttacctggtggctatggaactctggaagagctgctggaggtcatcacctgggcgcaactagggatccataagaagccggtcgggcttctgaacgtggacgggttctacgacccgctgctgtccttcatcgacatggccgtcaacgaagggttcatcaaggaggacgcccgccgcatcgtcatctcggctcccacggccaaggagctggtcctcaagcttgaggagtacgttccggagtacgaggtaggcctggtgtgggaggaccagatgccaccgtccgccgccgccgcgcacgggttcgccccggagcttgtggagcccgggatcacctcctcgtcctgatctggactggacggggacgtcggccgggcctgcctacctacgctaaccccagattctgaccgacggccagcccggcaccaagtagaaaggctatccatactagtaccacctaattaataccgtaatctactactactactactaacaaagaagattgttgggatcgaggatgacagctagctagcgtctgctcagtcagcagcatatcgtcgttagccgcgcagtgtgcagctgcgtcagctctgccattgctactgctccttttgggcttttgtgttgtgctctcctagaagtagggaggaaggaaggaaggcatgctatgtatattccccgggtatatggttgtggtatggcgattggatttgtcttgctcgcagcctcgcacgtgtgatggatggatcttggaacaaaagctagttgcaatgcaaaagcgattcatttctatcctacagtaaatcataccagagtttgctgctgtgctgtgctttctgctttgtttgcttgtttactagtagttgtcgcgcgccctgtgcgcgtgctgctgcccactgatgaatataataacccgttcctttagagaattaattcatatttatgtaataatctagatgctatgtctgaatggagacctctccggacatgaaccgttgcattgccgcatcatccagggcacaggtcacaggggctaggaagcacaagcaatggtagagggaagctatttagagagcctgagcacacaatatatagataatagggttttatatgtctggaatattcacatcagcatggaatgaaaaagaggggtaaaggaatgatacatcatacctgtgggcatcactaaatgaaacaaatgtctgaaaatggaacttcattctcctttgaggatgctttacttc

SEQ ID NO: 37326 - DNA, 1831 bp, Zea Mays
gctcaagctcaggcaagcggcagcaaggcgttggcaatcccagtccagtcgtcggagcactcgcaatttcccgtcacagctggccaccgccccaccctcacggcctcacctcctcccgctacacgcacgcgcccacctacccaaaacgaccgcgcgcggcgccctcctcccgcggtgccaccaccaccaccacctcgtcggaccatcaccacgccgatcggcagctaagcagctcccgcccccagcaccgcgagctgcgatggcaatggacgcggccgtggccgtgaagagcggcggtggcggcgccggatcgaccggggtcaccgcggcggcctcgcagtccccgcaggcggcgactaacggcggcgagcggcggtcccggttccagcgcatctgcgtgtactgcggcagcgccaagggccggaagcctagctaccaggacgccgccgtcgagctgggcaaggagctgggtcatcccgagatccttgatgcccagagaggtcactggcgagcctgttggggaagtaagggccgtctccggcatgcacgagaggaaggccgagatggcccgcttcgccgatgccttcatagcgttacctggtggctatggaactctggaagagctgctggaggtcatcacctgggcgcaactagggatccataagaagccggtcgggcttctgaacgtggacgggttctacgacccgctgctgtccttcatcgacatggccgtcaacgaagggttcatcaaggaggacgcccgccgcatcgtcatctcggctcccacggccaaggagctggtcctcaagcttgaggagtacgttccggagtacgaggtaggcctggtgtgggaggaccagatgccaccgtccgccgccgccgcgcacgggttcgccccggagcttgtggagcccgggatcacctcctcgtcctgatctggactggacggggacgtcggccgggcctgcctacctacgctaaccccagattctgaccgacggccagcccggcaccaagtagaaaggctatccatactagtaccacctaattaataccgtaatctactactactactactaacaaagaagattgttgggatcgaggatgacagctagctagcgtctgctcagtcagcagcatatcgtcgttagccgcgcagtgtgcagctgcgtcagctctgccattgctactgctccttttgggcttttgtgttgtgctctcctagaagtagggaggaaggaaggaaggcatgctatgtatattccccgggtatatggttgtggtatggcgattggatttgtcttgctcgcagcctcgcacgtgtgatggatggatcttggaacaaaagctagttgcaatgcaaaagcgattcatttctatcctacagtaaatcataccagagtttgctgctgtgctgtgctttctgctttgtttgcttgtttactagtagttgtcgcgcgccctgtgcgcgtgctgctgcccactgatgaatataataacccgttcctttagagaattaattcatatttatgtaataatctagatgctatgtctgaatggagacctctccggacatgaaccgttgcattgccgcatcatccagggcacaggtcacaggggctaggaagcacaagcaatggtagagggaagctatttagagagcctgagcacacaatatatagataatagggttttatatgtctggaatattcacatcagcatggaatgaaaaagaggggtaaaggaatgatacatcatacctgtgggcatcactaaatgaaacaaatgtctgaaaatggaacttcattctcctttgaggatgctttacttc

SEQ ID NO: 37327 - DNA, 1908 bp, Zea Mays
acgccttggccggccggaacgcccgcaaccgacgaaatgccgacgccggcgccggcccttcctttcgtcccgaagccgcaacccatccttcacgtcgctaaagccctggtcccatcccctcgccagacgcagccccaggcccgagggcgaggcctaccgcagccggtcaattgtgccaactccaagcgcctcgacgacgcactctccgctggcttcgtccgccttctcaacgccggccaagtacaggatgcggactctgctagcggaacctgccggcgctatgaccccaagccgggtgacttcgcggtcggggtcgtagtttctggcacggaggcgcgcctcgacgttgcggtcggcgccgaccgtctcgccacgctgctctccaaggagcttctcccgctcgaccgcgacagttctgacccgccgacgcgacaagctctgcctcggctggggagcatcggcgtcgtggcgggcccctccgtggacgacgacagacagaagcgcgggagcaggacgctggtggcgcccgggacggtagtattcgctgaggtgcttggacggacgcttagcgggcgtccactactgtcggcacggcggctcttccggcgcctcgcatggcaccgcgccagattctgcaactcaacgagccaattgaggtaaaaatttacgagtggaacaccggggggctactcacaagaattgagggtctgagagcatttcttccaaaatttgagctcgtggacaggataagttcatttacagacttgaaaaataaagtcggttgcagcattcgtgtgtgcattgcaaggctcgatgaagaaactaacgacctgataattagtgagaagaaagcatgggaaatgacttatcttaaagaaggaaccctcctacaagggactgtttgcaagatttttccgtatggtgcgcgggttaggattgctgggacaaacagaagtggcttacttcacatatcgaatattagtcgaggcaatgttttgtccgtaagtgacatcctgaagatagatgatgaggtgaaagttatcgtgatcaagtcaaatgtcccagacaaaattgcagtgagcatagcagaccttgagagtgcacctggtttgtttctgtcagacagagagaaagtgttctcggaagcagaggagatggcaaagagatacagggagcagcttccagttacccctcagaaccctatattagatgatggccttccaggagaaaagctaccatttgataacgaaactaaactgtatgcaaactggcaatggttcaaatttctgcatcatagctaagctgctgacaacagcgacagagacatatctggtacttgttgaccatgcaaaggtgaactgtcgctagagaacctgccaacctgttgaagtccaatactgaccagtggtgggtagttctccacttccataacccagcatcagtcatggagaagtatgttggacaggaacaggcaacttcatcccgcagacaagatagggtacaaggtttccaggctgcagaacattggtgtttcgaattgcctcattcctagtgcccctggagtgaaatgttgtgatatcattttatctgtccggagaatgtagcttcattgcattcatgttatgtcaaaactagtcgggctgcccaagcactccgtgccaacaacttgcatctgcccatgaaatagattctgaaattttagcaccgtgtccctggattgctgaagtatcgtgatgggcgcaagggagtacctgaattattatgtacactctacctggctagtcacaactggcagtcctgttagacaaaattggagtccaggaaaagaggaggaagattatgggcttggcccctgcccagccggtttgccaaaagccagttgccctctaagtatagatgtccaaatgg

SEQ ID NO: 37328 - DNA, 1840 bp, Zea Mays
acgccttggccggccggaacgcccgcaaccgacgaaatgccgacgccggcgccggcccttcctttcgtcccgaagccgcaacccatccttcacgtcgctaaagccctggtcccatcccctcgccagacgcagccccaggcccgagggcgaggcctaccgcagccggtcaattgtgccaactccaagcgcctcgacgacgcactctccgctggcttcgtccgccttctcaacgccggccaagtacaggatgcggactctgctagcggaacctgccggcgctatgaccccaagccgggtgacttcgcggtcggggtcgtagtttctggcacggaggcgcgcctcgacgttgcggtcggcgccgaccgtctcgccacgctgctctccaaggagcttctcccgctcgaccgcgacagttctgacccgccgacgcgacaagctctgcctcggctggggagcatcggcgtcgtggcgggcccctccgtggacgacgacagacagaagcgcgggagcaggacgctggtggcgcccgggacggtagtattcgctgaggtgcttggacggacgcttagcgggcgtccactactgtcggcacggcggctcttccggcgcctcgcatggcaccgcgccaggcagattctgcaactcaacgagccaattgaggtaaaaatttacgagtggaacaccggggggctactcacaagaattgaggtcggttgcagcattcgtgtgtgcattgcaaggctcgatgaagaaactaacgacctgataattagtgagaagaaagcatgggaaatgacttatcttaaagaaggaaccctcctacaagggactgtttgcaagatttttccgtatggtgcgcgggttaggattgctgggacaaacagaagtggcttacttcacatatcgaatattagtcgaggcaatgttttgtccgtaagtgacatcctgaagatagatgatgaggtgaaagttatcgtgatcaagtcaaatgtcccagacaaaattgcagtgagcatagcagaccttgagagtgcacctggtttgtttctgtcagacagagagaaagtgttctcggaagcagaggagatggcaaagagatacagggagcagcttccagttacccctcagaaccctatattagatgatggccttccaggagaaaagctaccatttgataacgaaactaaactgtatgcaaactggcaatggttcaaatttctgcatcatagctaagctgctgacaacagcgacagagacatatctggtacttgttgaccatgcaaaggtgaactgtcgctagagaacctgccaacctgttgaagtccaatactgaccagtggtgggtagttctccacttccataacccagcatcagtcatggagaagtatgttggacaggaacaggcaacttcatcccgcagacaagatagggtacaaggtttccaggctgcagaacattggtgtttcgaattgcctcattcctagtgcccctggagtgaaatgttgtgatatcattttatctgtccggagaatgtagcttcattgcattcatgttatgtcaaaactagtcgggctgcccaagcactccgtgccaacaacttgcatctgcccatgaaatagattctgaaattttagcaccgtgtccctggattgctgaagtatcgtgatgggcgcaagggagtacctgaattattatgtacactctacctggctagtcacaactggcagtcctgttagacaaaattggagtccaggaaaagaggaggaagattatgggcttggcccctgcccagccggtttgccaaaagccagttgccctctaagtatagatgtccaaatgg

SEQ ID NO: 37329 - DNA, 2104 bp, Zea Mays
gccagaaggaaagaaacggctagatggaggcgaggaactcacctggctgatgatggcagcgcgggcgagcaggtggtccttgtagaggaggaagaaccccgccgccgaagccgtcgccgcgccggcagcaaatgaagacagccgcaccctccacagaaaagaaatatcgtttcggataaagtaactgcacgccttggccggccggaacgcccgcaaccgacgaaatgccgacgccggcgccggcccttcctttcgtcccgaagccgcaacccatccttcacgtcgctaaagccctggtcccatcccctcgccagacgcagccccaggcccgagggcgaggcctaccgcagccggtcaattgtgccaactccaagcgcctcgacgacgcactctccgctggcttcgtccgccttctcaacgccggccaagtacaggatgcggactctgctagcggaacctgccggcgctatgaccccaagccgggtgacttcgcggtcggggtcgtagtttctggcacggaggcgcgcctcgacgttgcggtcggcgccgaccgtctcgccacgctgctctccaaggagcttctcccgctcgaccgcgacagttctgacccgccgacgcgacaagctctgcctcggctggggagcatcggcgtcgtggcgggcccctccgtggacgacgacagacagaagcgcgggagcaggacgctggtggcgcccgggacggtagtattcgctgaggtgcttggacggacgcttagcgggcgtccactactgtcggcacggcggctcttccggcgcctcgcatggcaccgcgccaggcagacagattctgcaactcaacgagccaattgaggtaaaaatttacgagtggaacaccggggggctactcacaagaattgagggtctgagagcatttcttccaaaatttgagctcgtggacaggataagttcatttacagacttgaaaaataaagtcggttgcagcattcgtgtgtgcattgcaaggctcgatgaagaaactaacgacctgataattagtgagaagaaagcatgggaaatgacttatcttaaagaaggaaccctcctacaagggactgtttgcaagatttttccgtatggtgcgcgggttaggattgctgggacaaacagaagtggcttacttcacatatcgaatattagtcgaggcaatgttttgtccgtaagtgacatcctgaagatagatgatgaggtgaaagttatcgtgatcaagtcaaatgtcccagacaaaattgcagtgagcatagcagaccttgagagtgcacctggtttgtttctgtcagacagagagaaagtgttctcggaagcagaggagatggcaaagagatacagggagcagcttccagttacccctcagaaccctatattagatgatggccttccaggagaaaagctaccatttgataacgaaactaaactgtatgcaaactggcaatggttcaaatttctgcatcatagctaagctgctgacaacagcgacagagacatatctggtacttgttgaccatgcaaaggtgaactgtcgctagagaacctgccaacctgttgaagtccaatactgaccagtggtgggtagttctccacttccataacccagcatcagtcatggagaagtatgttggacaggaacaggcaacttcatcccgcagacaagatagggtacaaggtttccaggctgcagaacattggtgtttcgaattgcctcattcctagtgcccctggagtgaaatgttgtgatatcattttatctgtccggagaatgtagcttcattgcattcatgttatgtcaaaactagtcgggctgcccaagcactccgtgccaacaacttgcatctgcccatgaaatagattctgaaattttagcaccgtgtccctggattgctgaagtatcgtgatgggcgcaagggagtacctgaattattatgtacactctacctggctagtcacaactggcagtcctgttagacaaaattggagtccaggaaaagaggaggaagattatgggcttggcccctgcccagccggtttgccaaaagccagttgccctctaagtatagatgtccaaatgg

SEQ ID NO: 37330 - DNA, 827 bp, Zea Mays
agataataaaataaggctatgaaatgataggggcaatatggtccatttgcttgtgaggaaaagctctaccagtggatcttgaggaagcacgatgaagaggctaggctcactgtggctgaaataatgtctcatatccagcatgagatagactatgtaggtactgatgcacatgtctccccaagagtacctcagcatcctcagattgcaaatccattcgccaattcagttgtcccacctggaactggtttgtatgggcaatcagcagctgggtttgctcctagacccagtgtcactgaccagtcgaagaatacaatattctctaatgccttatcaagcccagtgcgcaggagtctccagaactctcataccactcaaggtgctggcaatggaggccggaatgcagaagcaaacttagcaggtgcaaatagagaggccaattctacaagctccaacgacacttctatggatatggtttcagacacgaatgaattctaccagtgatttgcagtaagatgcttctgcaatcaagcagcatcgcatgccagtgttttttttgggcctttcctttcgttgaggttttcacataaactctcaccattatgtgagcaatgtagttgtatatccggtgattctggtttgttcaagttggtatttaagttgaaacgtgttgggcatgctttattccccacaatgtgttcgtgagttcaaatattatgaatgtacatgcagattgcgttgtgatataatctgatacaggaagttgactgaacttgttgaaacttcttctcaatgcggggcagcagaacattatagaagagtaaaaggca

SEQ ID NO: 37331 - DNA, 796 bp, Zea Mays
aaactatgcagtgtagtactccgaaggaaaagctctaccagtggatcttgaggaagcacgatgaagaggctaggctcactgtggctgaaataatgtctcatatccagcatgagatagactatgtaggtactgatgcacatgtctccccaagagtacctcagcatcctcagattgcaaatccattcgccaattcagttgtcccacctggaactggtttgtatgggcaatcagcagctgggtttgctcctagacccagtgtcactgaccagtcgaagaatacaatattctctaatgccttatcaagcccagtgcgcaggagtctccagaactctcataccactcaaggtgctggcaatggaggccggaatgcagaagcaaacttagcaggtgcaaatagagaggccaattctacaagctccaacgacacttctatggatatggtttcagacacgaatgaattctaccagtgatttgcagtaagatgcttctgcaatcaagcagcatcgcatgccagtgttttttttgggcctttcctttcgttgaggttttcacataaactctcaccattatgtgagcaatgtagttgtatatccggtgattctggtttgttcaagttggtatttaagttgaaacgtgttgggcatgctttattccccacaatgtgttcgtgagttcaaatattatgaatgtacatgcagattgcgttgtgatataatctgatacaggaagttgactgaacttgttgaaacttcttctcaatgcggggcagcagaacattatagaagagtaaaaggca

SEQ ID NO: 37332 - DNA, 136 bp, Zea Mays
caacgtgcaatatgaaattttctatataccatatcaagggggcaaacgtaccttccgttggaaatctcattcttgggcaagaacccgaagaacggaccctggtcggcctcctccagcttcttcttcttgaagtact

SEQ ID NO: 37333 - DNA, 3752 bp, Zea Mays
agaccgatttgtgtcgcagagtcccgatatatgggtcatgcacgggtgaaagcccagaatatggtcgactttaggtggtctgttggagaaaatatggatcacaaatcgtgtctatttacaacctattttgggtttaagttggatttggatcctttgttggactcagtctcacgcatctgttccgacacccatgcaccggaaggtaagggtgccgccattacctcacctcacgctccgctgcgcctcttcctcttcagccgctgcctccgtttccccgccgccacctagacgcctccctcctcccgtcccactctgcgacctccttgctcaccgtctcgggcctcctcgctcgccgctctcacctccaccgcctcgccctcacgccgacctcctccccctgctccgccgcggcggcgacgccaactctccggaaaacctccacgtcgagctcatcaagcggggcctcaatcatgacctcttcttatgcaaccatctcgtcaactcctacgccaagggcgcgcgcctggctgccgcgagccaggtgttcgacgaaatgcccgagcggaacgccgtctcctggacctgcctcgtctccgggtacgtgctgcatggaatcgccgaagaggccttccgggtgttccgcgccatgctgagggaggtgcaggctgggtgcaggcccacgtccttcaccttcgggaccttgctccgggcgtgccaggatgggggacccgaccgtctgggcttcgcagtccaggtccatgggttggtgtcgaagacggagtatgcgtcaaatactactgtgtgcaatgccctgatctcaatgtatggtagctgcactgttggcccgccgatcctagcgcagcgggtgtttgatggcacgccgatcagggacttgatcacatggaacgcattgatgtctgtttatgctaagaaaggtgatgtggcttcaacgttcacactgttcaaggatatgcagcgaggtgattccaggattcagctgcgtccgacagagcatacctttggcagtttgatcactgctgcatctctgtcatcaggcagctcggctgtgcttgaccaagtattggtgtgggtgctcaaatctggctgttctagtgacctctatgtgggtagtgctctggttagcgcttttgctagacatggcttgactgatgaagctaaggacatatttctcagtctgaaacagaagaatgcagttaccttaaacggtttgatagttgggttggtcaggcaagacttcagtgaagaagcagtgaagatttttgtggggacaaggaatactgttgatgttaacgcagatacatatgttgtattgctcagtgcattagctgagtattctatatctgaagaagggctgaggataggtagggtagtccacgggcatatgcttagaactggacttactgatctaaaaatcgctgttagtaatggactggttaatatgtatgccaaatgtggtgccatcgagagtgcctctaaaatttttcagttaatggaagcaacggataggatttcctggaacaccatcatctcagctctcgatcagaatggtttgaaacttttaactgctggtcagcaagtgcattgtgatgctgttaagtggggtctagatttagatacttctgtttcaaatgtactggttaaaatgtatggggaatgtggagctatgtcagattactggaaggttttcaactctatggctgaacacgatgaagtttcttggaacactatgatgggtgtcatggccagttcacaaacacctatttctgaaattgtcaaagttttcaacaatatgatgaggggtggtttgatcccaaataaagtaacatttataaacttacttgctgctttgtctccactgtccgttcttgaattggggaagcaagttcatgctgcagtgatgaagcatggagttatggaagataatgtggtagataatgccctcatatcatgctatgcaaaatcaggagatatgggttcctgtgagcatctgtttactaacatgtctgacagaagggatgccatctcgtggaattctatgatttcaggttacatctacaatggcaatctacaggaggctatggattgtgtatggcttatgatacacagtggccaaatcatggattgttgcactttctccattatactcaatgcatgtgcttctgtggcagcattggagcgtggaatggagttgcatgcttttggtattaggtcacacttggaatcagatgtcgtggttgagagtgctcttgttgatatgtactccaagtgtggtagggtggattatgcctctaagcttttcaattctatgactcagagaaatgaattttcatggaattctatgatttctggttatgcaagacatggtcttggaaggaaagccattgagatatttgaggaaatgctgcgcagcagagagagtccagaccatgtcacttttgtcagtgtcctatctgcctgcagtcatgctggattggtggaaagaggtttagaatacttcgaaatgatgccggatcatggtatactaccacagattgaacattattcttgtgtcatagaccttctcggtcgagctggtaagattgacaagataaaggagtacattcaaagaatgccaattgaacctaacgctctcatatggaggactgttttagttgcttgtcgacaatcaaaagacgggtctaacattgatctggggagagaagcttcaagggtgcttttggaaatagagcctcaaaatcctgtaaactatgttctggcatctaactttcatgcagctacaggaatgtgggaagatacagccaaagcccgaactgcaatgaggcaagcgacagagaaaaaggaggctggtcgcagttgggtaaccctaaatgatggagtccatactttcatcgctggtgatagatcacatccaaacaccaaagaaatatatgaaaaactgaattttttgatacagaatataagaaatgctggttatgttcccctgacagagtatgccttgtatgatcttgaagaagaaaacaaagaagagctgttgagctatcatagtgagaagctagccattgcctttgttctgactcgttcctcaagtggcccaataagaataatgaagaaccttcgggtttgcggagattgtcacatagcatttcgatacatttctcagatgattagccggcaaatcattttaagggattctatccgatttcatcatttcaaagatgggaagtgttcttgtggagattactggtaactgatttgaaaggttggtttagcaccagttcctaacatttcaggtcataccacattgccagatgctaggtgttgtcttttcatgactgtccttgggctgcccaacatagcagcttttggtcatcactagatcaggctggtgcgctccagtgcgccagaacaggcgagcaccagaacaggcgagcaccagaacaggcgaaaagtactggaaagagcgataaacagcgatcgttacagggaggcagtactgaacacggcagggtcacgtgtcactccgcctaggcgtcctagcacacgtgaagttctttgtgttgtctacagcctagacatgctggtgtctctgttggcagatgcttggaattttgaagtgttcggttcatgagaaggggggcaaacgtaccttccgttggaaatctcattcttgggcaagaacccgaagaacggaccctggtcggcctcctccagcttcttcttcttgaagtact

SEQ ID NO: 37334 - DNA, 3807 bp, Zea Mays
agaccgatttgtgtcgcagagtcccgatatatgggtcatgcacgggtgaaagcccagaatatggtcgactttaggtggtctgttggagaaaatatggatcacaaatcgtgtctatttacaacctattttgggtttaagttggatttggatcctttgttggactcagtctcacgcatctgttccgacacccatgcaccggaaggtaagggtgccgccattacctcacctcacgctccgctgcgcctcttcctcttcagccgctgcctccgtttccccgccgccacctagacgcctccctcctcccgtcccactctgcgacctccttgctcaccgtctcgggcctcctcgctcgccgctctcacctccaccgcctcgccctcacgccgacctcctccccctgctccgccgcggcggcgacgccaactctccggaaaacctccacgtcgagctcatcaagcggggcctcaatcatgacctcttcttatgcaaccatctcgtcaactcctacgccaagggcgcgcgcctggctgccgcgagccaggtgttcgacgaaatgcccgagcggaacgccgtctcctggacctgcctcgtctccgggtacgtgctgcatggaatcgccgaagaggccttccgggtgttccgcgccatgctgagggaggtgcaggctgggtgcaggcccacgtccttcaccttcgggaccttgctccgggcgtgccaggatgggggacccgaccgtctgggcttcgcagtccaggtccatgggttggtgtcgaagacggagtatgcgtcaaatactactgtgtgcaatgccctgatctcaatgtatggtagctgcactgttggcccgccgatcctagcgcagcgggtgtttgatggcacgccgatcagggacttgatcacatggaacgcattgatgtctgtttatgctaagaaaggtgatgtggcttcaacgttcacactgttcaaggatatgcagcgaggtgattccaggattcagctgcgtccgacagagcatacctttggcagtttgatcactgctgcatctctgtcatcaggcagctcggctgtgcttgaccaagtattggtgtgggtgctcaaatctggctgttctagtgacctctatgtgggtagtgctctggttagcgcttttgctagacatggcttgactgatgaagctaaggacatatttctcagtctgaaacagaagaatgcagttaccttaaacggtttgatagttgggttggtcaggcaagacttcagtgaagaagcagtgaagatttttgtggggacaaggaatactgttgatgttaacgcagatacatatgttgtattgctcagtgcattagctgagtattctatatctgaagaagggctgaggataggtagggtagtccacgggcatatgcttagaactggacttactgatctaaaaatcgctgttagtaatggactggttaatatgtatgccaaatgtggtgccatcgagagtgcctctaaaatttttcagttaatggaagcaacggataggatttcctggaacaccatcatctcagctctcgatcagaatggtaactgtgaagaagcagttatgcattactctcttatgagacaaagttgcataagcccatcaaattttgcactaatcagttccttgagttcatgtgcaggtttgaaacttttaactgctggtcagcaagtgcattgtgatgctgttaagtggggtctagatttagatacttctgtttcaaatgtactggttaaaatgtatggggaatgtggagctatgtcagattactggaaggttttcaactctatggctgaacacgatgaagtttcttggaacactatgatgggtgtcatggccagttcacaaacacctatttctgaaattgtcaaagttttcaacaatatgatgaggggtggtttgatcccaaataaagtaacatttataaacttacttgctgctttgtctccactgtccgttcttgaattggggaagcaagttcatgctgcagtgatgaagcatggagttatggaagataatgtggtagataatgccctcatatcatgctatgcaaaatcaggagatatgggttcctgtgagcatctgtttactaacatgtctgacagaagggatgccatctcgtggaattctatgatttcaggttacatctacaatggcaatctacaggaggctatggattgtgtatggcttatgatacacagtggccaaatcatggattgttgcactttctccattatactcaatgcatgtgcttctgtggcagcattggagcgtggaatggagttgcatgcttttggtattaggtcacacttggaatcagatgtcgtggttgagagtgctcttgttgatatgtactccaagtgtggtagggtggattatgcctctaagcttttcaattctatgactcagagaaatgaattttcatggaattctatgatttctggttatgcaagacatggtcttggaaggaaagccattgagatatttgaggaaatgctgcgcagcagagagagtccagaccatgtcacttttgtcagtgtcctatctgcctgcagtcatgctggattggtggaaagaggtttagaatacttcgaaatgatgccggatcatggtatactaccacagattgaacattattcttgtgtcatagaccttctcggtcgagctggtaagattgacaagataaaggagtacattcaaagaatgccaattgaacctaacgctctcatatggaggactgttttagttgcttgtcgacaatcaaaagacgggtctaacattgatctggggagagaagcttcaagggtgcttttggaaatagagcctcaaaatcctgtaaactatgttctggcatctaactttcatgcagctacaggaatgtgggaagatacagccaaagcccgaactgcaatgaggcaagcgacagagaaaaaggaggctggtcgcagttgggtaaccctaaatgatggagtccatactttcatcgctggtgatagatcacatccaaacaccaaagaaatatatgaaaaactgaattttttgatacagaatataagaaatgctggttatgttcccctgacagagtatgccttgtatgatcttgaagaagaaaacaaagaagagctgttgagctatcatagtgagaagctagccattgcctttgttctgactcgttcctcaagtggcccaataagaataatgaagaaccttcgggtttgcggagattgtcacatagcatttcgatacatttctcagatgattagccggcaaatcattttaagggattctatccgatttcatcatttcaaagatgggaagtgttcttgtggagattactggtaactgatttgaaaggttggtttagcaccagttcctaacatttcaggtcataccacattgccagatgctagcttttggtcatcactagatcaggctggtgcgctccagtgcgccagaacaggcgagcaccagaacaggcgagcaccagaacaggcgaaaagtactggaaagagcgataaacagcgatcgttacagggaggcagtactgaacacggcagggtcacgtgtcactccgcctaggcgtcctagcacacgtgaagttctttgtgttgtctacagcctagacatgctggtgtctctgttggcagatgcttggaattttgaagtgttcggttcatgagaaggggggcaaacgtaccttccgttggaaatctcattcttgggcaagaacccgaagaacggaccctggtcggcctcctccagcttcttcttcttgaagtact

SEQ ID NO: 37335 - DNA, 3754 bp, Zea Mays
agaccgatttgtgtcgcagagtcccgatatatgggtcatgcacgggtgaaagcccagaatatggtcgactttaggtggtctgttggagaaaatatggatcacaaatcgtgtctatttacaacctattttgggtttaagttggatttggatcctttgttggactcagtctcacgcatctgttccgacacccatgcaccggaaggtaagggtgccgccattacctcacctcacgctccgctgcgcctcttcctcttcagccgctgcctccgtttccccgccgccacctagacgcctccctcctcccgtcccactctgcgacctccttgctcaccgtctcgggcctcctcgctcgccgctctcacctccaccgcctcgccctcacgccgacctcctccccctgctccgccgcggcggcgacgccaactctccggaaaacctccacgtcgagctcatcaagcggggcctcaatcatgacctcttcttatgcaaccatctcgtcaactcctacgccaagggcgcgcgcctggctgccgcgagccaggtgttcgacgaaatgcccgagcggaacgccgtctcctggacctgcctcgtctccgggtacgtgctgcatggaatcgccgaagaggccttccgggtgttccgcgccatgctgagggaggtgcaggctgggtgcaggcccacgtccttcaccttcgggaccttgctccgggcgtgccaggatgggggacccgaccgtctgggcttcgcagtccaggtccatgggttggtgtcgaagacggagtatgcgtcaaatactactgtgtgcaatgccctgatctcaatgtatggtagctgcactgttggcccgccgatcctagcgcagcgggtgtttgatggcacgccgatcagggacttgatcacatggaacgcattgatgtctgtttatgctaagaaaggtgatgtggcttcaacgttcacactgttcaaggatatgcagcgaggtgattccaggattcagctgcgtccgacagagcatacctttggcagtttgatcactgctgcatctctgtcatcaggcagctcggctgtgcttgaccaagtattggtgtgggtgctcaaatctggctgttctagtgacctctatgtgggtagtgctctggttagcgcttttgctagacatggcttgactgatgaagctaaggacatatttctcagtctgaaacagaagaatgcagttaccttaaacggtttgatagttgggttggtcaggcaagacttcagtgaagaagcagtgaagatttttgtggggacaaggaatactgttgatgttaacgcagatacatatgttgtattgctcagtgcattagctgagtattctatatctgaagaagggctgaggataggtagggtagtccacgggcatatgcttagaactggacttactgatctaaaaatcgctgttagtaatggactggttaatatgtatgccaaatgtggtgccatcgagagtgcctctaaaatttttcagttaatggaagcaacggataggatttcctggaacaccatcatctcagctctcgatcagaatggtaactgtgaagaagcagttatgcattactctcttatgagacaaagttgcataagcccatcaaattttgcactaatcagttccttgagttcatgtgcaggtttgaaacttttaactgctggtcagcaagtgcattgtgatgctgttaagtggggtctagatttagatacttctgtttcaaatgtactggttaaaatgtatggggaatgtggagctatgtcagattactggaaggttttcaactctatggctgaacacgatgaagtttcttggaacactatgatgggtgtcatggccagttcacaaacacctatttctgaaattgtcaaagttttcaacaatatgatgaggggtggtttgatcccaaataaagtaacatttataaacttacttgctgctttgtctccactgtccgttcttgaattggggaagcaagttcatgctgcagtgatgaagcatggagttatggaagataatgtggtagataatgccctcatatcatgctatgcaaaatcaggagatatgggttcctgtgagcatctgtttactaacatgtctgacagaagggatgccatctcgtggaattctatgatttcaggttacatctacaatggcaatctacaggaggctatggattgtgtatggcttatgatacacagtggccaaatcatggattgttgcactttctccattatactcaatgcatgtgcttctgtggcagcattggagcgtggaatggagttgcatgcttttggtattaggtcacacttggaatcagatgtcgtggttgagagtgctcttgttgatatgtactccaagtgtggtagggtggattatgcctctaagcttttcaattctatgactcagagaaatgaattttcatggaattctatgatttctggttatgcaagacatggtcttggaaggaaagccattgagatatttgaggaaatgctgcgcagcagagagagtccagaccatgtcacttttgtcagtgtcctatctgcctgcagtcatgctggattggtggaaagaggtttagaatacttcgaaatgatgccggatcatggtatactaccacagattgaacattattcttgtgtcatagaccttctcggtcgagctggtaagattgacaagataaaggagtacattcaaagaatgccaattgaacctaacgctctcatatggaggactgttttagttgcttgtcgacaatcaaaagacgggtctaacattgatctggggagagaagcttcaagggtgcttttggaaatagagcctcaaaatcctgtaaactatgttctggcatctaactttcatgcagctacaggaatgtgggaagatacagccaaagcccgaactgcaatgaggcaagcgacagagaaaaaggaggctggtcgcagttgggtaaccctaaatgatggagtccatactttcatcgctggtgatagatcacatccaaacaccaaagaaatatatgaaaaactgaattttttgatacagaatataagaaatgctggttatgttcccctgacagagtatgccttgtatgatcttgaagaagaaaacaaagaagagctgttgagctatcatagtgagaagctagccattgcctttgttctgactcgttcctcaagtggcccaataagaataatgaagaaccttcgggtttgcggagattgtcacatagcatttcgatacatttctcagatgattagccggcaaatcattttaagggattctatccgatttcatcatttcaaagatgggaagtgttcttgtggagattactggtaactgatttgaaagcagcttttggtcatcactagatcaggctggtgcgctccagtgcgccagaacaggcgagcaccagaacaggcgagcaccagaacaggcgaaaagtactggaaagagcgataaacagcgatcgttacagggaggcagtactgaacacggcagggtcacgtgtcactccgcctaggcgtcctagcacacgtgaagttctttgtgttgtctacagcctagacatgctggtgtctctgttggcagatgcttggaattttgaagtgttcggttcatgagaaggggggcaaacgtaccttccgttggaaatctcattcttgggcaagaacccgaagaacggaccctggtcggcctcctccagcttcttcttcttgaagtact

SEQ ID NO: 37336 - DNA, 3810 bp, Zea Mays
agaccgatttgtgtcgcagagtcccgatatatgggtcatgcacgggtgaaagcccagaatatggtcgactttaggtggtctgttggagaaaatatggatcacaaatcgtgtctatttacaacctattttgggtttaagttggatttggatcctttgttggactcagtctcacgcatctgttccgacacccatgcaccggaaggtaagggtgccgccattacctcacctcacgctccgctgcgcctcttcctcttcagccgctgcctccgtttccccgccgccacctagacgcctccctcctcccgtcccactctgcgacctccttgctcaccgtctcgggcctcctcgctcgccgctctcacctccaccgcctcgccctcacgccgacctcctccccctgctccgccgcggcggcgacgccaactctccggaaaacctccacgtcgagctcatcaagcggggcctcaatcatgacctcttcttatgcaaccatctcgtcaactcctacgccaagggcgcgcgcctggctgccgcgagccaggtgttcgacgaaatgcccgagcggaacgccgtctcctggacctgcctcgtctccgggtacgtgctgcatggaatcgccgaagaggccttccgggtgttccgcgccatgctgagggaggtgcaggctgggtgcaggcccacgtccttcaccttcgggaccttgctccgggcgtgccaggatgggggacccgaccgtctgggcttcgcagtccaggtccatgggttggtgtcgaagacggagtatgcgtcaaatactactgtgtgcaatgccctgatctcaatgtatggtagctgcactgttggcccgccgatcctagcgcagcgggtgtttgatggcacgccgatcagggacttgatcacatggaacgcattgatgtctgtttatgctaagaaaggtgatgtggcttcaacgttcacactgttcaaggatatgcagcgaggtgattccaggattcagctgcgtccgacagagcatacctttggcagtttgatcactgctgcatctctgtcatcaggcagctcggctgtgcttgaccaagtattggtgtgggtgctcaaatctggctgttctagtgacctctatgtgggtagtgctctggttagcgcttttgctagacatggcttgactgatgaagctaaggacatatttctcagtctgaaacagaagaatgcagttaccttaaacggtttgatagttgggttggtcaggcaagacttcagtgaagaagcagtgaagatttttgtggggacaaggaatactgttgatgttaacgcagatacatatgttgtattgctcagtgcattagctgagtattctatatctgaagaagggctgaggataggtagggtagtccacgggcatatgcttagaactggacttactgatctaaaaatcgctgttagtaatggactggttaatatgtatgccaaatgtggtgccatcgagagtgcctctaaaatttttcagttaatggaagcaacggataggatttcctggaacaccatcatctcagctctcgatcagaatggtaactgtgaagaagcagttatgcattactctcttatgagacaaagttgcataagcccatcaaattttgcactaatcagttccttgagttcatgtgcaggtttgaaacttttaactgctggtcagcaagtgcattgtgatgctgttaagtggggtctagatttagatacttctgtttcaaatgtactggttaaaatgtatggggaatgtggagctatgtcagattactggaaggttttcaactctatggctgaacacgatgaagtttcttggaacactatgatgggtgtcatggccagttcacaaacacctatttctgaaattgtcaaagttttcaacaatatgatgaggggtggtttgatcccaaataaagtaacatttataaacttacttgctgctttgtctccactgtccgttcttgaattggggaagcaagttcatgctgcagtgatgaagcatggagttatggaagataatgtggtagataatgccctcatatcatgctatgcaaaatcaggagatatgggttcctgtgagcatctgtttactaacatgtctgacagaagggatgccatctcgtggaattctatgatttcaggttacatctacaatggcaatctacaggaggctatggattgtgtatggcttatgatacacagtggccaaatcatggattgttgcactttctccattatactcaatgcatgtgcttctgtggcagcattggagcgtggaatggagttgcatgcttttggtattaggtcacacttggaatcagatgtcgtggttgagagtgctcttgttgatatgtactccaagtgtggtagggtggattatgcctctaagcttttcaattctatgactcagagaaatgaattttcatggaattctatgatttctggttatgcaagacatggtcttggaaggaaagccattgagatatttgaggaaatgctgcgcagcagagagagtccagaccatgtcacttttgtcagtgtcctatctgcctgcagtcatgctggattggtggaaagaggtttagaatacttcgaaatgatgccggatcatggtatactaccacagattgaacattattcttgtgtcatagaccttctcggtcgagctggtaagattgacaagataaaggagtacattcaaagaatgccaattgaacctaacgctctcatatggaggactgttttagttgcttgtcgacaatcaaaagacgggtctaacattgatctggggagagaagcttcaagggtgcttttggaaatagagcctcaaaatcctgtaaactatgttctggcatctaactttcatgcagctacaggaatgtgggaagatacagccaaagcccgaactgcaatgaggcaagcgacagagaaaaaggaggctggtcgcagttgggtaaccctaaatgatggagtccatactttcatcgctggtgatagatcacatccaaacaccaaagaaatatatgaaaaactgaattttttgatacagaatataagaaatgctggttatgttcccctgacagagtatgccttgtatgatcttgaagaagaaaacaaagaagagctgttgagctatcatagtgagaagctagccattgcctttgttctgactcgttcctcaagtggcccaataagaataatgaagaaccttcgggtttgcggagattgtcacatagcatttcgatacatttctcagatgattagccggcaaatcattttaagggattctatccgatttcatcatttcaaagatgggaagtgttcttgtggagattactggtaactgatttgaaaggttggtttagcaccagttcctaacatttcaggtcataccacattgccagatgctagcagcttttggtcatcactagatcaggctggtgcgctccagtgcgccagaacaggcgagcaccagaacaggcgagcaccagaacaggcgaaaagtactggaaagagcgataaacagcgatcgttacagggaggcagtactgaacacggcagggtcacgtgtcactccgcctaggcgtcctagcacacgtgaagttctttgtgttgtctacagcctagacatgctggtgtctctgttggcagatgcttggaattttgaagtgttcggttcatgagaaggggggcaaacgtaccttccgttggaaatctcattcttgggcaagaacccgaagaacggaccctggtcggcctcctccagcttcttcttcttgaagtact

SEQ ID NO: 37337 - DNA, 1059 bp, Zea Mays
ccagaaacttcacgtacaggtgcagatcagcaggtacagagcacagaggcacgtcctggttgttgtcggcgtcaggtgcctacggcggcgtcaaatgatggggaggcaacctgcggcaacaaagcagagggcacactgttggattggagcttgcttgcaatgcaatacgaggagcagagcaggtgtctccatggatgcaagccaggatgtgttggactgggactgggaggtggtcatgccagaccacaggagcttctccacgagccaaagccatggcagcaagaatcttgacgacaaagaaacagaggagcatgatctgctgtctccgtcgggaaactttgatgatgtgcaagtcgagtgcaaggacatcggcgtcgtgctggatgagacctgcaaatccgtcgtgcctagtgttgtcgatccgataatggctcctgacggtggcgaggaagagaaggcgatccagagccctgatccgataatggctcccgacggcaagtttgctcaagaggaggaggaggatgaagaagatatcaaggacggcgacgataaggttggagccctgatcggcgcgctgtgctcgtttggggtcgcagccgccaccgcctgcgtctttctcatcggcggcaggctgcatcatcaccacacgcagcaccacaaatttcagctgcagttcttcggcgatgataagaggatccagcaagttgtgcgccagacgtcaaggctgaaccagaaggccatgtcgtttgcgatgggggcaggagcgtcacgacattttggaagggcacgtgtaaaacgtagcaaaaacattaattactaatatgtatatatatgtaatatgtatatacataataatatatatattgttcgtcaccctaaataaaacttcatcagagcgtcttcagtaattaccggtaataactaaatattgttcagtcattaccggtaataactaaatattgttcagtcattaccggtaatctacctttacctctatataaagcaacacttcaaacttttaaataaatgcactcaaaatcttcacaactttaaaacaag

SEQ ID NO: 37338 - DNA, 1909 bp, Zea Mays
aacgcaactgcctcataactgagtgaaggaacaaggaaacatgttcacatcaggacagctattcaccatcctcaaaattgtgtaccttcagtaatttctacaggacagtcagaagtgaaacaaggagagtcacttgcaatggatgtacagtaagttttagaaacaaacatctcttggttcaactgtagacatgtcaaataaagaataagaagacaatgtgccaagctatcagagcttccaacaacagctacgacaatatgccttcaacaaacaattatcctactaaaatttctgaaaaagtactattttacccaaaaaatacagaaatgaaattgtgtagactactactaggaacctacaagagaaaggtggagcacagagttcatgtaccaatgaaacgaaatgtatctggaaaggagaaggcaatggtacaacaaaaaaaaaatctacatcagtcgaaagagtcaccataccatctagtacttgctcagttcatgcattcgcctatcaaacattggtcaaatagcttggacaaaaggaagccatccacccaaaatatattggctttgcaatgtgagatcaagataacctcactggacccacgttgggcttagcgggggcacaggcccccactcaattttctagtttcagtggacattttagtgtagctacaaaggtctagtagtcatttagcctctatttaggcccccactcaaatgttggactgggtccgcccctgctcactgaagcagcataggcccttgtattttcataattaatggaagtgagattataaacattgatgtttagcgatcaaaaagctgaaagttcaaacccaatatggaaatgggagaatttgcaccctccgaaaaaaaacagaagtatgaaactcttattcaaccattttaaacaatgaaggtcaagttttacccgtgctccaataaccatattagaagctactagtttcatcagtgatcactttcgaagtacaaagttgctcgaattatgtagacctgcaacacttgcacaagagaaattgcttggtcagcattattataatcatagattcctccaacttagtccttaagaaaaacagatgttactggaacatgatagataagaagccatgataacaactgatctgataactggaaacaattgaagtaaatttgtacaaagaccaagtttgaaacaagacatttttatttctttctaaaggatatttgattctgtaaatttcagttattgttattcagttccctttaataatcagcggccatgcaagttctatagatgattcatacacgttattgcaatgcaaaatagatctcaatcaccttgaactttgtccgctcaatcagttggaagaccaagcaatctccatcaagcagcttgtgctggatggcgaactctttccatccagtgctgaggccagcctgcattgcaaggtagaacgtgtctgactcgtcatcctcctcatccaccaaggtgatcgtctcatcactcttaggcaggtgctcccggcagaaatgcttcgggaggccctgcgttttcacaagcccaccaaataagaatttacctcgatgtggggtgaattaacaatcgaaaacaacaggacgtgccgaactgaagcctcctctactttaccagccagaagcctccggagacatgggacagtgtcatgggctgggtgaagatggggaagctggagcccagctcttgcaccagctcctcagccttagagatggcgtagctcctctcctcgtccgaatcctggatcagattgttttcaaaaccgcgatgtgttctacgaagtacagggagagaagatgaaaaaattagtaatttctatgaagctgaccctttgacactgacctcgtggtacatgggcttcttggggaggttggcg

SEQ ID NO: 37339 - DNA, 1683 bp, Zea Mays
ctttctcatactgaggacatgagccaaggatttctcccaccaaccaaagaaggaagtctccacttgctgaggggataagctgtgcaacccaaactttctcaaaagattgtatagcaccaccagcaaacaaacacatgcttaaagagaagctatcagatttggctgccagtgcacaagatgagtgcccacaaatcacattatcaggaaattcaaccatgagaagaagtaacttcatgaagttggctcagatcactcctgctaatcgttcaacccttactacaaaacacaactttgtgtctacatctacgaagcacaacctcccagaagaccagctgtcacaggataccaatgttgatattactgttgacttggcaatacaagggcatttgaaggaacataccttcaagtctttagggcttaagaaagctaaaacaatggacagatccaaagatgctgttgttttagatgacgtctcttcaaaattgcctcaaaatatagggtcaagagctttggccagataccaatgtggtggacctacacctgaatcaaagaaaagcactatagcaacagcatgcggaaagaatgatggggcctgtgaaaaaactgaaggccaggaatctaactcagggccagccttcttgaagctggttcaagaaaagcttagtcctgcagagtacacagagtttgttgaatacatgaaggccttaaaattgaaaactatgcataccaaggactcacttgaagcaataactaagcttttttcgtccccaggaagacttccacttcttgaagggttcagggtttttgttgcaaagaaccatcttccattatatgagcagcttgttcgaagacacaataatgtttctagtacatgacaaccacttctgctatgttcgcaggcatattcagtttttttgtttgtgccatgtatttcattaagtgataagtacagttttggttgttttcaacacttaactgtttatcaacggaacattagcagattcttgggtgcatgcaattacttttggaatgtgttatggtgcttctgtaatctaaggaaaagaaatggacctgaaaaaaaaaactctatttaagcttgctaatcatataagtagagtacctattgatcatttcaaatacattgaacatttctttatttggaaacaaaatccggactactataccatttatagttacactgttaatctctagctgccattgggcctgaccagtgctcgacactgtttagcaatccttcatgtttatgccagcatgaacttcaacttttcccctgtttttcctgaaaaataaaggtctatcaaatccctttggcaaaaaggcatcctgttttttctaagtttttgataaccgtagggtttctttggattttttttcatatgataaaatcatgaaacttaatagtggctgggtttagcttactgaatatagatgataaaatttccagaagcagtgctgtatttgcttagatgttactaatttgtggctgtattaccttctctttataaattagaattatgccttaggtaatagaagtacaccattttatgtcactcaagaaacaacagaagtacaccgtttggcgcgtcactcaagaaaggacactccgtgttagattatttaaatgatgaacaggtatgccggacaattgttaggagagttaac

SEQ ID NO: 37340 - DNA, 1641 bp, Zea Mays
aatcgaaatgccatttgtagttcttcatgatgtgctcattatggaaaaggaaattgtgcaaatattgtatagcaccaccagcaaacaaacacatgcttaaagagaagctatcagatttggctgccagtgcacaagatgagtgcccacaaatcacattatcaggaaattcaaccatgagaagaagtaacttcatgaagttggctcagatcactcctgctaatcgttcaacccttactacaaaacacaactttgtgtctacatctacgaagcacaacctcccagaagaccagctgtcacaggataccaatgttgatattactgttgacttggcaatacaagggcatttgaaggaacataccttcaagtctttagggcttaagaaagctaaaacaatggacagatccaaagatgctgttgttttagatgacgtctcttcaaaattgcctcaaaatatagggtcaagagctttggccagataccaatgtggtggacctacacctgaatcaaagaaaagcactatagcaacagcatgcggaaagaatgatggggcctgtgaaaaaactgaaggccaggaatctaactcagggccagccttcttgaagctggttcaagaaaagcttagtcctgcagagtacacagagtttgttgaatacatgaaggccttaaaattgaaaactatgcataccaaggactcacttgaagcaataactaagcttttttcgtccccaggaagacttccacttcttgaagggttcagggtttttgttgcaaagaaccatcttccattatatgagcagcttgttcgaagacacaataatgtttctagtacatgacaaccacttctgctatgttcgcaggcatattcagtttttttgtttgtgccatgtatttcattaagtgataagtacagttttggttgttttcaacacttaactgtttatcaacggaacattagcagattcttgggtgcatgcaattacttttggaatgtgttatggtgcttctgtaatctaaggaaaagaaatggacctgaaaaaaaaaactctatttaagcttgctaatcatataagtagagtacctattgatcatttcaaatacattgaacatttctttatttggaaacaaaatccggactactataccatttatagttacactgttaatctctagctgccattgggcctgaccagtgctcgacactgtttagcaatccttcatgtttatgccagcatgaacttcaacttttcccctgtttttcctgaaaaataaaggtctatcaaatccctttggcaaaaaggcatcctgttttttctaagtttttgataaccgtagggtttctttggattttttttcatatgataaaatcatgaaacttaatagtggctgggtttagcttactgaatatagatgataaaatttccagaagcagtgctgtatttgcttagatgttactaatttgtggctgtattaccttctctttataaattagaattatgccttaggtaatagaagtacaccattttatgtcactcaagaaacaacagaagtacaccgtttggcgcgtcactcaagaaaggacactccgtgttagattatttaaatgatgaacaggtatgccggacaattgttaggagagttaac

SEQ ID NO: 37341 - DNA, 3528 bp, Zea Mays
cgggtcacatcaaacgtttgacttttaaataggagtatgaaatatagacccaaccaactgaactagattcgtctcgtcttttaattttcggctgacaaattagttttataatccgactacatttaatacccggaacggaggttcaaacattcgatgggacatggctaaattttagcgggttgtgcgatacggcccaagtgtggttcagcaacgccgaagaaaaatcagacaagaagcccctccggccctcgccctccctagtccctattcgccgcgcccgcgcccgcgccgtctcgaggtccgccggtctccttccgccgcaagctttgctccattccaccgccgcctcttccgcctccgtcggcaaaatgccggtctacagcatccgcggcgtcaacgtcgacttccccttcgacgcctacgactgccagatcacctacatggaccgcgtcatcgagtccctgcaacaggggaagaacgcgctgctggagagtcctacgggtacggggaagacactgtgcctgctgtgtgcgtcgctcgcgtggcgccgcactttcggcgagttcctgcgggtcgggcgtgggggcggtgggactaagcagttgccctacgggagtcagccgtccgctagccagcagtcagaggactctacgtctcagaagcagcagcagtcgcggtacccagtcatcatctacgcctcacggacccacagccagcttcggcaggttatcaaggagctcaaggctaccagctacaggccgaagatggcagtgctaggttcccgtgagcagatgtgcatccacgacgaagtgagcaaactccatggaagagcacagaacaatgcctgtcacttcctctgcaagaaacgacggtgccctcataataaccatgttgctgagttcataaaaaacaaacctgagcttgggaatgagccttttgatatagaagatttgataaatattgggaggcataagggcccgtgcccatattacatctcccgggaactttcaaagtcggttgatattttgtttgccccttacaactatcttattgatccgggaaaccgtcgttccctaaatggcataccatgggacaatgcagtacttatatttgacgaagcacacaacttggagagtatatgtgcagatgcagcctcttttgatttatttccgaataacctcacagcttgcatagcggaagctcatgaatgcatcaaactgtgttcagcaaagaggtccattgaaaattctgctgataaacaatttgatcctgaaaactatgcaatcctcaaagctcttttaatggcacttgagaaaaaaattgctgagctgttaattggatccgagttgggctacacaaaagctgggagttacatatacgattttctctctgaactgaacattacatcagacacatccaaaaaactgattgagacaattgattgtgcttctttgctactagaggaaggaaattctgctcaaactgggccaggggtccaggcaaaggctgcagtgtctagattggagtcaattagggacatgttagacataatttttaggggtggtggtcaaaaccatgcaaaatattatcgatttcatgtgaacgaatctcaacaaacacatggagatgcattgaaatttttgggtaagtcttcaaggacccttagttggtggtgtttcaacccggggctggcgatggaagaatttctcaagttgggtgtgcgctctatcatattaacctcaggcaccttgtctccgttggattcactagccatggaactaaaccttgaattcccagttagactagaaaatccgcatgtcatttcttcagaccaagtctgggttggagttgtgcctgtcggcccttcgggacatgctcttaattcttcttatcgtacgcgtaatactatacaatataaacaagagttgggcactgcaatagtaaatttcgcacgcattgtgccagacggactccttgttttcttcccttcatattctatgatggacatgtgtgttgacttctggaaaaataggaaccattcaaattcagcgtctgagaacacaatttggcagcggatctgtaagcacaagcagccagttatagagcctaggcagtcatcaaactttcagagtgcaattgaggattatagagccaaattacacgattcttcttctggggcaatattttttgcagtttgtcgtggcaaagttagtgagggtcttgattttgctgatcgtgctgggagggcagtaatagttactggaatgccctttgctactccaactgatgccaaggttcggctcaagcgcgagtatttggataagcaggggacaccatctaataaaaacacaaagatgttgacaggagaagaatggtatgtgcaacaagcagcacgggctgtcaatcaggctgttggacgtgttatcagacatcgccatgactatggagctattatttattgtgatgaaaggtttgtgtggccaaattatcaatctcagatgtcatattggctccgacctcatataaagtgctactcaaagtatggggaagtagtccaaggattgacccgattttttcgagataaagcttcttcagatcctttgacactagagccaacagattgtaataattgtatagcaccaccagcaaacaaacacatgcttaaagagaagctatcagatttggctgccagtgcacaagatgagtgcccacaaatcacattatcaggaaattcaaccatgagaagaagtaacttcatgaagttggctcagatcactcctgctaatcgttcaacccttactacaaaacacaactttgtgtctacatctacgaagcacaacctcccagaagaccagctgtcacaggataccaatgttgatattactgttgacttggcaatacaagggcatttgaaggaacataccttcaagtctttagggcttaagaaagctaaaacaatggacagatccaaagatgctgttgttttagatgacgtctcttcaaaattgcctcaaaatatagggtcaagagctttggccagataccaatgtggtggacctacacctgaatcaaagaaaagcactatagcaacagcatgcggaaagaatgatggggcctgtgaaaaaactgaaggccaggaatctaactcagggccagccttcttgaagctggttcaagaaaagcttagtcctgcagagtacacagagtttgttgaatacatgaaggccttaaaattgaaaactatgcataccaaggactcacttgaagcaataactaagcttttttcgtccccaggaagacttccacttcttgaagggttcagggtttttgttgcaaagaaccatcttccattatatgagcagcttgttcgaagacacaataatgtttctagtacatgacaaccacttctgctatgttcgcagaaacaacagaagtacaccgtttggcgcgtcactcaagaaaggacactccgtgttagattatttaaatgatgaacaggtatgccggacaattgttaggagagttaac

SEQ ID NO: 37342 - DNA, 3785 bp, Zea Mays
cgggtcacatcaaacgtttgacttttaaataggagtatgaaatatagacccaaccaactgaactagattcgtctcgtcttttaattttcggctgacaaattagttttataatccgactacatttaatacccggaacggaggttcaaacattcgatgggacatggctaaattttagcgggttgtgcgatacggcccaagtgtggttcagcaacgccgaagaaaaatcagacaagaagcccctccggccctcgccctccctagtccctattcgccgcgcccgcgcccgcgccgtctcgaggtccgccggtctccttccgccgcaagctttgctccattccaccgccgcctcttccgcctccgtcggcaaaatgccggtctacagcatccgcggcgtcaacgtcgacttccccttcgacgcctacgactgccagatcacctacatggaccgcgtcatcgagtccctgcaacaggggaagaacgcgctgctggagagtcctacgggtacggggaagacactgtgcctgctgtgtgcgtcgctcgcgtggcgccgcactttcggcgagttcctgcgggtcgggcgtgggggcggtgggactaagcagttgccctacgggagtcagccgtccgctagccagcagtcagaggactctacgtctcagaagcagcagcagtcgcggtacccagtcatcatctacgcctcacggacccacagccagcttcggcaggttatcaaggagctcaaggctaccagctacaggccgaagatggcagtgctaggttcccgtgagcagatgtgcatccacgacgaagtgagcaaactccatggaagagcacagaacaatgcctgtcacttcctctgcaagaaacgacggtgccctcataataaccatgttgctgagttcataaaaaacaaacctgagcttgggaatgagccttttgatatagaagatttgataaatattgggaggcataagggcccgtgcccatattacatctcccgggaactttcaaagtcggttgatattttgtttgccccttacaactatcttattgatccgggaaaccgtcgttccctaaatggcataccatgggacaatgcagtacttatatttgacgaagcacacaacttggagagtatatgtgcagatgcagcctcttttgatttatttccgaataacctcacagcttgcatagcggaagctcatgaatgcatcaaactgtgttcagcaaagaggtccattgaaaattctgctgataaacaatttgatcctgaaaactatgcaatcctcaaagctcttttaatggcacttgagaaaaaaattgctgagctgttaattggatccgagttgggctacacaaaagctgggagttacatatacgattttctctctgaactgaacattacatcagacacatccaaaaaactgattgagacaattgattgtgcttctttgctactagaggaaggaaattctgctcaaactgggccaggggtccaggcaaaggctgcagtgtctagattggagtcaattagggacatgttagacataatttttaggggtggtggtcaaaaccatgcaaaatattatcgatttcatgtgaacgaatctcaacaaacacatggagatgcattgaaatttttgggtaagtcttcaaggacccttagttggtggtgtttcaacccggggctggcgatggaagaatttctcaagttgggtgtgcgctctatcatattaacctcaggcaccttgtctccgttggattcactagccatggaactaaacctgttagtgagggtcttgattttgctgatcgtgctgggagggcagtaatagttactggaatgccctttgctactccaactgatgccaaggttcggctcaagcgcgagtatttggataagcaggggacaccatctaataaaaacacaaagatgttgacaggagaagaatggtatgtgcaacaagcagcacgggctgtcaatcaggctgttggacgtgttatcagacatcgccatgactatggagctattatttattgtgatgaaaggtttgtgtggccaaattatcaatctcagatgtcatattggctccgacctcatataaagtgctactcaaagtatggggaagtagtccaaggattgacccgattttttcgagataaagcttcttcagatcctttgacactagagccaacagattgtaataattgtatagcaccaccagcaaacaaacacatgcttaaagagaagctatcagatttggctgccagtgcacaagatgagtgcccacaaatcacattatcaggaaattcaaccatgagaagaagtaacttcatgaagttggctcagatcactcctgctaatcgttcaacccttactacaaaacacaactttgtgtctacatctacgaagcacaacctcccagaagaccagctgtcacaggataccaatgttgatattactgttgacttggcaatacaagggcatttgaaggaacataccttcaagtctttagggcttaagaaagctaaaacaatggacagatccaaagatgctgttgttttagatgacgtctcttcaaaattgcctcaaaatatagggtcaagagctttggccagataccaatgtggtggacctacacctgaatcaaagaaaagcactatagcaacagcatgcggaaagaatgatggggcctgtgaaaaaactgaaggccaggaatctaactcagggccagccttcttgaagctggttcaagaaaagcttagtcctgcagagtacacagagtttgttgaatacatgaaggccttaaaattgaaaactatgcataccaaggactcacttgaagcaataactaagcttttttcgtccccaggaagacttccacttcttgaagggttcagggtttttgttgcaaagaaccatcttccattatatgagcagcttgttcgaagacacaataatgtttctagtacatgacaaccacttctgctatgttcgcaggcatattcagtttttttgtttgtgccatgtatttcattaagtgataagtacagttttggttgttttcaacacttaactgtttatcaacggaacattagcagattcttgggtgcatgcaattacttttggaatgtgttatggtgcttctgtaatctaaggaaaagaaatggacctgaaaaaaaaaactctatttaagcttgctaatcatataagtagagtacctattgatcatttcaaatacattgaacatttctttatttggaaacaaaatccggactactataccatttatagttacactgttaatctctagctgccattgggcctgaccagtgctcgacactgtttagcaatccttcatgtttatgccagcatgaacttcaacttttcccctgtttttcctgaaaaataaaggtctatcaaatccctttggcaaaaaggcatcctgttttttctaagtttttgataaccgtagggtttctttggattttttttcatatgataaaatcatgaaacttaatagtggctgggtttagcttactgaatatagatgataaaatttccagaagcagtgctgtatttgcttagatgttactaatttgtggctgtattaccttctctttataaattagaattatgccttaggtaatagaagtacaccattttatgtcactcaagaaacaacagaagtacaccgtttggcgcgtcactcaagaaaggacactccgtgttagattatttaaatgatgaacaggtatgccggacaattgttaggagagttaac

SEQ ID NO: 37343 - DNA, 1210 bp, Zea Mays
cttttacaaaagctggctcattgtaaaagctgacttattcacctccaaacagggtcacagtagctgtatgagtgctgcaatgttaatataaacattgtacgtttataaagcagtttcatgaatgctctgcgaaaagcaggttagtgagggtcttgattttgctgatcgtgctgggagggcagtaatagttactggaatgccctttgctactccaactgatgccaaggttcggctcaagcgcgagtatttggataagcaggggacaccatctaataaaaacacaaagatgttgacaggagaagaatggtatgtgcaacaagcagcacgggctgtcaatcaggctgttggacgtgttatcagacatcgccatgactatggagctattatttattgtgatgaaaggtttgtgtggccaaattatcaatctcagatgtcatattggctccgacctcatataaagtgctactcaaagtatggggaagtagtccaaggattgacccgattttttcgagataaagcttcttcagatcctttgacactagagccaacagattgtaataattgtatagcaccaccagcaaacaaacacatgcttaaagagaagctatcagatttggtacatcctttgcattgacatagctgatcgagatttaagtttaatgcatctggagcttacggatgctgccttccttctgctaggctgccagtgcacaagatgagtgcccacaaatcacattatcaggaaattcaaccatgagaagaagtaacttcatgaagttggctcagatcactcctgctaatcgttcaacccttactacaaaacacaactttgtgtctacatctacgaagcacaacctcccagaagaccagctgtcacaggataccaatgttgatattactgttgacttggcaatacaagggcatttgaaggaacataccttcaagtctttagggcttaagaaagctaaaacaatggacagatccaaagatgctgttgttttagatgacgtctcttcaaaattgcctcaaaatatagggtcaagagctttggccagataccaatgtggtggacctacacctgaatcaaagaaaagcactatagcaacagcatgcggaaagaatgatggggcctgtgaaaaaactgaaggccaggaatctaactcagggccagccttcttgaagctggttcaagaaaagcttagtcctgcag

SEQ ID NO: 37344 - DNA, 3143 bp, Zea Mays
cgggtcacatcaaacgtttgacttttaaataggagtatgaaatatagacccaaccaactgaactagattcgtctcgtcttttaattttcggctgacaaattagttttataatccgactacatttaatacccggaacggaggttcaaacattcgatgggacatggctaaattttagcgggttgtgcgatacggcccaagtgtggttcagcaacgccgaagaaaaatcagacaagaagcccctccggccctcgccctccctagtccctattcgccgcgcccgcgcccgcgccgtctcgaggtccgccggtctccttccgccgcaagctttgctccattccaccgccgcctcttccgcctccgtcggcaaaatgccggtctacagcatccgcggcgtcaacgtcgacttccccttcgacgcctacgactgccagatcacctacatggaccgcgtcatcgagtccctgcaacaggggaagaacgcgctgctggagagtcctacgggtacggggaagacactgtgcctgctgtgtgcgtcgctcgcgtggcgccgcactttcggcgagttcctgcgggtcgggcgtgggggcggtgggactaagcagttgccctacgggagtcagccgtccgctagccagcagtcagaggactctacgtctcagaagcagcagcagtcgcggtacccagtcatcatctacgcctcacggacccacagccagcttcggcaggttatcaaggagctcaaggctaccagctacaggccgaagatggcagtgctaggttcccgtgagcagatgtgcatccacgacgaagtgagcaaactccatggaagagcacagaacaatgcctgtcacttcctctgcaagaaacgacggtgccctcataataaccatgttgctgagttcataaaaaacaaacctgagcttgggaatgagccttttgatatagaagatttgataaatattgggaggcataagggcccgtgcccatattacatctcccgggaactttcaaagtcggttgatattttgtttgccccttacaactatcttattgatccgggaaaccgtcgttccctaaatggcataccatgggacaatgcagtacttatatttgacgaagcacacaacttggagagtatatgtgcagatgcagcctcttttgatttatttccgaataacctcacagcttgcatagcggaagctcatgaatgcatcaaactgtgttcagcaaagaggtccattgaaaattctgctgataaacaatttgatcctgaaaactatgcaatcctcaaagctcttttaatggcacttgagaaaaaaattgctgagctgttaattggatccgagttgggctacacaaaagctgggagttacatatacgattttctctctgaactgaacattacatcagacacatccaaaaaactgattgagacaattgattgtgcttctttgctactagaggaaggaaattctgctcaaactgggccaggggtccaggcaaaggctgcagtgtctagattggagtcaattagggacatgttagacataatttttaggggtggtggtcaaaaccatgcaaaatattatcgagtaagtcttcaaggacccttagttggtggtgtttcaacccggggctggcgatggaagaatttctcaagttgggtgtgcgctctatcatattaacctcaggcaccttgtctccgttggattcactagccatggaactaaaccttgaattcccagttagactagaaaatccgcatgtcatttcttcagaccaagtctgggttggagttgtgcctgtcggcccttcgggacatgctcttaattcttcttatcgtacgcgtaatactatacaatataaacaagagttgggcactgcaatagtaaatttcgcacgcattgtgccagacggactccttgttttcttcccttcatattctatgatggacatgtgtgttgacttctggaaaaataggaaccattcaaattcagcgtctgagaacacaatttggcagcggatctgtaagcacaagcagccagttatagagcctaggcagtcatcaaactttcagagtgcaattgaggattatagagccaaattacacgattcttcttctggggcaatattttttgcagtttgtcgtggcaaagttagtgagggtcttgattttgctgatcgtgctgggagggcagtaatagttactggaatgccctttgctactccaactgatgccaaggttcggctcaagcgcgagtatttggataagcaggggacaccatctaataaaaacacaaagatgttgacaggagaagaatggtatgtgcaacaagcagcacgggctgtcaatcaggctgttggacgtgttatcagacatcgccatgactatggagctattatttattgtgatgaaaggtttgtgtggccaaattatcaatctcagatgtcatattggctccgacctcatataaagtgctactcaaagtatggggaagtagtccaaggattgacccgattttttcgagataaagcttcttcagatcctttgacactagagccaacagattgtaataattgtatagcaccaccagcaaacaaacacatgcttaaagagaagctatcagatttggctgccagtgcacaagatgagtgcccacaaatcacattatcaggaaattcaaccatgagaagaagtaacttcatgaagttggctcagatcactcctgctaatcgttcaacccttactacaaaacacaactttgtgtctacatctacgaagcacaacctcccagaagaccagctgtcacaggataccaatgttgatattactgttgacttggcaatacaagggcatttgaaggaacataccttcaagtctttagggcttaagaaagctaaaacaatggacagatccaaagatgctgttgttttagatgacgtctcttcaaaattgcctcaaaatatagggtcaagagctttggccagataccaatgtggtggacctacacctgaatcaaagaaaagcactatagcaacagcatgcggaaagaatgatggggcctgtgaaaaaactgaaggccaggaatctaactcagggccagccttcttgaagctggttcaagaaaagcttagtcctgcag

SEQ ID NO: 37345 - DNA, 3351 bp, Zea Mays
cgggtcacatcaaacgtttgacttttaaataggagtatgaaatatagacccaaccaactgaactagattcgtctcgtcttttaattttcggctgacaaattagttttataatccgactacatttaatacccggaacggaggttcaaacattcgatgggacatggctaaattttagcgggttgtgcgatacggcccaagtgtggttcagcaacgccgaagaaaaatcagacaagaagcccctccggccctcgccctccctagtccctattcgccgcgcccgcgcccgcgccgtctcgaggtccgccggtctccttccgccgcaagctttgctccattccaccgccgcctcttccgcctccgtcggcaaaatgccggtctacagcatccgcggcgtcaacgtcgacttccccttcgacgcctacgactgccagatcacctacatggaccgcgtcatcgagtccctgcaacaggggaagaacgcgctgctggagagtcctacgggtacggggaagacactgtgcctgctgtgtgcgtcgctcgcgtggcgccgcactttcggcgagttcctgcgggtcgggcgtgggggcggtgggactaagcagttgccctacgggagtcagccgtccgctagccagcagtcagaggactctacgtctcagaagcagcagcagtcgcggtacccagtcatcatctacgcctcacggacccacagccagcttcggcaggttatcaaggagctcaaggctaccagctacaggccgaagatggcagtgctaggttcccgtgagcagatgtgcatccacgacgaagtgagcaaactccatggaagagcacagaacaatgcctgtcacttcctctgcaagaaacgacggtgccctcataataaccatgttgctgagttcataaaaaacaaacctgagcttgggaatgagccttttgatatagaagatttgataaatattgggaggcataagggcccgtgcccatattacatctcccgggaactttcaaagtcggttgatattttgtttgccccttacaactatcttattgatccgggaaaccgtcgttccctaaatggcataccatgggacaatgcagtacttatatttgacgaagcacacaacttggagagtatatgtgcagatgcagcctcttttgatttatttccgaataacctcacagcttgcatagcggaagctcatgaatgcatcaaactgtgttcagcaaagaggtccattgaaaattctgctgataaacaatttgatcctgaaaactatgcaatcctcaaagctcttttaatggcacttgagaaaaaaattgctgagctgttaattggatccgagttgggctacacaaaagctgggagttacatatacgattttctctctgaactgaacattacatcagacacatccaaaaaactgattgagacaattgattgtgcttctttgctactagaggaaggaaattctgctcaaactgggccaggggtccaggcaaaggctgcagtgtctagattggagtcaattagggacatgttagacataatttttaggggtggtggtcaaaaccatgcaaaatattatcgatttcatgtgaacgaatctcaacaaacacatggagatgcattgaaatttttgggtaagtcttcaaggacccttagttggtggtgtttcaacccggggctggcgatggaagaatttctcaagttgggtgtgcgctctatcatattaacctcaggcaccttgtctccgttggattcactagccatggaactaaaccttgaattcccagttagactagaaaatccgcatgtcatttcttcagaccaagtctgggttggagttgtgcctgtcggcccttcgggacatgctcttaattcttcttatcgtacgcgtaatactatacaatataaacaagagttgggcactgcaatagtaaatttcgcacgcattgtgccagacggactccttgttttcttcccttcatattctatgatggacatgtgtgttgacttctggaaaaataggaaccattcaaattcagcgtctgagaacacaatttggcagcggatctgtaagcacaagcagccagttatagagcctaggcagtcatcaaactttcagagtgcaattgaggattatagagccaaattacacgattcttcttctggggcaatattttttgcagtttgtcgtggcaaagttagtgagggtcttgattttgctgatcgtgctgggagggcagtaatagttactggaatgccctttgctactccaactgatgccaaggttcggctcaagcgcgagtatttggataagcaggggacaccatctaataaaaacacaaagatgttgacaggagaagaatggtatgtgcaacaagcagcacgggctgtcaatcaggctgttggacgtgttatcagacatcgccatgactatggagctattatttattgtgatgaaaggtttgtgtggccaaattatcaatctcagatgtcatattggctccgacctcatataaagtgctactcaaagtatggggaagtagtccaaggattgacccgattttttcgagataaagcttcttcagatcctttgacactagagccaacagattgtaatagaggccaacaacagggactgtttcttgagcctatttttaagccagctttcggccggagcgagggtcatgtgatcttgagcgatttcaagtttatgcagcaacttctttgccagacaaagctgagagacaatatgccctacctgcttatcactccagattgtatagcaccaccagcaaacaaacacatgcttaaagagaagctatcagatttggctgccagtgcacaagatgagtgcccacaaatcacattatcaggaaattcaaccatgagaagaagtaacttcatgaagttggctcagatcactcctgctaatcgttcaacccttactacaaaacacaactttgtgtctacatctacgaagcacaacctcccagaagaccagctgtcacaggataccaatgttgatattactgttgacttggcaatacaagggcatttgaaggaacataccttcaagtctttagggcttaagaaagctaaaacaatggacagatccaaagatgctgttgttttagatgacgtctcttcaaaattgcctcaaaatatagggtcaagagctttggccagataccaatgtggtggacctacacctgaatcaaagaaaagcactatagcaacagcatgcggaaagaatgatggggcctgtgaaaaaactgaaggccaggaatctaactcagggccagccttcttgaagctggttcaagaaaagcttagtcctgcag

SEQ ID NO: 37346 - DNA, 2857 bp, Zea Mays
cgggtcacatcaaacgtttgacttttaaataggagtatgaaatatagacccaaccaactgaactagattcgtctcgtcttttaattttcggctgacaaattagttttataatccgactacatttaatacccggaacggaggttcaaacattcgatgggacatggctaaattttagcgggttgtgcgatacggcccaagtgtggttcagcaacgccgaagaaaaatcagacaagaagcccctccggccctcgccctccctagtccctattcgccgcgcccgcgcccgcgccgtctcgaggtccgccggtctccttccgccgcaagctttgctccattccaccgccgcctcttccgcctccgtcggcaaaatgccggtctacagcatccgcggcgtcaacgtcgacttccccttcgacgcctacgactgccagatcacctacatggaccgcgtcatcgagtccctgcaacaggggaagaacgcgctgctggagagtcctacgggtacggggaagacactgtgcctgctgtgtgcgtcgctcgcgtggcgccgcactttcggcgagttcctgcgggtcgggcgtgggggcggtgggactaagcagttgccctacgggagtcagccgtccgctagccagcagtcagaggactctacgtctcagaagcagcagcagtcgcggtacccagtcatcatctacgcctcacggacccacagccagcttcggcaggttatcaaggagctcaaggctaccagctacaggccgaagatggcagtgctaggttcccgtgagcagatgtgcatccacgacgaagtgagcaaactccatggaagagcacagaacaatgcctgtcacttcctctgcaagaaacgacggtgccctcataataaccatgttgctgagttcataaaaaacaaacctgagcttgggaatgagccttttgatatagaagatttgataaatattgggaggcataagggcccgtgcccatattacatctcccgggaactttcaaagtcggttgatattttgtttgccccttacaactatcttattgatccgggaaaccgtcgttccctaaatggcataccatgggacaatgcagtacttatatttgacgaagcacacaacttggagagtatatgtgcagatgcagcctcttttgatttatttccgaataacctcacagcttgcatagcggaagctcatgaatgcatcaaactgtgttcagcaaagaggtccattgaaaattctgctgataaacaatttgatcctgaaaactatgcaatcctcaaagctcttttaatggcacttgagaaaaaaattgctgagctgttaattggatccgagttgggctacacaaaagctgggagttacatatacgattttctctctgaactgaacattacatcagacacatccaaaaaactgattgagacaattgattgtgcttctttgctactagaggaaggaaattctgctcaaactgggccaggggtccaggcaaaggctgcagtgtctagattggagtcaattagggacatgttagacataatttttaggggtggtggtcaaaaccatgcaaaatattatcgatttcatgtgaacgaatctcaacaaacacatggagatgcattgaaatttttgggtaagtcttcaaggacccttagttggtggtgtttcaacccggggctggcgatggaagaatttctcaagttgggtgtgcgctctatcatattaacctcaggcaccttgtctccgttggattcactagccatggaactaaacctgttagtgagggtcttgattttgctgatcgtgctgggagggcagtaatagttactggaatgccctttgctactccaactgatgccaaggttcggctcaagcgcgagtatttggataagcaggggacaccatctaataaaaacacaaagatgttgacaggagaagaatggtatgtgcaacaagcagcacgggctgtcaatcaggctgttggacgtgttatcagacatcgccatgactatggagctattatttattgtgatgaaaggtttgtgtggccaaattatcaatctcagatgtcatattggctccgacctcatataaagtgctactcaaagtatggggaagtagtccaaggattgacccgattttttcgagataaagcttcttcagatcctttgacactagagccaacagattgtaataattgtatagcaccaccagcaaacaaacacatgcttaaagagaagctatcagatttggtacatcctttgcattgacatagctgatcgagatttaagtttaatgcatctggagcttacggatgctgccttccttctgctaggctgccagtgcacaagatgagtgcccacaaatcacattatcaggaaattcaaccatgagaagaagtaacttcatgaagttggctcagatcactcctgctaatcgttcaacccttactacaaaacacaactttgtgtctacatctacgaagcacaacctcccagaagaccagctgtcacaggataccaatgttgatattactgttgacttggcaatacaagggcatttgaaggaacataccttcaagtctttagggcttaagaaagctaaaacaatggacagatccaaagatgctgttgttttagatgacgtctcttcaaaattgcctcaaaatatagggtcaagagctttggccagataccaatgtggtggacctacacctgaatcaaagaaaagcactatagcaacagcatgcggaaagaatgatggggcctgtgaaaaaactgaaggccaggaatctaactcagggccagccttcttgaagctggttcaagaaaagcttagtcctgcag

SEQ ID NO: 37347 - DNA, 3187 bp, Zea Mays
cgggtcacatcaaacgtttgacttttaaataggagtatgaaatatagacccaaccaactgaactagattcgtctcgtcttttaattttcggctgacaaattagttttataatccgactacatttaatacccggaacggaggttcaaacattcgatgggacatggctaaattttagcgggttgtgcgatacggcccaagtgtggttcagcaacgccgaagaaaaatcagacaagaagcccctccggccctcgccctccctagtccctattcgccgcgcccgcgcccgcgccgtctcgaggtccgccggtctccttccgccgcaagctttgctccattccaccgccgcctcttccgcctccgtcggcaaaatgccggtctacagcatccgcggcgtcaacgtcgacttccccttcgacgcctacgactgccagatcacctacatggaccgcgtcatcgagtccctgcaacaggggaagaacgcgctgctggagagtcctacgggtacggggaagacactgtgcctgctgtgtgcgtcgctcgcgtggcgccgcactttcggcgagttcctgcgggtcgggcgtgggggcggtgggactaagcagttgccctacgggagtcagccgtccgctagccagcagtcagaggactctacgtctcagaagcagcagcagtcgcggtacccagtcatcatctacgcctcacggacccacagccagcttcggcaggttatcaaggagctcaaggctaccagctacaggccgaagatggcagtgctaggttcccgtgagcagatgtgcatccacgacgaagtgagcaaactccatggaagagcacagaacaatgcctgtcacttcctctgcaagaaacgacggtgccctcataataaccatgttgctgagttcataaaaaacaaacctgagcttgggaatgagccttttgatatagaagatttgataaatattgggaggcataagggcccgtgcccatattacatctcccgggaactttcaaagtcggttgatattttgtttgccccttacaactatcttattgatccgggaaaccgtcgttccctaaatggcataccatgggacaatgcagtacttatatttgacgaagcacacaacttggagagtatatgtgcagatgcagcctcttttgatttatttccgaataacctcacagcttgcatagcggaagctcatgaatgcatcaaactgtgttcagcaaagaggtccattgaaaattctgctgataaacaatttgatcctgaaaactatgcaatcctcaaagctcttttaatggcacttgagaaaaaaattgctgagctgttaattggatccgagttgggctacacaaaagctgggagttacatatacgattttctctctgaactgaacattacatcagacacatccaaaaaactgattgagacaattgattgtgcttctttgctactagaggaaggaaattctgctcaaactgggccaggggtccaggcaaaggctgcagtgtctagattggagtcaattagggacatgttagacataatttttaggggtggtggtcaaaaccatgcaaaatattatcgatttcatgtgaacgaatctcaacaaacacatggagatgcattgaaatttttgggtaagtcttcaaggacccttagttggtggtgtttcaacccggggctggcgatggaagaatttctcaagttgggtgtgcgctctatcatattaacctcaggcaccttgtctccgttggattcactagccatggaactaaacctaaccattcaaattcagcgtctgagaacacaatttggcagcggatctgtaagcacaagcagccagttatagagcctaggcagtcatcaaactttcagagtgcaattgaggattatagagccaaattacacgattcttcttctggggcaatattttttgcagtttgtcgtggcaaagttagtgagggtcttgattttgctgatcgtgctgggagggcagtaatagttactggaatgccctttgctactccaactgatgccaaggttcggctcaagcgcgagtatttggataagcaggggacaccatctaataaaaacacaaagatgttgacaggagaagaatggtatgtgcaacaagcagcacgggctgtcaatcaggctgttggacgtgttatcagacatcgccatgactatggagctattatttattgtgatgaaaggtttgtgtggccaaattatcaatctcagatgtcatattggctccgacctcatataaagtgctactcaaagtatggggaagtagtccaaggattgacccgattttttcgagataaagcttcttcagatcctttgacactagagccaacagattgtaatagaggccaacaacagggactgtttcttgagcctatttttaagccagctttcggccggagcgagggtcatgtgatcttgagcgatttcaagtttatgcagcaacttctttgccagacaaagctgagagacaatatgccctacctgcttatcactccagattgtatagcaccaccagcaaacaaacacatgcttaaagagaagctatcagatttggtacatcctttgcattgacatagctgatcgagatttaagtttaatgcatctggagcttacggatgctgccttccttctgctaggctgccagtgcacaagatgagtgcccacaaatcacattatcaggaaattcaaccatgagaagaagtaacttcatgaagttggctcagatcactcctgctaatcgttcaacccttactacaaaacacaactttgtgtctacatctacgaagcacaacctcccagaagaccagctgtcacaggataccaatgttgatattactgttgacttggcaatacaagggcatttgaaggaacataccttcaagtctttagggcttaagaaagctaaaacaatggacagatccaaagatgctgttgttttagatgacgtctcttcaaaattgcctcaaaatatagggtcaagagctttggccagataccaatgtggtggacctacacctgaatcaaagaaaagcactatagcaacagcatgcggaaagaatgatggggcctgtgaaaaaactgaaggccaggaatctaactcagggccagccttcttgaagctggttcaagaaaagcttagtcctgcag

SEQ ID NO: 37348 - DNA, 3194 bp, Zea Mays
cgggtcacatcaaacgtttgacttttaaataggagtatgaaatatagacccaaccaactgaactagattcgtctcgtcttttaattttcggctgacaaattagttttataatccgactacatttaatacccggaacggaggttcaaacattcgatgggacatggctaaattttagcgggttgtgcgatacggcccaagtgtggttcagcaacgccgaagaaaaatcagacaagaagcccctccggccctcgccctccctagtccctattcgccgcgcccgcgcccgcgccgtctcgaggtccgccggtctccttccgccgcaagctttgctccattccaccgccgcctcttccgcctccgtcggcaaaatgccggtctacagcatccgcggcgtcaacgtcgacttccccttcgacgcctacgactgccagatcacctacatggaccgcgtcatcgagtccctgcaacaggggaagaacgcgctgctggagagtcctacgggtacggggaagacactgtgcctgctgtgtgcgtcgctcgcgtggcgccgcactttcggcgagttcctgcgggtcgggcgtgggggcggtgggactaagcagttgccctacgggagtcagccgtccgctagccagcagtcagaggactctacgtctcagaagcagcagcagtcgcggtacccagtcatcatctacgcctcacggacccacagccagcttcggcaggttatcaaggagctcaaggctaccagctacaggccgaagatggcagtgctaggttcccgtgagcagatgtgcatccacgacgaagtgagcaaactccatggaagagcacagaacaatgcctgtcacttcctctgcaagaaacgacggtgccctcataataaccatgttgctgagttcataaaaaacaaacctgagcttgggaatgagccttttgatatagaagatttgataaatattgggaggcataagggcccgtgcccatattacatctcccgggaactttcaaagtcggttgatattttgtttgccccttacaactatcttattgatccgggaaaccgtcgttccctaaatggcataccatgggacaatgcagtacttatatttgacgaagcacacaacttggagagtatatgtgcagatgcagcctcttttgatttatttccgaataacctcacagcttgcatagcggaagctcatgaatgcatcaaactgtgttcagcaaagaggtccattgaaaattctgctgataaacaatttgatcctgaaaactatgcaatcctcaaagctcttttaatggcacttgagaaaaaaattgctgagctgttaattggatccgagttgggctacacaaaagctgggagttacatatacgattttctctctgaactgaacattacatcagacacatccaaaaaactgattgagacaattgattgtgcttctttgctactagaggaaggaaattctgctcaaactgggccaggggtccaggcaaaggctgcagtgtctagattggagtcaattagggacatgttagacataatttttaggggtggtggtcaaaaccatgcaaaatattatcgatttcatgtgaacgaatctcaacaaacacatggagatgcattgaaatttttgggtaagtcttcaaggacccttagttggtggtgtttcaacccggggctggcgatggaagaatttctcaagttgggtgtgcgctctatcatattaacctcaggcaccttgtctccgttggattcactagccatggaactaaaccttgaattcccagttagactagaaaatccgcatgtcatttcttcagaccaagtctgggttggagttgtgcctgtcggcccttcgggacatgctcttaattcttcttatcgtacgcgtaatactatacaatataaacaagagttgggcactgcaatagtaaatttcgcacgcattgtgccagacggactccttgttttcttcccttcatattctatgatggacatgtgtgttgacttctggaaaaataggaaccattcaaattcagcgtctgagaacacaatttggcagcggatctgtaagcacaagcagccagttatagagcctaggcagtcatcaaactttcagagtgcaattgaggattatagagccaaattacacgattcttcttctggggcaatattttttgcagtttgtcgtggcaagttagtgagggtcttgattttgctgatcgtgctgggagggcagtaatagttactggaatgccctttgctactccaactgatgccaaggttcggctcaagcgcgagtatttggataagcaggggacaccatctaataaaaacacaaagatgttgacaggagaagaatggtatgtgcaacaagcagcacgggctgtcaatcaggctgttggacgtgttatcagacatcgccatgactatggagctattatttattgtgatgaaaggtttgtgtggccaaattatcaatctcagatgtcatattggctccgacctcatataaagtgctactcaaagtatggggaagtagtccaaggattgacccgattttttcgagataaagcttcttcagatcctttgacactagagccaacagattgtaataattgtatagcaccaccagcaaacaaacacatgcttaaagagaagctatcagatttggctgccagtgcacaagatgagtgcccacaaatcacattatcaggaaattcaaccatgagaagaagtaacttcatgaagttggctcagatcactcctgctaatcgttcaacccttactacaaaacacaactttgtgtctacatctacgaagcacaacctcccagaagaccagctgtcacaggataccaatgttgatattactgttgacttggcaatacaagggcatttgaaggaacataccttcaagtctttagggcttaagaaagctaaaacaatggacagatccaaagatgctgttgttttagatgacgtctcttcaaaattgcctcaaaatatagggtcaagagctttggccagataccaatgtggtggacctacacctgaatcaaagaaaagcactatagcaacagcatgcggaaagaatgatggggcctgtgaaaaaactgaaggccaggaatctaactcagggccagccttcttgaagctggttcaagaaaagcttagtcctgcag

SEQ ID NO: 37349 - DNA, 3096 bp, Zea Mays
cgggtcacatcaaacgtttgacttttaaataggagtatgaaatatagacccaaccaactgaactagattcgtctcgtcttttaattttcggctgacaaattagttttataatccgactacatttaatacccggaacggaggttcaaacattcgatgggacatggctaaattttagcgggttgtgcgatacggcccaagtgtggttcagcaacgccgaagaaaaatcagacaagaagcccctccggccctcgccctccctagtccctattcgccgcgcccgcgcccgcgccgtctcgaggtccgccggtctccttccgccgcaagctttgctccattccaccgccgcctcttccgcctccgtcggcaaaatgccggtctacagcatccgcggcgtcaacgtcgacttccccttcgacgcctacgactgccagatcacctacatggaccgcgtcatcgagtccctgcaacaggggaagaacgcgctgctggagagtcctacgggtacggggaagacactgtgcctgctgtgtgcgtcgctcgcgtggcgccgcactttcggcgagttcctgcgggtcgggcgtgggggcggtgggactaagcagttgccctacgggagtcagccgtccgctagccagcagtcagaggactctacgtctcagaagcagcagcagtcgcggtacccagtcatcatctacgcctcacggacccacagccagcttcggcaggttatcaaggagctcaaggctaccagctacaggccgaagatggcagtgctaggttcccgtgagcagatgtgcatccacgacgaagtgagcaaactccatggaagagcacagaacaatgcctgtcacttcctctgcaagaaacgacggtgccctcataataaccatgttgctgagttcataaaaaacaaacctgagcttgggaatgagccttttgatatagaagatttgataaatattgggaggcataagggcccgtgcccatattacatctcccgggaactttcaaagtcggttgatattttgtttgccccttacaactatcttattgatccgggaaaccgtcgttccctaaatggcataccatgggacaatgcagtacttatatttgacgaagcacacaacttggagagtatatgtgcagatgcagcctcttttgatttatttccgaataacctcacagcttgcatagcggaagctcatgaatgcatcaaactgtgttcagcaaagaggtccattgaaaattctgctgataaacaatttgatcctgaaaactatgcaatcctcaaagctcttttaatggcacttgagaaaaaaattgctgagctgttaattggatccgagttgggctacacaaaagctgggagttacatatacgattttctctctgaactgaacattacatcagacacatccaaaaaactgattgagacaattgattgtgcttctttgctactagaggaaggaaattctgctcaaactgggccaggggtccaggcaaaggctgcagtgtctagattggagtcaattagggacatgttagacataatttttaggggtggtggtcaaaaccatgcaaaatattatcgatttcatgtgaacgaatctcaacaaacacatggagatgcattgaaatttttgggcaccttgtctccgttggattcactagccatggaactaaaccttgaattcccagttagactagaaaatccgcatgtcatttcttcagaccaagtctgggttggagttgtgcctgtcggcccttcgggacatgctcttaattcttcttatcgtacgcgtaatactatacaatataaacaagagttgggcactgcaatagtaaatttcgcacgcattgtgccagacggactccttgttttcttcccttcatattctatgatggacatgtgtgttgacttctggaaaaataggaaccattcaaattcagcgtctgagaacacaatttggcagcggatctgtaagcacaagcagccagttatagagcctaggcagtcatcaaactttcagagtgcaattgaggattatagagccaaattacacgattcttcttctggggcaatattttttgcagtttgtcgtggcaaagttagtgagggtcttgattttgctgatcgtgctgggagggcagtaatagttactggaatgccctttgctactccaactgatgccaaggttcggctcaagcgcgagtatttggataagcaggggacaccatctaataaaaacacaaagatgttgacaggagaagaatggtatgtgcaacaagcagcacgggctgtcaatcaggctgttggacgtgttatcagacatcgccatgactatggagctattatttattgtgatgaaaggtttgtgtggccaaattatcaatctcagatgtcatattggctccgacctcatataaagtgctactcaaagtatggggaagtagtccaaggattgacccgattttttcgagataaagcttcttcagatcctttgacactagagccaacagattgtaataattgtatagcaccaccagcaaacaaacacatgcttaaagagaagctatcagatttggctgccagtgcacaagatgagtgcccacaaatcacattatcaggaaattcaaccatgagaagaagtaacttcatgaagttggctcagatcactcctgctaatcgttcaacccttactacaaaacacaactttgtgtctacatctacgaagcacaacctcccagaagaccagctgtcacaggataccaatgttgatattactgttgacttggcaatacaagggcatttgaaggaacataccttcaagtctttagggcttaagaaagctaaaacaatggacagatccaaagatgctgttgttttagatgacgtctcttcaaaattgcctcaaaatatagggtcaagagctttggccagataccaatgtggtggacctacacctgaatcaaagaaaagcactatagcaacagcatgcggaaagaatgatggggcctgtgaaaaaactgaaggccaggaatctaactcagggccagccttcttgaagctggttcaagaaaagcttagtcctgcag

SEQ ID NO: 37350 - DNA, 1332 bp, Zea Mays
gtgcgcccaggcaaccgcacgctagccgttgaacacaacaacacagcatgcacgcctacgacgctgctgccccgcgtgctcacagcctcacgcacaactcgtccgcacgcttgcgcgcacgcttgtaactccctgtcggctgtctccctcctccctcacgctcccggcgtgacacacagggctggctcgcttgccggccggccggcatataagagcgcgctaggacgcaaacgaatctgcagtagccagtgcgagtggagtgagcggcccggacgagcggaggaggaagacaggatggctgccggacgagcggttgcggtggctatggtggcggcggcggcgctgccgctgctcgtgggtggcgcgtacgcggactgctacaactactgcttcaacgactgcatgaacaaggacaagtccatgagagactactgcagctacgcctgcgacaagacctgcgcgcccgacgcggcgccccggcgccccgtcgccggactccccataaactgccagctcgcctgcgtcagggactcctgccgccgtcgccgtgcagatgccaacgacatgaaggcctgctacgggcagtgctacgaccgctgcgagaccaaggccggcctgccgaggcctctccgcgcaggcggcggcgttggcattgtctggccggcggcgttgccggaccacccattccacaagaagcaggacgctgtctggccggcggcgttgccagaccactcattccacaagacgaagcagggcgctgtctggccggcggcgttgcccgaccacccattccacgagaagcacgacgctgtctggccagcagcgttgcccgaccacccgttccacaagaaggaggatgctgtcgggccggcggcgttgcaggtggaccacaagatgcacgacgcggtcaagcgggcaggggagccggatcccggatacgtcatgtatccggcatggagccccgtccgcccctaatcgtcgattcgttgttggagaacgacgacgctccgccggcaacggcgaatgccacatgcatacatgctcgtggctcccatgcgatattaagcactagtagaggaagtgtgtgatgtgtcaacgtgctactgctatactgtatatgcatgcctactgtatatgcatgcctattctcacgtttatgcatatgggcattagtgttccaacagacacaggaatgccgactgaagagagcagagctttgttctacaagtggcaccaagggagcaagtggcggtagatgctaagcgtgccaacgaactcatctcctcctgtcctagctagttggctgcttcaattcatgtgtcttctaatctc

SEQ ID NO: 37351 - DNA, 2299 bp, Zea Mays
cctcctctccattcccctcgtccaccaaaaaaaaaaaatatccgcaacaaattcctagctaaaccctcctccccgtcgtccaccgccggtcgccgccatggcgctctccaagcctctcctctctcgcctcctcccccttcctctccgcctacgtcctcaggcccgcttcctctgcctcgccaccccgcctttgaccccgacccccacccaaatcgacgaccagccacccgcggacgccgccgccgagcgccgccgccgcaagcgccgcctccgcgtggagccccctctctcccgaggccccgcgccgcagcgcgcgccgggggctccccgccccgcgtcaaaccccaacgcgcccaagatcccggagccggcctcggtgctgtcggggaagcgcctcgacctgcaccgccgaatcctcacgctcatccgcgagaacgaccttgacgaggcggcgctcctcacgcgccactccatctactccaactgccgccccaccgtcttcacctgcaacgccgtcctcgccgcgctgctccgccaggcccgctacgccgacctcctatccctccaccgcttcgtcacgcaggcctctgtcgcgcccaccgtcgccacctacaacctcctccttcaggcctactgcgactgccgccgccctgacgtcgcgcttgagcacttccgcctccttctcaaggacgactcgcccgtgctcccatcccccaccacataccgcatcctggcgcgctccctcgccgagaacggcaagctagaccaggcgctcgagctcaaggatggcatgctcgagcgtggccttattgcccctgatacccaggtgtatgccttcatcatgggtgggtttgtcaatgccggggatggggacaaggcagtttcgttgtttgaggagatcaaggagaaacttggcggggagtctattcttgatggcgtagtgtatggcaacctaatgaaagggtattttctcaagggcatggagaaggaggccatggattgctatgcagaggtgcttggagagggttccaaggtgaggttcggtgctgtgagctacaacatggtgcttgatgcacttgggaggaatgggaggttggatgatgcactcaacctgtttgatagaatgtgcatggagcatgacccgcccaggacaatcactgtgaaccttgggagctttaatgtgatggttgatgcatactgccgcgctgaaaggtttcaagatgcgattgaggtgtttggaaagatggccgagaagaagtgtgctccagatgcactctcgtacaataatctgattgactggttagggaagaacaaacttgttggggaggctgagggattgtacaaggagatggaagagcgaggtgtaaaccctgatgagtacacctatgtcttgctcattgaatcttgctttaaggttgatagggtggaagatgcagttgcttacttcaacaagatgtttgatgctggcctgaggccgaatgcgaatgcatttaacaaagttatagatggcttggtgaaggttgataggctcagcgaggcacagggtttttttgatatgatgcctgagaaggaggtcaaaccaaacattgctagctatgagttgctattgaaggcatatattgatgctgcaaggttggatgatgcgattaaggtcgccaaatgtatcctgttagatgagagtgtcgtctttagtgatgaaacgaaagcacttctggaggaggcactagacaaagagggtagaaatgggcaaatgacaaagttatatgaagatgttgagatggagaaagcagaggcggctgcacgtgcagctgaagagaaggccgaggcaaaggctaaggaagaagctgctgccagggctagccgagcggctattgaggcagtgctgggtcgcaagagggaagcagaaaaacaggaaccagttgatggactgaacgttgaggatgcagaggttgtggaatccaagagtgacaccagcgatgtttctggagaacagaatgaaggcgatgagcacaaaaagcaagagccggctgaagcatcatcgtgttcttagcttcgttatctttataagttccttactagttactatcatgaatgatctttagatccatttcagtagtataatgtgcttgggagaggctatctgagaaggttggctcaatgcttttatatgaacttacatggtttcaagtcgtgctgattgtttgctacattgaatcattggtgcaatcttgtgtaccacatctagcatttcttagataagagataaatataagttataaaatttctttatccttgtgat

SEQ ID NO: 37352 - DNA, 885 bp, Zea Mays
actcgagaaacggatccctaatcgctgaaccaaaactacaaaacgaagtgacgatactgccctcgacctctcgaggtatcgagtctcgaccaacccatacgcacctaccctccgccaccgttcccccctccccatctcgcccgccgttctcgtccttgtagatctcctcgcacctcgcccattcgcttcaccaagggtttaagaccggcggcgatggcggcgaagctggcgcagctgcgcacacaggtaacgcgtgcggcggagttcgcctcgaagcacggctgctcctactacaaggaggtaatggagaagaacaagcagtacgtcgttcagccccccaccgtcgagaagtgccaggagctctccaagcagctcttttacacccgcctcgcaaggtcgctatgagtcattctggaaggagcttgattgtgtcaagcaggtatggaagaacaggaaggacctcacggtcgaggaccttggcattgcgagtttatttggagttgagctctatgcatggttctgcgtaggcgagattgtcggcagaggtttcaccttgaccggctataaggtctagatgatttccactggtcaagacctgctttataattgatactcttagctgatgcttgtcgaaacgacgacgatggtacctgccttggttcacaattttgtttctttgtaagagtttacctagtgctgaatgccagcaaagacgggcacatcgttgcaacattgcctcaataatttgctcgctcaattgttgattttggtgcatgtaattctttgttggttgcaatcccccgcgtgcggactgatttctgcctttatttcttccctcaaaataaattccttgtgttccgtatgtgattttttggatgaacataa

SEQ ID NO: 37353 - DNA, 740 bp, Zea Mays
actcgagaaacggatccctaatcgctgaaccaaaactacaaaacgaagtgacgatactgccctcgacctctcgaggtatcgagtctcgaccaacccatacgcacctaccctccgccaccgttcccccctccccatctcgcccgccgttctcgtccttgtagatctcctcgcacctcgcccattcgcttcaccaagggtttaagaccggcggcgatggcggcgaagctggcgcagctgcgcacacaggtaacgcgtgcggcggagttcgcctcgaagcacggctgctcctactacaaggaggtaatggagaagaacaagcagtacgtcgttcagccccccaccgtcgagaagtgccaggagctctccaagcagctcttttacacccgcctcgcaaggtcgtttgttcgatgggtacagtgctgtgcacgtaatgtttttgtcctggctactattgcaatcaccttgttaaacctgaacgtagtatggatgtatggtgtgatttgcttatggccagtataagtgatgaggatagccaagctgtctgtctgattctgtgagcggattaaggttgctagcaagataatgttgttggttttttggcggtgtaactgagcatttgtatctagcgcagcatatttatgttcttcacctttgagggcagtccatgtcttaccctcttggctaacatggttcttcatggctgcactgtttgacttaacacttagtatgtcttttatcat

SEQ ID NO: 37354 - DNA, 1687 bp, Zea Mays
agcaaacacacggcagcagagtgcaaagccacggcgatgagcaaatggcaaaaggcaacacatgtgactgctgaccacgacgcgacgcgcaaaccttaacaagtcagcaagcagatgggcttctcatcacatatactccgtataaagcagagaggagaggagaggagaggagacggggacggcaccggcagcgctccacaggcccaacctgccgtccacggcgcgaaagaagagccgcgaacccgggagtcctgcctgtcctcgtcctcctcccccttgccatccgccgcccatggcgtccgcgtccgcccccgaagtggtggtggtcttcgacttcgaccggaccatcatcgactgggacagcgacgactgggtcatcaccaagctcggcgccgccgacgccttccagcgcctgcgcccaaccatgcgctggaacccgctcatggatgatggcggagctccacgccagggggaagacgcccgaggacatccgcgactgcctcaggagcgcgccgctcgacacgcacgtcgtttccgcagtcaagacggcggcggcgctggggtgtgacttgaaggtggtgagcgacgccaacaccttcttcatcgagaccgtcctggcgcaccacggcgtgctcggctgcttctccgagatcgtcaccaatccggcgagcgtcgacgcggacggcaggctcaggatctcgccgttccacgaccccgcgtccgcgccgcacggttgcagcctctgccctgacaacatgtgcaagggcaagatactggggaggatccaggcaacaggcagtgacaagaagcggcgccggcgcttcatctacatcggtgacgggaagggagattactgcccgtccctcaagctgggggaaggggaccacgtcatggcaagggagaactaccccctgtggcatctcatctgcgacaacaagcagcttctcaaggctgaggttcatccgtggaacagcggcgaggaactggaaaagacgctgcttaagttggccggcgaagtgatcagtccacctgcacaggcttcacaatttgactacagcaaatgcgagatgagcaatccagcatcctgccctccgtcgtgtgccgcactgattaccgaccaactcttagttcgcaagtactgataaaagtctccatcctgcattcaacatgatatatgtcgtcaatctgcacagcaatttagagatggattatctatgctatacactatgttatcaaataaactgtagcgtggcatggaaggacatgagttgagaattaattgatgccagtgtgggaaactatagtctctaactcctcaggaaaatccaaatttccaacagcagaatccattatgtcagtctgtcagatcaatagccaagacagtaacagcatacggtggatgtggatatgctacaggacgggcaacattttcattgataatgattcacgagcctaccctttgttcagctgtacacaaaactacccatatatctggaatatccttgtggtctgaatgtctgatcttgtccataaggacactgtagagccccacccaccggtagcatacgagatcgcaggaacaaagggtatttcatgtgtcctgctagccccaagaattgtgatccatacatatgcatctggaaccaatgacacctgaccgtagattcagcttcaggaagttctccag

SEQ ID NO: 37355 - DNA, 1668 bp, Zea Mays
gaacaggacaaacacttttgatgtaccgcgtcctgacccatctggacatcacaccattcacatcgaactcctgctcttcagggatttgatatcaagcaagctgaattagcttccatcctgccatcgtctgggtttcatagagaagttgtcacattatgatatgaaggttggtaaggcttatttagttattaaacagactcttcagcagattgttgagaaacaatacaatctatctgatgtttttagcgagttaatagatgaggtcctccgtgccgagtcgggagacaatgaagatgtttatgatgtgcagaaaacaactacaaaatcagatgatattcttccccagtcggcagaaagttgccccgatgaagctgacattgatccactgggtaaacatggtgacgttggcaagaacatgccgaccaacacaaacgtcactcctcaagcaacaccacatacggaatcttgctcgccgatatttgatgcgacgccgcaaataaaggtttctgttgaaaccgatccagctacaaacactcctcaggttgaccagatttcacttgattcggagatgcaaactgtgttagctctacgcgaatatttgtgtgatacgcaatctgacactagcagtcactactcaactttgaggaacagaaacgacatagtcggaaccctcaaccttttgatgaatctgtactgtacacttctagacaatgcattgcccgagacagatgaaatggataaatgcaaagcagtaacaatcatatttcattttacaaacataatttattttaaatggtacatatcacattgttatgctttgtcatttacactattcatctttatgcttttttttacacggtcagatcatggttcccatgggcaacactagtgagatacggtctcttgcgtttcattatatcacattccatccgaagaacaaagcattatgaacgaatcaagctgattcttcagaagtactcgattttcgataacgtcatcgactcgagccaggtgacggttcagaggggaggttcatcgaggtctgctgctcgtagctcccgtcgctctactcaggttactgcagaagttgagcaactacgagaagagcttaggcaacatcaggagcgacaaagggttcaggaggaatacttgaggcagcatgctgctcaacaagaatactatgctactcagtttcaacaacagcaagcactgatacaagtatatgagactcctccagctaccttgccggcgcagcaacaagatgatgggttagactttgtcaatacgctcttcgcgagtggaggtagcgagcatcactcttcgatatttcctgatgttgatcgacagtagtgggcttccattcgatgtgttttgtgagacttcaaacttgtgtcttgtgagacttgtgaattcttatgtcgaggtggatttgacttgtgagacttgtgtcttgtgaattcttatgttattattatgtatgttagatgttatatgtgatatgttgtgtattgtggctgttatatatattagtggttgttatatatatttgttatgtatgcaatgtgttgaattgccaaaaacaaattgtatattaagtgctggtcatattaacttccgagaggcgagaaaaactctcggaagttaatggttaacttccgagaggccgtc

SEQ ID NO: 37356 - DNA, 1982 bp, Zea Mays
tatttacttaataacttttattttacaacagcataagaacaggacaaacacttttgatgtaccgcgtcctgacccatctggacatcacaccattcacatcgaactcctgctcttcagggatttgatatcaagcaagctgaattagcttccatcctgccatcgtctgggtttcatagagaagttgtcacattatgatatgaaggttggtaaggcttatttagttattaaacagactcttcagcagattgttgagaaacaatacaatctatctgatgtttttagcgagttaatagatgaggtcctccgtgccgagtcgggagacaatgaagatgtttatgatgtgcagaaaacaactacaaaatcagatgatattcttccccagtcggcagaaggatgtacgtgttcggccccacaaactgtaacagatatgtctactccagcatttcagcaggatacgtagttgacagacacacagatacatgaattactgttaaggcaacaacatattcgtgtactattagaaagttgccccgatgaagctgacattgatccactggtttatacaaatataacgaaatagaccaaaacacctacaaccccagtggtaatgttttttttattacttgtattttcattgaagggttgtattcatcgttttctttaaaaagcatataaccattacaattttttcagggtaaacatggtgacgttggcaagaacatgccgaccaacacaaacgtcactcctcaagcaacaccacatacggaatcttgctcgccgatatttgatgcgacgccgcaaataaaggtatgagtacatcacctcgttgtttttctatattattattagtagtttactaaacatctaatttatttataccataattgttagtctcccggcggcgtccaacaggcggcagaaacagatctccctgacaatggtccatgctttgatcagactccatctgaacatgtcagctcagtaattttcatttttattatagttgccaaaactgttcacagattgttatatattttcatatatctttttaggtttctgttgaaaccgatccagctacaaacactcctcaggttgaccagatttcacttgattcggagatgcaaactgtgttagctctacgcgaatatttgtgtgatacgcaatctgacactagcagatcatggttcccatgggcaacactagtgagatacggtctcttgcgtttcattatatcacattccatccgaagaacaaagcattatgaacgaatcaagctgattcttcagaagtactcgattttcgataacgtcatcgactcgagccaggtgacggttcagaggggaggttcatcgaggtctgctgctcgtagctcccgtcgctctactcaggttactgcagaagttgagcaactacgagaagagcttaggcaacatcaggagcgacaaagggttcaggaggaatacttgaggcagcatgctgctcaacaagaatactatgctactcagtttcaacaacagcaagcactgatacaagtatatgagactcctccagctaccttgccggcgcagcaacaagatgatgggttagactttgtcaatacgctcttcgcgagtggaggtagcgagcatcactcttcgatatttcctgatgttgatcgacagtagtgggcttccattcgatgtgttttgtgagacttcaaacttgtgtcttgtgagacttgtgaattcttatgtcgaggtggatttgacttgtgagacttgtgtcttgtgaattcttatgttattattatgtatgttagatgttatatgtgatatgttgtgtattgtggctgttatatatattagtggttgttatatatatttgttatgtatgcaatgtgttgaattgccaaaaacaaattgtatattaagtgctggtcatattaacttccgagaggcgagaaaaactctcggaagttaatggttaacttccgagaggccgtc

SEQ ID NO: 37357 - DNA, 752 bp, Zea Mays
gaacaggacaaacacttttgatgtaccgcgtcctgacccatctggacatcacaccattcacatcgaactcctgctcttcagggatttgatatcaagcaagctgaattagcttccatcctgccatcgtctgggtttcatagagaagttgtcacattatgatatgaaggttggtaaggcttatttagttattaaacagactcttcagcagattgttgagaaacaatacaatctatctgatgtttttagcgagttaatagatgaggtcctccgtgccgagtcgggagacaatgaagatgtttatgatgtgcagaaaacaactacaaaatcagatgatattcttccccagtcggcagaaagttgccccgatgaagctgacattgatccactgggtaaacatggtgacgttggcaagaacatgccgaccaacacaaacgtcactcctcaagcaacaccacatacggaatcttgctcgccgatatttgatgcgacgccgcaaataaaggtttctgttgaaaccgatccagctacaaacactcctcaggttgaccagatttcacttgattcggagatgcaaactgtgttagctctacgcgaatatttgtgtgatacgcaatctgacactagcaggaccataatagattatggtgaatattgttcgactgcttctgatatatatgaatcttttgccgatggaaagtgtctcgacaatgtgttcatacagtgcttcatccaatgtgttgatgatcaagctt

SEQ ID NO: 37358 - DNA, 728 bp, Zea Mays
cgcaagctgcgtcagtcatgcatatgatagccatgaatcccggatgatacgtgacaggcgttttacgcacgcataaaaatatgtagtaatgtgcataaatcatgtatagaaggaatcttttgtgccacgaatcacgggaacaaatattaccatgtgcacaccgtttacgactgcataacgctgtgtaacatgatagtataaaccatgcaacatttaaatctccaccgctttgagataaggaaagacgtgctccacgttcgcgtaaataaaggcacagttacgggaggaaacaaattctaatttacagccgctcgtccacgttcgtatctttgatattggcggcggttaacggcggcggaagggagagcaccgggtggcgattaacggcgagaaaatgtccagcatcggcgctggcgatgacatgcaacctgtagcgtctgtgcatagatcaacatgtacgtctatttcaatggacatgcatcctgtagcgtctgcgatcaccagttacacagagggtgtatctgttactccccccgcgacattgagggcaccttgacatattgatgagcacacaaaatcggtagacgtggtcggcgcagataagcacattcccatgagacatattggggcgcatgaacaggatacacctcatattcttcaaagccatttccgaagcaccacagagacctgctacacagctgtaccacctgttgaagcacaatttaagg

SEQ ID NO: 37359 - DNA, 1158 bp, Zea Mays
aaaaagaaaaaaaaagtcctcataaactatagaggtccagttaagaaaatgaaccttttttcaacactaaggcccattcgataaggaggccgatgcgagtcaggccacatgacaaaacaaccgctcctactcttcagtggcaagcacatgttcactcgagcctgttcgcggtggagagtgatagctggggagtggagagtggcgaacccaagtggcggctacggttttacgatctctttctccttagcctcgtctgtcgtcttccttctacctccgttcctaaaccgtaaaccctagacctctcgtgtgtcgatacgatttgcccattcatggcattctctccgacggcgttgttcttgattactgattgagaggtcggattggtgtttcctttgatctgtgagtggagtttgaggcaaggagaggggcgacatggtccatgggcacgaagaactagttcgatctcctcgttgctcgcacctcatcgtggctgccgagaagaaggcggccgcatcgcccaagccggcgaccgtcgctccggccaaactggccaccgcccgcgcaggctgtaaaagagaccaggaactatggggctccagctattggggcaggacgtggtagatgtagcttctgtggaggcaggatgggaccaaggcgtgaatttggtgagggcaatggcaatggtgttgagggaggttatggtggtggtggatttggagatagtggtttcccgcggagggaggaaggtgatggaaaggctatgggaagaggccatggaccacgtcagccttaccgtggtggtggtcgccgtggtggctatactgatagtgaggctggtgatgagtctggtcgcccccctcgccgggcctatgagcgccacagtggcacaggtagaggttatggaatgaagtgtgaggtgcgctggccgtggcatctggggaattgtgactgatgaagcccttgcacaagaaacagtagaaactgagggggctcctgctgtggctgaggctgaaaacaagctggaagaagcaccacaatctgaggttgagaagggcaaagagggcgaatcaactgaagtggaggagcctgaagataagttccgaagcaccacagagacctgctacacagctgtaccacctgttgaagcacaatttaagg

SEQ ID NO: 37360 - DNA, 2138 bp, Zea Mays
aaaaagaaaaaaaaagtcctcataaactatagaggtccagttaagaaaatgaaccttttttcaacactaaggcccattcgataaggaggccgatgcgagtcaggccacatgacaaaacaaccgctcctactcttcagtggcaagcacatgttcactcgagcctgttcgcggtggagagtgatagctggggagtggagagtggcgaacccaagtggcggctacggttttacgatctctttctccttagcctcgtctgtcgtcttccttctacctccgttcctaaaccgtaaaccctagacctctcgtgtgtcgatacgatttgcccattcatggcattctctccgacggcgttgttcttgattactgattgagaggtcggattggtgtttcctttgatctgtgagtggagtttgaggcaaggagaggggcgacatggtccatgggcacgaagaactagttcgatctcctcgttgctcgcacctcatcgtggctgccgagaagaaggcggccgcatcgcccaagccggcgaccgtcgctccggccaaactggccaccgcccgcgcaggctgtaaaagagaccaggaactatggggctccagctattggggcaggacgtggtagatgtagcttctgtggaggcaggatgggaccaaggcgtgaatttggtgagggcaatggcaatggtgttgagggaggttatggtggtggtggatttggagatagtggtttcccgcggagggaggaaggtgatggaaaggctatgggaagaggccatggaccacgtcagccttaccgtggtggtggtcgccgtggtggctatactgatagtgaggctggtgatgagtctggtcgcccccctcgccgggcctatgagcgccacagtggcacaggtagaggttatggaatgaagtgtgaggtgcgctggccgtggcatctggggaattgtgactgatgaagcccttgcacaagaaacagtagaaactgagggggctcctgctgtggctgaggctgaaaacaagctggaagaagcaccacaatctgaggttgagaagggcaaagagggcgaatcaactgaagtggaggagcctgaagataaggtagttgatatttttaaatggtaagtgctgaaactgcagcttagatatgatttcatgtctccgatttcctaaagctatcatgcaattcttgtggtcgttgatgttgtgtgatagtttttttggaggccagccaaagctgttctcccaagtcttaactaatctcaatattctctgctaaactttcaatatgtttgtacctacaccctgatccatggagcagcataagatgagtgattcataaatactgttgctgaaatcgtagaagaccatggatttaaaaaattgacttattctccattcccactataatacttgctatcttattaaggaaagcaataatagagcctctttctaatcactaatcagttatagaactcatactgtattactatttggtttccaattaatgtggtttttattcttctcatgcacacttactggtgaaaagatgtaacaatacaatctacagatttgtcattatgcttaaattaaccagtaacatacgagtattggagtctttaccattataatcaatctggtattttctgagctgggaagatgccatctgccacatctgtgtcctgtgcaccacctaaagtatttggaactgttgcataactatgtaactgaatgaactgagtgattctgtttatttgtgcagttaataccagttttttgtgttactgacgatggaaaaatatctaggctctgcacagccgcatcgcagtgtttgacattattttcagaaattgtttgccatgctcttgttttttggtgatgatctgttactgattatgggctgattgatccagtgagtcttgcacattcaacaaattgttggctctgcaagtgctcaatttcacccagcctatagatagcttaggtagcagcgtcaaggaagctgctgcacatttatggctctctattaaaaatacgaacacacttgatctaccgtaggcatgtcacatggacatacaacatacctcagcatttttttgagagcatgtgttgtgtggtttctgtttactaattgagtttaat

SEQ ID NO: 37361 - DNA, 2474 bp, Zea Mays
aaaaagaaaaaaaaagtcctcataaactatagaggtccagttaagaaaatgaaccttttttcaacactaaggcccattcgataaggaggccgatgcgagtcaggccacatgacaaaacaaccgctcctactcttcagtggcaagcacatgttcactcgagcctgttcgcggtggagagtgatagctggggagtggagagtggcgaacccaagtggcggctacggttttacgatctctttctccttagcctcgtctgtcgtcttccttctacctccgttcctaaaccgtaaaccctagacctctcgtgtgtcgatacgatttgcccattcatggcattctctccgacggcgttgttcttgattactgattgagaggtcggattggtgtttcctttgatctgtgagtggagtttgaggcaaggagaggggcgacatggtccatgggcacgaagaactagttcgatctcctcgttgctcgcacctcatcgtggctgccgagaagaaggcggccgcatcgcccaagccggcgaccgtcgctccggccaaactggccaccgcccgcgcaggctgtaaaagagaccaggaactatggggctccagctattggggcaggacgtggtagatgtagcttctgtggaggcaggatgggaccaaggcgtgaatttggtgagggcaatggcaatggtgttgagggaggttatggtggtggtggatttggagatagtggtttcccgcggagggaggaaggtgatggaaaggctatgggaagaggccatggaccacgtcagccttaccgtggtggtggtcgccgtggtggctatactgatagtgaggctggtgatgagtctggtcgcccccctcgccgggcctatgagcgccacagtggcacaggtagaggttatggaatgaagtgtgaggtgcgctggccgtggcatctggggaattgtgactgatgaagcccttgcacaagaaacagtagaaactgagggggctcctgctgtggctgaggctgaaaacaagctggaagaagcaccacaatctgaggttgagaagggcaaagagggcgaatcaactgaagtggaggagcctgaagataaggtacaagccatactatttatctcatgaaatcaatttgcatgtattgtactgttgtgggcttgtcgaaatatcatttctccctccataaatgatattgatgcgttacaatgtgaagaaactaatttctttaagcttgaagtttatcttgttttctagtagcccaagctttaatgacacattcttaaaaatagtttcagtgctagaaacgtccaaaaatagtttcaggataccggatacccttcttgcatgtaatagatagtacaagtaaaggttttatgtcttgtttcttatctactactgtcatgtttaaaaagtgtaaaactttagcatttggtgcctgctagtggtgtgccacatcttatcattcttgtataccggcaaacaacttaggttgtttctgcaatttagggagaaatattttagatgccaaatatctgcactaaaagctgttgtggattcctgtttagacattggaaaatattagacagctagctgagctccctgaagcttttcaggatagaaggctacagattataaagttgccacatggaaaatgatgtttgtactcttggttcacgtgatggaagcacatgtgatagtaattagaagttgcatgaaaggttattgaggcaactgagtaaatcctttactagggacaaatgtggtaatccgaattgttaggacaaatttaatattttaaaatagacatgtataaaatttgatgctgatttttcttatattatcaaacatattattacaaataagaatacatttttgcataaattgttttatgcattacttgctctctacaacaaaaaggtaaaaagataaccgaatttgtatccgaatccatatcgaattttatttctatcatttgaaaaaatatatgataaatttgaggtttacactttatgaatctttacaagctcaatgctaaaaataagaatatgaatttgcatagtggattctatatcctatttattcgcattcatagaaaaagacaagctatccgaataattactattttcatcctgttctcatccctgccgtttcctataacttcatgtttgctttgtgaatcaattgactcttgagtttttagcagcatataattgttgatcctctcaggtagttgatatttttaaatgtgagtcttgcacattcaacaaattgttggctctgcaagtgctcaatttcacccagcctatagatagcttaggtagcagcgtcaaggaagctgctgcacatttatggctctctattaaaaatacgaacacacttgatctaccgtaggcatgtcacatggacatacaacatacctcagcatttttttgagagcatgtgttgtgtggtttctgtttactaattgagtttaat

SEQ ID NO: 37362 - DNA, 1713 bp, Zea Mays
aaaaagaaaaaaaaagtcctcataaactatagaggtccagttaagaaaatgaaccttttttcaacactaaggcccattcgataaggaggccgatgcgagtcaggccacatgacaaaacaaccgctcctactcttcagtggcaagcacatgttcactcgagcctgttcgcggtggagagtgatagctggggagtggagagtggcgaacccaagtggcggctacgtaaaagagaccaggaactatggggctccagctattggggcaggacgtggtagatgtagcttctgtggaggcaggatgggaccaaggcgtgaatttggtgagggcaatggcaatggtgttgagggaggttatggtggtggtggatttggagatagtggtttcccgcggagggaggaaggtgatggaaaggctatgggaagaggccatggaccacgtcagccttaccgtggtggtggtcgccgtggtggctatactgatagtgaggctggtgatgagtctggtcgcccccctcgccgggcctatgagcgccacagtggcacagaaacagtagaaactgagggggctcctgctgtggctgaggctgaaaacaagctggaagaagcaccacaatctgaggttgagaagggcaaagagggcgaatcaactgaagtggaggagcctgaagataaggtagttgatatttttaaatggtaagtgctgaaactgcagcttagatatgatttcatgtctccgatttcctaaagctatcatgcaattcttgtggtcgttgatgttgtgtgatagtttttttggaggccagccaaagctgttctcccaagtcttaactaatctcaatattctctgctaaactttcaatatgtttgtacctacaccctgatccatggagcagcataagatgagtgattcataaatactgttgctgaaatcgtagaagaccatggatttaaaaaattgacttattctccattcccactataatacttgctatcttattaaggaaagcaataatagagcctctttctaatcactaatcagttatagaactcatactgtattactatttggtttccaattaatgtggtttttattcttctcatgcacacttactggtgaaaagatgtaacaatacaatctacagatttgtcattatgcttaaattaaccagtaacatacgagtattggagtctttaccattataatcaatctggtattttctgagctgggaagatgccatctgccacatctgtgtcctgtgcaccacctaaagtatttggaactgttgcataactatgtaactgaatgaactgagtgattctgtttatttgtgcagttaataccagttttttgtgttactgacgatggaaaaatatctaggctctgcacagccgcatcgcagtgtttgacattattttcagaaattgtttgccatgctcttgttttttggtgatgatctgttactgattatgggctgattgatccagtgagtcttgcacattcaacaaattgttggctctgcaagtgctcaatttcacccagcctatagatagcttaggtagcagcgtcaaggaagctgctgcacatttatggctctctattaaaaatacgaacacacttgatctaccgtaggcatgtcacatggacatacaacatacctcagcatttttttgagagcatgtgttgtgtggtttctgtttactaattgagtttaat

SEQ ID NO: 37363 - DNA, 2876 bp, Zea Mays
aaaaagaaaaaaaaagtcctcataaactatagaggtccagttaagaaaatgaaccttttttcaacactaaggcccattcgataaggaggccgatgcgagtcaggccacatgacaaaacaaccgctcctactcttcagtggcaagcacatgttcactcgagcctgttcgcggtggagagtgatagctggggagtggagagtggcgaacccaagtggcggctacgtaaaagagaccaggaactatggggctccagctattggggcaggacgtggtagatgtagcttctgtggaggcaggatgggaccaaggcgtgaatttggtgagggcaatggcaatggtgttgagggaggttatggtggtggtggatttggagatagtggtttcccgcggagggaggaaggtgatggaaaggctatgggaagaggccatggaccacgtcagccttaccgtggtggtggtcgccgtggtggctatactgatagtgaggctggtgatgagtctggtcgcccccctcgccgggcctatgagcgccacagtggcacagaaacagtagaaactgagggggctcctgctgtggctgaggctgaaaacaagctggaagaagcaccacaatctgaggttgagaagggcaaagagggcgaatcaactgaagtggaggagcctgaagataaggtacaagccatactatttatctcatgaaatcaatttgcatgtattgtactgttgtgggcttgtcgaaatatcatttctccctccataaatgatattgatgcgttacaatgtgaagaaactaatttctttaagcttgaagtttatcttgttttctagtagcccaagctttaatgacacattcttaaaaatagtttcagtgctagaaacgtccaaaaatagtttcaggataccggatacccttcttgcatgtaatagatagtacaagtaaaggttttatgtcttgtttcttatctactactgtcatgtttaaaaagtgtaaaactttagcatttggtgcctgctagtggtgtgccacatcttatcattcttgtataccggcaaacaacttaggttgtttctgcaatttagggagaaatattttagatgccaaatatctgcactaaaagctgttgtggattcctgtttagacattggaaaatattagacagctagctgagctccctgaagcttttcaggatagaaggctacagattataaagttgccacatggaaaatgatgtttgtactcttggttcacgtgatggaagcacatgtgatagtaattagaagttgcatgaaaggttattgaggcaactgagtaaatcctttactagggacaaatgtggtaatccgaattgttaggacaaatttaatattttaaaatagacatgtataaaatttgatgctgatttttcttatattatcaaacatattattacaaataagaatacatttttgcataaattgttttatgcattacttgctctctacaacaaaaaggtaaaaagataaccgaatttgtatccgaatccatatcgaattttatttctatcatttgaaaaaatatatgataaatttgaggtttacactttatgaatctttacaagctcaatgctaaaaataagaatatgaatttgcatagtggattctatatcctatttattcgcattcatagaaaaagacaagctatccgaataattactattttcatcctgttctcatccctgccgtttcctataacttcatgtttgctttgtgaatcaattgactcttgagtttttagcagcatataattgttgatcctctcaggtagttgatatttttaaatggtaagtgctgaaactgcagcttagatatgatttcatgtctccgatttcctaaagctatcatgcaattcttgtggtcgttgatgttgtgtgatagtttttttggaggccagccaaagctgttctcccaagtcttaactaatctcaatattctctgctaaactttcaatatgtttgtacctacaccctgatccatggagcagcataagatgagtgattcataaatactgttgctgaaatcgtagaagaccatggatttaaaaaattgacttattctccattcccactataatacttgctatcttattaaggaaagcaataatagagcctctttctaatcactaatcagttatagaactcatactgtattactatttggtttccaattaatgtggtttttattcttctcatgcacacttactggtgaaaagatgtaacaatacaatctacagatttgtcattatgcttaaattaaccagtaacatacgagtattggagtctttaccattataatcaatctggtattttctgagctgggaagatgccatctgccacatctgtgtcctgtgcaccacctaaagtatttggaactgttgcataactatgtaactgaatgaactgagtgattctgtttatttgtgcagttaataccagttttttgtgttactgacgatggaaaaatatctaggctctgcacagccgcatcgcagtgtttgacattattttcagaaattgtttgccatgctcttgttttttggtgatgatctgttactgattatgggctgattgatccagtgagtcttgcacattcaacaaattgttggctctgcaagtgctcaatttcacccagcctatagatagcttaggtagcagcgtcaaggtttttatgcattacctttctgtgcataaattcaggaagctgctgcacatttatggctctctattaaaaatacgaacacacttgatctaccgtaggcatgtcacatggacatacaacatacctcagcatttttttgagagcatgtgttgtgtggtttctgtttactaattgagtttaat

SEQ ID NO: 37364 - DNA, 2955 bp, Zea Mays
aaaaagaaaaaaaaagtcctcataaactatagaggtccagttaagaaaatgaaccttttttcaacactaaggcccattcgataaggaggccgatgcgagtcaggccacatgacaaaacaaccgctcctactcttcagtggcaagcacatgttcactcgagcctgttcgcggtggagagtgatagctggggagtggagagtggcgaacccaagtggcggctacgtaaaagagaccaggaactatggggctccagctattggggcaggacgtggtagatgtagcttctgtggaggcaggatgggaccaaggcgtgaatttggtgagggcaatggcaatggtgttgagggaggttatggtggtggtggatttggagatagtggtttcccgcggagggaggaaggtgatggaaaggctatgggaagaggccatggaccacgtcagccttaccgtggtggtggtcgccgtggtggctatactgatagtgaggctggtgatgagtctggtcgcccccctcgccgggcctatgagcgccacagtggcacaggtagaggttatggaatgaagtgtgaggtgcgctggccgtggcatctggggaattgtgactgatgaagcccttgcacaagaaacagtagaaactgagggggctcctgctgtggctgaggctgaaaacaagctggaagaagcaccacaatctgaggttgagaagggcaaagagggcgaatcaactgaagtggaggagcctgaagataaggtacaagccatactatttatctcatgaaatcaatttgcatgtattgtactgttgtgggcttgtcgaaatatcatttctccctccataaatgatattgatgcgttacaatgtgaagaaactaatttctttaagcttgaagtttatcttgttttctagtagcccaagctttaatgacacattcttaaaaatagtttcagtgctagaaacgtccaaaaatagtttcaggataccggatacccttcttgcatgtaatagatagtacaagtaaaggttttatgtcttgtttcttatctactactgtcatgtttaaaaagtgtaaaactttagcatttggtgcctgctagtggtgtgccacatcttatcattcttgtataccggcaaacaacttaggttgtttctgcaatttagggagaaatattttagatgccaaatatctgcactaaaagctgttgtggattcctgtttagacattggaaaatattagacagctagctgagctccctgaagcttttcaggatagaaggctacagattataaagttgccacatggaaaatgatgtttgtactcttggttcacgtgatggaagcacatgtgatagtaattagaagttgcatgaaaggttattgaggcaactgagtaaatcctttactagggacaaatgtggtaatccgaattgttaggacaaatttaatattttaaaatagacatgtataaaatttgatgctgatttttcttatattatcaaacatattattacaaataagaatacatttttgcataaattgttttatgcattacttgctctctacaacaaaaaggtaaaaagataaccgaatttgtatccgaatccatatcgaattttatttctatcatttgaaaaaatatatgataaatttgaggtttacactttatgaatctttacaagctcaatgctaaaaataagaatatgaatttgcatagtggattctatatcctatttattcgcattcatagaaaaagacaagctatccgaataattactattttcatcctgttctcatccctgccgtttcctataacttcatgtttgctttgtgaatcaattgactcttgagtttttagcagcatataattgttgatcctctcaggtagttgatatttttaaatggtaagtgctgaaactgcagcttagatatgatttcatgtctccgatttcctaaagctatcatgcaattcttgtggtcgttgatgttgtgtgatagtttttttggaggccagccaaagctgttctcccaagtcttaactaatctcaatattctctgctaaactttcaatatgtttgtacctacaccctgatccatggagcagcataagatgagtgattcataaatactgttgctgaaatcgtagaagaccatggatttaaaaaattgacttattctccattcccactataatacttgctatcttattaaggaaagcaataatagagcctctttctaatcactaatcagttatagaactcatactgtattactatttggtttccaattaatgtggtttttattcttctcatgcacacttactggtgaaaagatgtaacaatacaatctacagatttgtcattatgcttaaattaaccagtaacatacgagtattggagtctttaccattataatcaatctggtattttctgagctgggaagatgccatctgccacatctgtgtcctgtgcaccacctaaagtatttggaactgttgcataactatgtaactgaatgaactgagtgattctgtttatttgtgcagttaataccagttttttgtgttactgacgatggaaaaatatctaggctctgcacagccgcatcgcagtgtttgacattattttcagaaattgtttgccatgctcttgttttttggtgatgatctgttactgattatgggctgattgatccagtgagtcttgcacattcaacaaattgttggctctgcaagtgctcaatttcacccagcctatagatagcttaggtagcagcgtcaaggtttttatgcattacctttctgtgcataaattcaggaagctgctgcacatttatggctctctattaaaaatacgaacacacttgatctaccgtaggcatgtcacatggacatacaacatacctcagcatttttttgagagcatgtgttgtgtggtttctgtttactaattgagtttaat

SEQ ID NO: 37365 - DNA, 3143 bp, Zea Mays
aaaaagaaaaaaaaagtcctcataaactatagaggtccagttaagaaaatgaaccttttttcaacactaaggcccattcgataaggaggccgatgcgagtcaggccacatgacaaaacaaccgctcctactcttcagtggcaagcacatgttcactcgagcctgttcgcggtggagagtgatagctggggagtggagagtggcgaacccaagtggcggctacggttttacgatctctttctccttagcctcgtctgtcgtcttccttctacctccgttcctaaacctttgaggcaaggagaggggcgacatggtccatgggcacgaagaactagttcgatctcctcgttgctcgcacctcatcgtggctgccgagaagaaggcggccgcatcgcccaagccggcgaccgtcgctccggccaaactggccaccgcccgcgcaggctgtaaaagagaccaggaactatggggctccagctattggggcaggacgtggtagatgtagcttctgtggaggcaggatgggaccaaggcgtgaatttggtgagggcaatggcaatggtgttgagggaggttatggtggtggtggatttggagatagtggtttcccgcggagggaggaaggtgatggaaaggctatgggaagaggccatggaccacgtcagccttaccgtggtggtggtcgccgtggtggctatactgatagtgaggctggtgatgagtctggtcgcccccctcgccgggcctatgagcgccacagtggcacaggtagaggttatggaatgaagtgtgaggtgcgctggccgtggcatctggggaattgtgactgatgaagcccttgcacaagaaacagtagaaactgagggggctcctgctgtggctgaggctgaaaacaagctggaagaagcaccacaatctgaggttgagaagggcaaagagggcgaatcaactgaagtggaggagcctgaagataaggtacaagccatactatttatctcatgaaatcaatttgcatgtattgtactgttgtgggcttgtcgaaatatcatttctccctccataaatgatattgatgcgttacaatgtgaagaaactaatttctttaagcttgaagtttatcttgttttctagtagcccaagctttaatgacacattcttaaaaatagtttcagtgctagaaacgtccaaaaatagtttcaggataccggatacccttcttgcatgtaatagatagtacaagtaaaggttttatgtcttgtttcttatctactactgtcatgtttaaaaagtgtaaaactttagcatttggtgcctgctagtggtgtgccacatcttatcattcttgtataccggcaaacaacttaggttgtttctgcaatttagggagaaatattttagatgccaaatatctgcactaaaagctgttgtggattcctgtttagacattggaaaatattagacagctagctgagctccctgaagcttttcaggatagaaggctacagattataaagttgccacatggaaaatgatgtttgtactcttggttcacgtgatggaagcacatgtgatagtaattagaagttgcatgaaaggttattgaggcaactgagtaaatcctttactagggacaaatgtggtaatccgaattgttaggacaaatttaatattttaaaatagacatgtataaaatttgatgctgatttttcttatattatcaaacatattattacaaataagaatacatttttgcataaattgttttatgcattacttgctctctacaacaaaaaggtaaaaagataaccgaatttgtatccgaatccatatcgaattttatttctatcatttgaaaaaatatatgataaatttgaggtttacactttatgaatctttacaagctcaatgctaaaaataagaatatgaatttgcatagtggattctatatcctatttattcgcattcatagaaaaagacaagctatccgaataattactattttcatcctgttctcatccctgccgtttcctataacttcatgtttgctttgtgaatcaattgactcttgagtttttagcagcatataattgttgatcctctcaggtagttgatatttttaaatggtaagtgctgaaactgcagcttagatatgatttcatgtctccgatttcctaaagctatcatgcaattcttgtggtcgttgatgttgtgtgatagtttttttggaggccagccaaagctgttctcccaagtcttaactaatctcaatattctctgctaaactttcaatatgtttgtacctacaccctgatccatggagcagcataagatgagtgattcataaatactgttgctgaaatcgtagaagaccatggatttaaaaaattgacttattctccattcccactataatacttgctatcttattaaggaaagcaataatagagcctctttctaatcactaatcagttatagaactcatactgtattactatttggtttccaattaatgtggtttttattcttctcatgcacacttactggtgaaaagatgtaacaatacaatctacagatttgtcattatgcttaaattaaccagtaacatacgagtattggagtctttaccattataatcaatctggtattttctgagctgggaagatgccatctgccacatctgtgtcctgtgcaccacctaaagtatttggaactgttgcataactatgtaactgaatgaactgagtgattctgtttatttgtgcagttaataccagttttttgtgttactgacgatggaaaaatatctaggctctgcacagccgcatcgcagtgtttgacattattttcagaaattgtttgccatgctcttgttttttggtgatgatctgttactgattatgggctgattgatccagtgagtcttgcacattcaacaaattgttggctctgcaagtgctcaatttcacccagcctatagatagcttaggtagcagcgtcaaggaagctgctgcacatttatggctctctattaaaaatacgaacacacttgatctaccgtaggcatgtcacatggacatacaacatacctcagcatttttttgagagcatgtgttgtgtggtttctgtttactaattgagtttaat

SEQ ID NO: 37366 - DNA, 1512 bp, Zea Mays
aaaaagaaaaaaaaagtcctcataaactatagaggtccagttaagaaaatgaaccttttttcaacactaaggcccattcgataaggaggccgatgcgagtcaggccacatgacaaaacaaccgctcctactcttcagtggcaagcacatgttcactcgagcctgttcgcggtggagagtgatagctggggagtggagagtggcgaacccaagtggcggctacggttttacgatctctttctccttagcctcgtctgtcgtcttccttctacctccgttcctaaaccgtaaaccctagacctctcgtgtgtcgatacgatttgcccattcatggcattctctccgacggcgttgttcttgattactgattgagaggtcggattggtgtttcctttgatctgtgagtggagtttgaggcaaggagaggggcgacatggtccatgggcacgaagaactagttcgatctcctcgttgctcgcacctcatcgtggctgccgagaagaaggcggccgcatcgcccaagccggcgaccgtcgctccggccaaactggccaccgcccgcgcaggctgtaaaagagaccaggaactatggggctccagctattggggcaggacgtggtagatgtagcttctgtggaggcaggatgggaccaaggcgtgaatttggtgagggcaatggcaatggtgttgagggaggttatggtggtggtggatttggagatagtggtttcccgcggagggaggaaggtgatggaaaggctatgggaagaggccatggaccacgtcagccttaccgtggtggtggtcgccgtggtggctatactgatagtgaggctggtgatgagtctggtcgcccccctcgccgggcctatgagcgccacagtggcacaggtagaggttatggaatgaagtgtgaggtgcgctggccgtggcatctggggaattgtgactgatgaagcccttgcacaagaaacagtagaaactgagggggctcctgctgtggctgaggctgaaaacaagctggaagaagcaccacaatctgaggttgagaagggcaaagagggcgaatcaactgaagtggaggagcctgaagataagttaataccagttttttgtgttactgacgatggaaaaatatctaggctctgcacagccgcatcgcagtgtttgacattattttcagaaattgtttgccatgctcttgttttttggtgatgatctgttactgattatgggctgattgatccagtgagtcttgcacattcaacaaattgttggctctgcaagtgctcaatttcacccagcctatagatagcttaggtagcagcgtcaaggtttttatgcattacctttctgtgcataaattcaggaagctgctgcacatttatggctctctattaaaaatacgaacacacttgatctaccgtaggcatgtcacatggacatacaacatacctcagcatttttttgagagcatgtgttgtgtggtttctgtttactaattgagtttaat

SEQ ID NO: 37367 - DNA, 1087 bp, Zea Mays
aaaaagaaaaaaaaagtcctcataaactatagaggtccagttaagaaaatgaaccttttttcaacactaaggcccattcgataaggaggccgatgcgagtcaggccacatgacaaaacaaccgctcctactcttcagtggcaagcacatgttcactcgagcctgttcgcggtggagagtgatagctggggagtggagagtggcgaacccaagtggcggctacgtaaaagagaccaggaactatggggctccagctattggggcaggacgtggtagatgtagcttctgtggaggcaggatgggaccaaggcgtgaatttggtgagggcaatggcaatggtgttgagggaggttatggtggtggtggatttggagatagtggtttcccgcggagggaggaaggtgatggaaaggctatgggaagaggccatggaccacgtcagccttaccgtggtggtggtcgccgtggtggctatactgatagtgaggctggtgatgagtctggtcgcccccctcgccgggcctatgagcgccacagtggcacagaaacagtagaaactgagggggctcctgctgtggctgaggctgaaaacaagctggaagaagcaccacaatctgaggttgagaagggcaaagagggcgaatcaactgaagtggaggagcctgaagataagttaataccagttttttgtgttactgacgatggaaaaatatctaggctctgcacagccgcatcgcagtgtttgacattattttcagaaattgtttgccatgctcttgttttttggtgatgatctgttactgattatgggctgattgatccagtgagtcttgcacattcaacaaattgttggctctgcaagtgctcaatttcacccagcctatagatagcttaggtagcagcgtcaaggtttttatgcattacctttctgtgcataaattcaggaagctgctgcacatttatggctctctattaaaaatacgaacacacttgatctaccgtaggcatgtcacatggacatacaacatacctcagcatttttttgagagcatgtgttgtgtggtttctgtttactaattgagtttaat

SEQ ID NO: 37368 - DNA, 948 bp, Zea Mays
aaaaagaaaaaaaaagtcctcataaactatagaggtccagttaagaaaatgaaccttttttcaacactaaggcccattcgataaggaggccgatgcgagtcaggccacatgacaaaacaaccgctcctactcttcagtggcaagcacatgttcactcgagcctgttcgcggtggagagtgatagctggggagtggagagtggcgaacccaagtggcggctacggttttacgatctctttctccttagcctcgtctgtcgtcttccttctacctccgttcctaaaccgtaaaccctagacctctcgtgtgtcgatacgatttgcccattcatggcattctctccgacggcgttgttcttgattactgattgagaggtcggattggtgtttcctttgatctgtgagtggagtttgaggcaaggagaggggcgacatggtccatgggcacgaagaactagttcgatctcctcgttgctcgcacctcatcgtggctgccgagaagaaggcggccgcatcgcccaagccggcgaccgtcgctccggccaaactggccaccgcccgcgcaggctgagaaacagtagaaactgagggggctcctgctgtggctgaggctgaaaacaagctggaagaagcaccacaatctgaggttgagaagggcaaagagggcgaatcaactgaagtggaggagcctgaagataaggtagttgatatttttaaatgtgagtcttgcacattcaacaaattgttggctctgcaagtgctcaatttcacccagcctatagatagcttaggtagcagcgtcaaggaagctgctgcacatttatggctctctattaaaaatacgaacacacttgatctaccgtaggcatgtcacatggacatacaacatacctcagcatttttttgagagcatgtgttgtgtggtttctgtttactaattgagtttaat

SEQ ID NO: 37369 - DNA, 2059 bp, Zea Mays
aaaaagaaaaaaaaagtcctcataaactatagaggtccagttaagaaaatgaaccttttttcaacactaaggcccattcgataaggaggccgatgcgagtcaggccacatgacaaaacaaccgctcctactcttcagtggcaagcacatgttcactcgagcctgttcgcggtggagagtgatagctggggagtggagagtggcgaacccaagtggcggctacggttttacgatctctttctccttagcctcgtctgtcgtcttccttctacctccgttcctaaaccgtaaaccctagacctctcgtgtgtcgatacgatttgcccattcatggcattctctccgacggcgttgttcttgattactgattgagaggtcggattggtgtttcctttgatctgtgagtggagtttgaggcaaggagaggggcgacatggtccatgggcacgaagaactagttcgatctcctcgttgctcgcacctcatcgtggctgccgagaagaaggcggccgcatcgcccaagccggcgaccgtcgctccggccaaactggccaccgcccgcgcaggctgtaaaagagaccaggaactatggggctccagctattggggcaggacgtggtagatgtagcttctgtggaggcaggatgggaccaaggcgtgaatttggtgagggcaatggcaatggtgttgagggaggttatggtggtggtggatttggagatagtggtttcccgcggagggaggaaggtgatggaaaggctatgggaagaggccatggaccacgtcagccttaccgtggtggtggtcgccgtggtggctatactgatagtgaggctggtgatgagtctggtcgcccccctcgccgggcctatgagcgccacagtggcacagaaacagtagaaactgagggggctcctgctgtggctgaggctgaaaacaagctggaagaagcaccacaatctgaggttgagaagggcaaagagggcgaatcaactgaagtggaggagcctgaagataaggtagttgatatttttaaatggtaagtgctgaaactgcagcttagatatgatttcatgtctccgatttcctaaagctatcatgcaattcttgtggtcgttgatgttgtgtgatagtttttttggaggccagccaaagctgttctcccaagtcttaactaatctcaatattctctgctaaactttcaatatgtttgtacctacaccctgatccatggagcagcataagatgagtgattcataaatactgttgctgaaatcgtagaagaccatggatttaaaaaattgacttattctccattcccactataatacttgctatcttattaaggaaagcaataatagagcctctttctaatcactaatcagttatagaactcatactgtattactatttggtttccaattaatgtggtttttattcttctcatgcacacttactggtgaaaagatgtaacaatacaatctacagatttgtcattatgcttaaattaaccagtaacatacgagtattggagtctttaccattataatcaatctggtattttctgagctgggaagatgccatctgccacatctgtgtcctgtgcaccacctaaagtatttggaactgttgcataactatgtaactgaatgaactgagtgattctgtttatttgtgcagttaataccagttttttgtgttactgacgatggaaaaatatctaggctctgcacagccgcatcgcagtgtttgacattattttcagaaattgtttgccatgctcttgttttttggtgatgatctgttactgattatgggctgattgatccagtgagtcttgcacattcaacaaattgttggctctgcaagtgctcaatttcacccagcctatagatagcttaggtagcagcgtcaaggaagctgctgcacatttatggctctctattaaaaatacgaacacacttgatctaccgtaggcatgtcacatggacatacaacatacctcagcatttttttgagagcatgtgttgtgtggtttctgtttactaattgagtttaat

SEQ ID NO: 37370 - DNA, 1792 bp, Zea Mays
aaaaagaaaaaaaaagtcctcataaactatagaggtccagttaagaaaatgaaccttttttcaacactaaggcccattcgataaggaggccgatgcgagtcaggccacatgacaaaacaaccgctcctactcttcagtggcaagcacatgttcactcgagcctgttcgcggtggagagtgatagctggggagtggagagtggcgaacccaagtggcggctacgtaaaagagaccaggaactatggggctccagctattggggcaggacgtggtagatgtagcttctgtggaggcaggatgggaccaaggcgtgaatttggtgagggcaatggcaatggtgttgagggaggttatggtggtggtggatttggagatagtggtttcccgcggagggaggaaggtgatggaaaggctatgggaagaggccatggaccacgtcagccttaccgtggtggtggtcgccgtggtggctatactgatagtgaggctggtgatgagtctggtcgcccccctcgccgggcctatgagcgccacagtggcacaggtagaggttatggaatgaagtgtgaggtgcgctggccgtggcatctggggaattgtgactgatgaagcccttgcacaagaaacagtagaaactgagggggctcctgctgtggctgaggctgaaaacaagctggaagaagcaccacaatctgaggttgagaagggcaaagagggcgaatcaactgaagtggaggagcctgaagataaggtagttgatatttttaaatggtaagtgctgaaactgcagcttagatatgatttcatgtctccgatttcctaaagctatcatgcaattcttgtggtcgttgatgttgtgtgatagtttttttggaggccagccaaagctgttctcccaagtcttaactaatctcaatattctctgctaaactttcaatatgtttgtacctacaccctgatccatggagcagcataagatgagtgattcataaatactgttgctgaaatcgtagaagaccatggatttaaaaaattgacttattctccattcccactataatacttgctatcttattaaggaaagcaataatagagcctctttctaatcactaatcagttatagaactcatactgtattactatttggtttccaattaatgtggtttttattcttctcatgcacacttactggtgaaaagatgtaacaatacaatctacagatttgtcattatgcttaaattaaccagtaacatacgagtattggagtctttaccattataatcaatctggtattttctgagctgggaagatgccatctgccacatctgtgtcctgtgcaccacctaaagtatttggaactgttgcataactatgtaactgaatgaactgagtgattctgtttatttgtgcagttaataccagttttttgtgttactgacgatggaaaaatatctaggctctgcacagccgcatcgcagtgtttgacattattttcagaaattgtttgccatgctcttgttttttggtgatgatctgttactgattatgggctgattgatccagtgagtcttgcacattcaacaaattgttggctctgcaagtgctcaatttcacccagcctatagatagcttaggtagcagcgtcaaggaagctgctgcacatttatggctctctattaaaaatacgaacacacttgatctaccgtaggcatgtcacatggacatacaacatacctcagcatttttttgagagcatgtgttgtgtggtttctgtttactaattgagtttaat

SEQ ID NO: 37371 - DNA, 1011 bp, Zea Mays
cctcagccgaaaaaaagaaaaaaaaagtcctcataaactatagaggtccagttaagaaaatgaaccttttttcaacactaaggcccattcgataaggaggccgatgcgagtcaggccacatgacaaaacaaccgctcctactcttcagtggcaagcacatgttcactcgagcctgttcgcggtggagagtgatagctggggagtggagagtggcgaacccaagtggcggctacgtaaaagagaccaggaactatggggctccagctattggggcaggacgtggtagatgtagcttctgtggaggcaggatgggaccaaggcgtgaatttggtgagggcaatggcaatggtgttgagggaggttatggtggtggtggatttggagatagtggtttcccgcggagggaggaaggtgatggaaaggctatgggaagaggccatggaccacgtcagccttaccgtggtggtggtcgccgtggtggctatactgatagtgaggctggtgatgagtctggtcgcccccctcgccgggcctatgagcgccacagtggcacaggtagaggttatggaatgaagtgtgaggtgcgctggccgtggcatctggggaattgtgactgatgaagcccttgcacaagaaacagtagaaactgagggggctcctgctgtggctgaggctgaaaacaagctggaagaagcaccacaatctgaggttgagaagggcaaagagggcgaatcaactgaagtggaggagcctgaagataaggtagttgatatttttaaatgtgagtcttgcacattcaacaaattgttggctctgcaagtgctcaatttcacccagcctatagatagcttaggtagcagcgtcaaggaagctgctgcacatttatggctctctattaaaaatacgaacacacttgatctaccgtaggcatgtcacatggacatacaacatacctcagcatttttttgagagcatgtgttgtgtggtttctgtttactaattgagtttaat

SEQ ID NO: 37372 - DNA, 749 bp, Zea Mays
gtggcgtggcacgttcagcgacagagaggttgaggccccttcgctgctcagcggatcggagatgctcgcactgttctcgcaaatcggcacctgttggaccagattattgattggttacatacagaaaaatgtcggtgcgtgtatgaactactactactaccagtatttgtgtgtgcataccatgtcaaagaggctggagcggcgcttcttcttccccaagctgctctgcctgaggaagaacttctgtgcatggctggcgacctgcgtcggggtcctcgtcggcacgtagctcctggagatgcctcgccagtcgcccttgcccagcttctccaggccggaaaggaactgcctgtgctcctcctcgctccatggaactcctgcagtattgcttatgcttagaaacacaccagctgctatgttaccaaccaaccgattattcaaccgactatatctctcagtggcttgatttacagttgcaagattgcactatcaggcagggaagataaagcgactttatttttaccaagaaagtaaagcataatgcaactctttaggtcagagtcagactgatgcacaatactaccaccaaccaataagaaaacaatttgggctaaagaaaagattttggatttccaaaggacaaatcttcttcttttctcttttcatcatcagagaaaatgaaaaacagctctgccatgaggtccgtcagaaaggtacccatttggcgcccccctctccgatccctcctc

SEQ ID NO: 37373 - DNA, 1788 bp, Zea Mays
gtgaggaaaaatctccccatctgctgaaaatccttcactcgtccctctctcggtctgtccctttggagcgaaggcgaaccgcgtcgcgaacccaggatcccatcgagggcaggcgggcagatcccggcgtccgacggcgatgggcgaggaggacgcgagcgccgggggagatccgcagcggctgaagcggatcgccgctgcggcgtacgactacgagaacgatgcgcggtgggccgggtactggtccaacgtcctcgtgccgccccacctcgcctcccgccccgacgtcgtcgaccacttcaagcgcaagttctaccagcgatacatcgatcctggtttggttgttgaaccgatgtcctccatgacttcaactcagtctagcagaccagcagcgaagtcttcagctacaccatctagtgagaatgtcagagctcgggactcagcagagaggactgcaaattcattacagctagacggacggacaataaacttttctatcaatgcctgggtactggttgtagctagtctcggaatactcccagttctacccaaccatatctcgagtaaagcataccgtctttcattgctaggaacaatatgctcgtctgcatattctttatatggcacttatgggaaaccaagagcatggaatatgcctgcaattcagtcctggttgcagtctattattgtagctaaggactttgttcacttgatgttctctcttatgatgttcacatctaatgtgcactttaagattgctctacttcctgtgctttgctgggcgcttgatcatgttgctcgattcctaaggcgtaattttacacactcttctttatacaggaagtacttagaggacccttgcctatgggtagagacaaacaacactacactcagcctactttgttcgaatgctgaaatcaccctggggtttctcatgatcatctcgcttttctcgtcgagacgcaatataatccagacatttatgtactttcatcttttgaagttgatgtaccattctcctgtgacatctggttaccaccagagcgtgtgggcaagaataggccgggctgtaaacccgtacatttaccgctatgcgccattcctgaacacacctatttcggcagtccagagatggtggctgaggtaggaaagcatggaccgcagcacagtgaaaatatgcctaaacagctactctgatctcagcgcctcgatcttttagaaggcgtgcttgcacggcgtgttcttttcttgtaaaggttgtattctcagttcatgtcttactgagctactgaaggcataacactagagaatttcttacgatgagcagtagcgcttgagcaaactgtcgatttgatgggatacagttacaggcataaagtgattgcacagaattttcataaggatgcttgctgcagtcaataggatggaacatgcgagtggcactattgattcttgaagtaataaatgatgttcttgtctattttattttgctactgctaggttatcttggttctgcactgttctgtgtctgttattatggaggaaatgccttagcaactctaacaaactctctatattcttcctaatctatataaatagagttttttttaaaaaaatacctctaacagcttatttaaatggctatctaaatatagccatttttttatttcgggttttctttagctaaatatagaaaaatatgaatggctctttagagtgcaaacaatatatataaaagattgttgaaaattaaaaaaatatagaaattgaattttatataaatgactc

SEQ ID NO: 37374 - DNA, 1829 bp, Zea Mays
gtgaggaaaaatctccccatctgctgaaaatccttcactcgtccctctctcggtctgtccctttggagcgaaggcgaaccgcgtcgcgaacccaggatcccatcgagggcaggcgggcagatcccggcgtccgacggcgatgggcgaggaggacgcgagcgccgggggagatccgcagcggctgaagcggatcgccgctgcggcgtacgactacgagaacgatgcgcggtgggccgggtactggtccaacgtcctcgtgccgccccacctcgcctcccgccccgacgtcgtcgaccacttcaagcgcaagttctaccagcgatacatcgatcctggtttggttgttgaaccgatgtcctccatgacttcaactcagtctagcagaccagcagcgaagtcttcagctacaccatctagtgagaatgtcagagctcgggactcaggctctagcacgagatcaactgggacctcccaacatccaccagcagagaggactgcaaattcattacagctagacggacggacaataaacttttctatcaatgcctgggtactggttgtagctagtctcggaatactcccagttctacccaaccatatctcgagtaaagcataccgtctttcattgctaggaacaatatgctcgtctgcatattctttatatggcacttatgggaaaccaagagcatggaatatgcctgcaattcagtcctggttgcagtctattattgtagctaaggactttgttcacttgatgttctctcttatgatgttcacatctaatgtgcactttaagttgctctacttcctgtgctttgctgggcgcttgatcatgttgctcgattcctaaggcgtaattttacacactcttctttatacaggaagtacttagaggacccttgcctatgggtagagacaaacaacactacactcagcctactttgttcgaatgctgaaatcaccctggggtttctcatgatcatctcgcttttctcgtcgagacgcaatataatccagacatttatgtactttcatcttttgaagttgatgtaccattctcctgtgacatctggttaccaccagagcgtgtgggcaagaataggccgggctgtaaacccgtacatttaccgctatgcgccattcctgaacacacctatttcggcagtccagagatggtggctgaggtaggaaagcatggaccgcagcacagtgaaaatatgcctaaacagctactctgatctcagcgcctcgatcttttagaaggcgtgcttgcacggcgtgttcttttcttgtaaaggttgtattctcagttcatgtcttactgagctactgaaggcataacactagagaatttcttacgatgagcagtagcgcttgagcaaactgtcgatttgatgggatacagttacaggcataaagtgattgcacagaattttcataaggatgcttgctgcagtcaataggatggaacatgcgagtggcactattgattcttgaagtaataaatgatgttcttgtctattttattttgctactgctaggttatcttggttctgcactgttctgtgtctgttattatggaggaaatgccttagcaactctaacaaactctctatattcttcctaatctatataaatagagttttttttaaaaaaatacctctaacagcttatttaaatggctatctaaatatagccatttttttatttcgggttttctttagctaaatatagaaaaatatgaatggctctttagagtgcaaacaatatatataaaagattgttgaaaattaaaaaaatatagaaattgaattttatataaatgactc

SEQ ID NO: 37375 - DNA, 1344 bp, Zea Mays
agcgagagcacaagaaccatcgccgccgggaccgtgacgctggacggcctgaagcggctgcggggaggggtgttaaacgggcctttcctgggctacggtggacagcccagttactaagttaaccctcgctcttcctttcccctcggttctcgttgtctgacaggcaaagcggctatgacgacaacggccgccgggtacggctgctgctgggcggggattccgcccttcgcgttgttgccgcggattctctcgacccgccgggagactcctcctcctcctcctcctcgcgcttcccttgtcgcctcctcctcgaagctcagggcgctggcaccacggctgagagtttcgaaccgtccaaggaggctcattgtctccgcttcctcctccggcgaggccaattcggacgcggcgccgtcgccaacggtcagcgctctctatctttcttctctatgatgtttccagattgtcagggtgaattgatttgggttatggatgtgctccgtgttgcctggaatcattcagtgaatgcgattatatagggaatgatttggattgggtagccaccagcaacggggaaacagtaattgcttgggcttttggaccactgtttattattaaccctgaaattggataactgacgagattcaactttaatgattcatatagtcagaatatttgtggttttctagcaccacacatctgctttgtccattgtatgactggcgtacgttgttcatttgaaattgctagttctttcctgagattgtactttgtgtgcatttcttgtaggtctttcgttgcttgtgtgtcttgcagattatggcattcagagaacatcactttttgtaaatttggcaggttgatcgcatacatatgtgagcatatgaaaaagaaatgatattatataattcagcggtttattgcatgaaagacaacataacagattgcttgctgattgaggaacaaactaggttcagaaatgaataacaagtgctcaactttgctggaagccgctattgatataaagcttcctagaagaagcttgcttgttcaatttacatgcaacgcatgtggcgaaaggaccaagcgcttgataaacagagtagcctatgaaagaggcacagtttttcttcagtgtgcagggtgccaggtgtaccataagtttgttgataatcttgggctagttgttgagtatgatctacgagaagaaaacgagctacaaggagaaaatgcggtggacaccagttctgaagattgatctgctgtgagaagcggtgttggttatactggcgctactgatatggtgctgatatttgatatccacgctactctggcatcattgag

SEQ ID NO: 37376 - DNA, 560 bp, Zea Mays
gcagaagcagcgagagcacaagaaccatcgccgccgggaccgtgacgctggacggcctgaagcggctgcggggaggggtgttaaacgggcctttcctgggctacggtggacagcccagttactaagttaaccctcgctcttcctttcccctcggttctcgttgtctgacaggcaaagcggctatgacgacaacggccgccgggtacggctgctgctgggcggggattccgcccttcgcgttgttgccgcggattctctcgacccgccgggagactcctcctcctcctcctcctcgcgcttcccttgtcgcctcctcctcgaagctcagggcgctggcaccacggctgagagtttcgaaccgtccaaggaggctcattgtctccgcttcctcctccggcgaggccaattcggacgcggcgccgtcgccaacggaagccgctattgatataaagcttcctagaagaagcttgcttgttcaatttacatgcaacgcatgtggcgaaaggaccaagcgcttgataaacagagtagcctatgaaagaggcacagtttttcttcag

SEQ ID NO: 37377 - DNA, 780 bp, Zea Mays
gttctctacgcttattaaaagaaaaagagagtataatataacggataataacttggaagggaagtacaaggactggcagaagaagttacatcctgacctagttcactcgaaatctgagagaggggctatgctgcggagcagtcagcacttgtgatcgatgcataccgcacactcagcaaacctttatcaagggcattgtacttgttgaaactcgagggtatacatgtggatgaagaaaagactatcaatgatccagaacttcttatggagatgatggagatacgggaagctgtcagtgatgccagtgattctcaaaccctggagaagatccaatctcagattaaggcaaagctcgaaacctggtccgattccttccaggaggcatttgacaggaaggattttgaccgtgcggtggaagccacacagagaatgaggtactatgaacgtgcagtggaagaaacagtgaagaagctctgagcctctgatcttctgttacagctgccaaaggtggtgaggcttgtgtcttttcgtacggttccttgcagatccccctgtgctcacgcagctacattgcaacagtaacatagtacagagtaggtcattttttttacttatacgttgcaatgtattatatgactacattggaatatgttactgtagctacattgcaacagtaatatatatgactacacaagaccatacgttgtaatgctaaattccaaatgtatccatggctggtgcaccgcaggtaataataaaacaaaactaaaagagtagata

SEQ ID NO: 37378 - DNA, 868 bp, Zea Mays
ctccatatttgtaccatagttagttattgattaacttatctggagattagttcataaagttatgtttgtttgcgatgtagaagagttctctacgcttattaaaagaaaaagagagtataatataacggataataacttggaagggaagtacaaggactggcagaagaagttacatcctgacctagttcactcgaaatctgagaaagagaggggctatgctgcggagcagtcagcacttgtgatcgatgcataccgcacactcagcaaacctttatcaagggcattgtacttgttgaaactcgagggtatacatgtggatgaagaaaagactatcaatgatccagaacttcttatggagatgatggagatacgggaagctgtcagtgatgccagtgattctcaaaccctggagaagatccaatctcagattaaggcaaagctcgaaacctggtccgattccttccaggaggcatttgacaggaaggattttgaccgtgcggtggaagccacacagagaatgaggtactatgaacgtgcagtggaagaaacagtgaagaagctctgagcctctgatcttctgttacagctgccaaaggtggtgaggcttgtgtcttttcgtacggttccttgcagatccccctgtgctcacgcagctacattgcaacagtaacatagtacagagtaggtcattttttttacttatacgttgcaatgtattatatgactacattggaatatgttactgtagctacattgcaacagtaatatatatgactacacaagaccatacgttgtaatgctaaattccaaatgtatccatggctggtgcaccgcaggtaataataaaacaaaactaaaagagtagata

SEQ ID NO: 37379 - DNA, 965 bp, Zea Mays
ggagtacagtaggcatcttcccttctctgggccgcacccgcagtcccgcaccgccacgcgccagagaccatgtggcgccgcgccggagccgggccgctcctccaccacctcgctgcagccgcctccgccgccgccgccggccgctgcattaatggacggccgctacctcctatgcccaccgcctcttggtcccccctgttccagcacaatcttggaatctcgtggggttccgcttctgtcggggctcccttccggagcctgtcgaaccagtcaagcggcggcggcgcgtgctggagctgcggtgcgacgggcgcgttcctctcctgcgggtcctgcgggagcgtgcagcctgtcgaccccgccgtcgactacttccaaatatttggcctttgaaactcgagggtatacatgtggatgaagaaaagactatcaatgatccagaacttcttatggagatgatggagatacgggaagctgtcagtgatgccagtgattctcaaaccctggagaagatccaatctcagattaaggcaaagctcgaaacctggtccgattccttccaggaggcatttgacaggaaggattttgaccgtgcggtggaagccacacagagaatgaggtactatgaacgtgcagtggaagaaacagtgaagaagctctgagcctctgatcttctgttacagctgccaaaggtggtgaggcttgtgtcttttcgtacggttccttgcagatccccctgtgctcacgcagctacattgcaacagtaacatagtacagagtaggtcattttttttacttatacgttgcaatgtattatatgactacattggaatatgttactgtagctacattgcaacagtaatatatatgactacacaagaccatacgttgtaatgctaaattccaaatgtatccatggctggtgcaccgcaggtaataataaaacaaaactaaaagagtagata

SEQ ID NO: 37380 - DNA, 3695 bp, Zea Mays
atggcgctcggcggaccgggacaaatcccatcgacgacgggcaactccggtagcacaggcagtgatctctcgagcacccagggaatagacaagggagacacagagaggacccgaggaaattggcacgccgacgagctcgcgcggattccgcgacgcgcccttcgcggatttgtttcagtgtattcacaaggtggtttcgaggtgggggagaaccctgacaacgtgacccctccagtcggtgtctgggcgcgtgacgagggaagagtccgactccatgccccattcgtccgagtttcggttaaaggagagctaactgtgatggacactgatgacaagtcacaaatcaaatcgctatcattttcaaatcacacgtcaatgatcaaattacctgctgctaatcctccgcgccatcttgaaattattaagaccgacattacaagtctatctgtacatgagcacacctgggccccccttgccagggggcgcttgtcgaccgttgcagcctgggcaggagcaggaccaggtctacgggcaggcgagaactacgcagccgaccgttggagcccgatccctccctgggatttcaaactcgccgtccgtcctcgcccgagtaccgatccgacggtcctggagacctcctctcgctacccagctacccgattatcaccagtcactctacctacaaccgacgaaagtctccccagaacccagatcaagaaccccgaaatcccagcgagcgagtcttttttgctcctcagcgttgaggaactcgtcgacgtttcggcgcgctggttcgagcatcttgtttgggatcccaggaagttcgttacttggaacttctgtcccgaggaagggcgcgcggttcgatgctggggcggagcagcggcttgcgacactcagatctggtgtgaggaggagatccggatcctcgtgttcgtgaggctgcgccccatgtcgaggaaggagaaggaggccgggtcgaggagttgcgtcaagatcgtcaacaggaaggaggtgttcctcacggagtccgcctcagagaacgactacctccggctgaagcgtggccgcgattcccatttctgcttcgactcggttttccctgattctacgacacaggcagaagtctacagcacctcaacagcagaccttgtggagggtgttctgcaaggtaggaatgggacagtgttctgctatggagctacaggggctggcaagacctacaccatgcttgggacaatggaaaaccccggggtaatggtgcttgcaataaatgatttgttctccaaggtgacgcagaagtaccactcaattaagctgtcatacctcgagatatacaatgagacggtgagggatttgctgtctcctggtagcccccttaacctgagagaagataagcagggaattgttgctgctggtcttacccaaagaagtgtatactccacggatgaggtcatggagttacttcagaaaggcaacaagaatcgaacaactgaaccgactcgagtaaacgagacctcatcgcgttctcatgcggtactgcaggttgtcgtagaatacagatccttggatggagttaacgtaaaacgagccgggaaactatctctcatcgatcttgctggatccgaaagagctctggcaacagatcaacgcacacagaggtcgatcgaaggagcaaacattaaccgctctcttcttgcactcagcagctgcattaacgcccttgtggagggcaagaagcacataccgtatcgcaattccaagctgacccaactcctcaaggactcgcttggaggagcctgcaacaccgtcatgatcgccaacattagcccctctaacctttccttcggcgagacacagaacacgcttcactgggctgatcgtgccaaggagataaaaacaaagacgcaacaaaccactgtgaatgaggaggttctggaccaaccagactctgaaactatgcttgtactggagcttcagaaggaaaaccgcgtgctgagggagcagttggcgaagcaacaacagaaattactgactgccgaggctcagctactcgcttcaaaaacctcgccacaacgatctcctgctccctcgtctcacgtctcaactccaggatcaactcaaaggaagaccagacgatctatcttggctgctggtggggggaactacttcagcacactggactcaaagaggcatgcagccgacaacgcacaggtcagggagctgcagaggaaagtgagcacgttggagtccgagatcgagaagatgaaaaaggagcacctattgcagctgaagcggaaggacgagttcatccgtgacttgatcaacaggaaggatcctaataacaacagtgaagaaacagcaacagttgatagaagagttgtcacgagggcgagcgtgcgaaaggcacagagagacgcatcagccgcagtcgagctgaaaagccccagccgggtgttcacatcaccggcgccaactgcaaagaagcgtactttctgggacatcggaggcaacagcccttcagttcttgctgccaacggaagaaagactcgaagccatgtggcaacagagacaccgaagaaagcatcctccaagctgcttcagccaggatttgcacggcaaacatcgacccatcaaagattcacatgaaagactgcctacaactcattcattactaattggagtttaatcgaagtacattgtaatgttttttagtttttttatccatattgagttattggaactgtttttttaaaattaacttgaggcagagttttccttttcttcggaacatataagcttttttccccatcttactggtattaatcagaaaggcagcaataattttgtgcagcttagggacttggtgtcttctatgtgtgcagtacccattcttatcatttctgaaggttgtccaagtggagatcataaatgttttccgcaccagcctgtacactaaagtgaccaagataaaaaagaaggaaaagttaaaaagtaatattgtttcaattgttccatgtacaagtactttttcccccctccatgtacaagttgaattttatgttgggatagcagcagacctcagcttatatgttaaaaaagtttatattatgaccaggctttgcatgctgctgctttgcgataaccaccatattatgcaccaacatttgaaactatatgtaactcccaatgtctgctacaagcaatatgttgtccttccagcaacaagggtacgaggtgttgcaatgctggtgctgtttttctagttcatgttggactttcctcctcaacatttgcagtgttggaatgcccagcttcttctgctgacctagaaggccacacatccagttccatttctccagagctcgtaccactgcaactctcgtagtcgctatcatcagaagaacagctactggtaccatcacccgaagtagaagtgtcacttagcacgttgaaaaccgtaatgctctctttctgtgagctgtggaacgaatggctgctgtacttgccatggtacagtggcaaggagccttgctgctgcaagctgggctcgtccctgccaaggctgtatgatccggacagttttctctccacgctttccttggctttcaccatttcacccagcttccccaaagcttcattcgacgagacatcttcagctgccttctgctcgagctccgagatcttctttccta

SEQ ID NO: 37381 - DNA, 1796 bp, Zea Mays
catcctctcgtccgactcatcttgtactgcggcggtggcgcccggcttccctcgacgaactccaccgacggcgaccggctccctcgtcctccaccggtcgcgcccggccctctacctccatcgatcgcgcccgaccctctgcctccaccgtcgtcgctcgctcaggttttgcacttggattacttgaacaaatcagacaagaagtggctagatagaatacaactggaatgattctatgtacggatgcatgcaaagggttagaaaatgcaataaagcttgttttccctcaggttgaccaaagagaatgatttaggcatctcatgcataattttgtgaaaaggtttggaggtgacatatcctctaagatgtaccctacacctagggcatataggccagaagtttcatagtactttttcaatcaagttgtagaagcctcccaagatgtaaagaaatggctagatgcttaccacaagctgaattggaggaggagtcagtttaaccctaccatcaagtgtgattatgtcaccaacaatctagctgaagtattcaacaactggattaaagattggaatgaccttcctgttgcggagcttgcagacaagtgtagcgagatgataatggtgttgtgggaaacggaggagacatgggggaaagcttactggcaagatcttacctgctgttttgcagcagttgaaagcaaggactagaggcctaggacatctataagtgacaaaggcagttgaggacagcacaaacattcataataggcatgtggtgaagtcatatttgcattagtgtacataccttgagtggcagcacactgacaaaccttgcccacatgcattggccttgattacagcagaaggattttgtgcatgaatactactcagtccaaaggttcaaaaaagtatacaagagaataattaaaccactaccaaataggtctcaatggccacaagtggaacaaccctatgtggttggtgcaccacttgacaagataggaagaggaaggtataaaaaaactaagaattaagagttgtttggaaggtgggaacaacaaaggaaaaaggtagctaaagaaaaaggcaaggaaactcacaaggatgcagtcctagaggctgacatggaggctacaaaccaatctaagaagggaaaaaagaagatgatgtgaggcaaaagaaagtgcaaaagatgtggagagttaaatcatagcgaaactagctacaagtgcccgttaaatggaacaaagaaaaggtaagtgataaaatgcctaatttgaacatgtacattttttatatttgactctatatgtggtgtctaacatgtagaaagagaaggcctcacattaataaaacaaagtatggggagaataccaagatccccaaaagccgacttgaagaaggtgtccaaggtgaaggtgttatccaaggtgaagctgttgtctaagatcatggtgttgtccaaattgaagctgttgttcaagttggtccaagtggaagtttctcttccagtgcaaagcccaattatacgaacaagggagtctattttacaggacaacttgataagttcagctagagctgaaccaatgtcccaggctcccagctggacctcgcctcacggatggccccctggagctggacctcgcctggagctgagcgacgtacgttcgtttcgttgcctgtgattttaatcaatggcaaaagtgttcgatcaatagctatcaatataataaaataaagttaatggtattttatatgtaaggcaacgcttgagaatgataaattagtgaaacacgt

SEQ ID NO: 37382 - DNA, 1843 bp, Zea Mays
tcatctgctcgtgggtgaaatcacctggccctgtctctattttctcatcctctcgtccgactcatcttgtactgcggcggtggcgcccggcttccctcgacgaactccaccgacggcgaccggctccctcgtcctccaccggtcgcgcccggccctctacctccatcgatcgcgcccgaccctctgcctccaccgtcgtcgctcgctcaggttttgcacttggattacttgaacaaatcagacaagaagtggctagatagaatacaactggaatgattctatctttgacgatgatctttcattgcttgctatctgtacagatgcatgcaaagggttagaaaatgcaataaagcttgttttccctcaggttgaccaaagagaatgatttaggcatctcatgcataattttgtgaaaaggtttggaggtgacatatcctctaagatgtaccctacacctagggcatataggccagaagtttcatagtactttttcaatcaagttgtagaagcctcccaagatgtaaagaaatggctagatgcttaccacaagctgaattggaggaggagtcagtttaaccctaccatcaagtgtgattatgtcaccaacaatctagctgaagtattcaacaactggattaaagattggaatgaccttcctgttgcggagcttgcagacaagtgtagcgagatgataatggtgttgtgggaaacggaggagacatgggggaaagcttactggcaagatcttacctgctgttttgcagcagttgaaagcaaggactagaggcctaggacatctataagtgacaaaggcagttgaggacagcacaaacattcataataggcatgtggtgaagtcatatttgcattagtgtacataccttgagtggcagcacactgacaaaccttgcccacatgcattggccttgattacagcagaaggattttgtgcatgaatactactcagtccaaaggttcaaaaaagtatacaagagaataattaaaccactaccaaataggtctcaatggccacaagtggaacaaccctatgtggttggtgcaccacttgacaagataggaagaggaaggtataaaaaaactaagaattaagagttgtttggaaggtgggaacaacaaaggaaaaaggtagctaaagaaaaaggcaaggaaactcacaaggatgcagtcctagaggctgacatggaggctacaaaccaatctaagaagggaaaaaagaagatgatgtgaggcaaaagaaagtgcaaaagatgtggagagttaaatcatagcgaaactagctacaagtgcccgttaaatggaacaaagaaaagaaagagaaggcctcacattaataaaacaaagtatggggagaataccaagatccccaaaagccgacttgaagaaggtgtccaaggtgaaggtgttatccaaggtgaagctgttgtctaagatcatggtgttgtccaaattgaagctgttgttcaagttggtccaagtggaagtttctcttccagtgcaaagcccaattatacgaacaagggagtctattttacaggacaacttgataaggttccaaatgttcagtatatgtggcccttctgtttgtgctgcagttcagctagagctgaaccaatgtcccaggctcccagctggacctcgcctcacggatggccccctggagctggacctcgcctggagctgagcgacgtacgttcgtttcgttgcctgtgattttaatcaatggcaaaagtgttcgatcaatagctatcaatataataaaataaagttaatggtattttatatgtaaggcaacgcttgagaatgataaattagtgaaacacgt

SEQ ID NO: 37383 - DNA, 1805 bp, Zea Mays
tcatctgctcgtgggtgaaatcacctggccctgtctctattttctcatcctctcgtccgactcatcttgtactgcggcggtggcgcccggcttccctcgacgaactccaccgacggcgaccggctccctcgtcctccaccggtcgcgcccggccctctacctccatcgatcgcgcccgaccctctgcctccaccgtcgtcgctcgctcaggttttgcacttggattacttgaacaaatcagacaagaagtggctagatagaatacaactggaatgattctatgtacggctttgacgatgatctttcattgcttgctatctgtacagatgcatgcaaagggttagaaaatgcaataaagcttgttttccctcaggttgaccaaagagaatgatttaggcatctcatgcataattttgtgaaaaggtttggaggtgacatatcctctaagatgtaccctacacctagggcatataggccagaagtttcatagtactttttcaatcaagttgtagaagcctcccaagatgtaaagaaatggctagatgcttaccacaagctgaattggaggaggagtcagtttaaccctaccatcaagtgtgattatgtcaccaacaatctagctgaagtattcaacaactggattaaagattggaatgaccttcctgttgcggagcttgcagacaagtgtagcgagatgataatggtgttgtgggaaacggaggagacatgggggaaagcttactggcaagatcttacctgctgttttgcagcagttgaaagcaaggactagaggcctaggacatctataagtgacaaaggcagttgaggacagcacaaacattcataataggcatgtggtgaagtcatatttgcattagtgtacataccttgagtggcagcacactgacaaaccttgcccacatgcattggccttgattacagcagaaggattttgtgcatgaatactactcagtccaaaggttcaaaaaagtatacaagagaataattaaaccactaccaaataggtctcaatggccacaagtggaacaaccctatgtggttggtgcaccacttgacaagataggaagaggaaggtataaaaaaactaagaattaagagttgtttggaaggtgggaacaacaaaggaaaaaggtagctaaagaaaaaggcaaggaaactcacaaggatgcagtcctagaggctgacatggaggctacaaaccaatctaagaagggaaaaaagaagatgatgtgaggcaaaagaaagtgcaaaagatgtggagagttaaatcatagcgaaactagctacaagtgcccgttaaatggaacaaagaaaagaaagagaaggcctcacattaataaaacaaagtatggggagaataccaagatccccaaaagccgacttgaagaaggtgtccaaggtgaaggtgttatccaaggtgaagctgttgtctaagatcatggtgttgtccaaattgaagctgttgttcaagttggtccaagtggaagtttctcttccagtgcaaagcccaattatacgaacaagggagtctattttacaggacaacttgataagttcagctagagctgaaccaatgtcccaggctcccagctggacctcgcctcacggatggccccctggagctggacctcgcctggagctgagcgacgtacgttcgtttcgttgcctgtgattttaatcaatggcaaaagtgttcgatcaatagctatcaatataataaaataaagttaatggtattttatatgtaaggcaacgcttgagaatgataaattagtgaaacacgt

SEQ ID NO: 37384 - DNA, 2242 bp, Zea Mays
cactggatagttttgcccctgaccaaaagtgtcgacgctcatctgctcgtgggtgaaatcacctggccctgtctctattttctcatcctctcgtccgactcatcttgtactgcggcggtggcgcccggcttccctcgacgaactccaccgacggcgaccggctccctcgtcctccaccggtcgcgcccggccctctacctccatcgatcgcgcccgaccctctgcctccaccgtcgtcgctcgctcaggttttgcacttggattacttgaacaaatcagacaagaagtggctagatagaatacaactggaatgattctatctttgacgatgatctttcattgcttgctatctgtacagatgcatgcaaagggttagaaaatgcaataaagcttgttttccctcaggttgaccaaagagaatgatttaggcatctcatgcataattttgtgaaaaggtttggaggtgacatatcctctaagatgtaccctacacctagggcatataggccagaagtttcatagtactttttcaatcaagttgtagaagcctcccaagatgtaaagaaatggctagatgcttaccacaagctgaattggaggaggagtcagtttaaccctaccatcaagtgtgattatgtcaccaacaatctagctgaagtattcaacaactggattaaagattggaatgaccttcctgttgcggagcttgcagacaagtgtagcgagatgataatggtgttgtgggaaacggaggagacatgggggaaagcttactggcaagatcttacctgctgttttgcagcagttgaaagcaaggactagaggcctaggacatctataagtgacaaaggcagttgaggacagcacaaacattcataataggcatgtggtgaagtcatatttgcattagtgtacataccttgagtggcagcacactgacaaaccttgcccacatgcattggccttgattacagcagaaggattttgtgcatgaatactactcagtccaaaggttcaaaaaagtatacaagagaataattaaaccactaccaaataggtctcaatggccacaagtggaacaaccctatgtggttggtgcaccacttgacaagataggaagaggaaggtataaaaaaactaagaattaagagttgtttggaaggtgggaacaacaaaggaaaaaggtagctaaagaaaaaggcaaggaaactcacaaggatgcagtcctagaggctgacatggaggctacaaaccaatctaagaagggaaaaaagaagatgatgtgaggcaaaagaaagtgcaaaagatgtggagagttaaatcatagcgaaactagctacaagtgcccgttaaatggaacaaagaaaagaaagagaaggcctcacattaataaaacaaagtatggggagaataccaagatccccaaaagccgacttgaagaaggtgtccaaggtgaaggtgttatccaaggtgaagctgttgtctaagatcatggtgttgtccaaattgaagctgttgttcaagttggtccaagtggaagtttctcttccagtgcaaagcccaattatacgaacaagggagtctattttacaggacaacttgataagtcagcttgctatgctactaggagatggttagattgaaatccagtcacctcctaataatacaactcctaagaagtttctagtgaagaagctcacagcaagctgaagagaacgtgacaagattctaagaaactactgttttatgtgttacccaagatttaaataagctagtgttagaagtgaacattttatgctatcagatgaactatatttggatagagatagtagttattttgatgtgtgatgttatcttaaacaagtgtcaggtttggatgtgttttgttatctgaaacaaatgttcagaagctgaaaatgttgtctctattagtgtacacatgttaccagtttctgttattatgcacaggttccaaatgttcagtatatgtggcccttctgtttgtgctgcagttcagctagagctgaaccaatgtcccaggctcccagctggacctcgcctcacggatggccccctggagctggacctcgcctggagctgagcgacgtacgttcgtttcgttgcctgtgattttaatcaatggcaaaagtgttcgatcaatagctatcaatataataaaataaagttaatggtattttatatgtaaggcaacgcttgagaatgataaattagtgaaacacgt

SEQ ID NO: 37385 - DNA, 2370 bp, Zea Mays
gcgagattgtttcgcctcctggtgaacctggctcgagagataaatgtcatcaagcgtcgtcttacaataaatgtcatttatgaggttatttataacttcagcttattttagtgtcagcctttcactggatagttttgcccctgaccaaaagtgtcgacgctcatctgctcgtgggtgaaatcacctggccctgtctctattttctcatcctctcgtccgactcatcttgtactgcggcggtggcgcccggcttccctcgacgaactccaccgacggcgaccggctccctcgtcctccaccggtcgcgcccggccctctacctccatcgatcgcgcccgaccctctgcctccaccgtcgtcgctcgctcaggttttgcacttggattacttgaacaaatcagacaagaagtggctagatagaatacaactggaatgattctatgtacggctttgacgatgatctttcattgcttgctatctgtacagatgcatgcaaagggttagaaaatgcaataaagcttgttttccctcaggttgaccaaagagaatgatttaggcatctcatgcataattttgtgaaaaggtttggaggtgacatatcctctaagatgtaccctacacctagggcatataggccagaagtttcatagtactttttcaatcaagttgtagaagcctcccaagatgtaaagaaatggctagatgcttaccacaagctgaattggaggaggagtcagtttaaccctaccatcaagtgtgattatgtcaccaacaatctagctgaagtattcaacaactggattaaagattggaatgaccttcctgttgcggagcttgcagacaagtgtagcgagatgataatggtgttgtgggaaacggaggagacatgggggaaagcttactggcaagatcttacctgctgttttgcagcagttgaaagcaaggactagaggcctaggacatctataagtgacaaaggcagttgaggacagcacaaacattcataataggcatgtggtgaagtcatatttgcattagtgtacataccttgagtggcagcacactgacaaaccttgcccacatgcattggccttgattacagcagaaggattttgtgcatgaatactactcagtccaaaggttcaaaaaagtatacaagagaataattaaaccactaccaaataggtctcaatggccacaagtggaacaaccctatgtggttggtgcaccacttgacaagataggaagaggaaggtataaaaaaactaagaattaagagttgtttggaaggtgggaacaacaaaggaaaaaggtagctaaagaaaaaggcaaggaaactcacaaggatgcagtcctagaggctgacatggaggctacaaaccaatctaagaagggaaaaaagaagatgatgtgaggcaaaagaaagtgcaaaagatgtggagagttaaatcatagcgaaactagctacaagtgcccgttaaatggaacaaagaaaagaaagagaaggcctcacattaataaaacaaagtatggggagaataccaagatccccaaaagccgacttgaagaaggtgtccaaggtgaaggtgttatccaaggtgaagctgttgtctaagatcatggtgttgtccaaattgaagctgttgttcaagttggtccaagtggaagtttctcttccagtgcaaagcccaattatacgaacaagggagtctattttacaggacaacttgataagtcagcttgctatgctactaggagatggttagattgaaatccagtcacctcctaataatacaactcctaagaagtttctagtgaagaagctcacagcaagctgaagagaacgtgacaagattctaagaaactactgttttatgtgttacccaagatttaaataagctagtgttagaagtgaacattttatgctatcagatgaactatatttggatagagatagtagttattttgatgtgtgatgttatcttaaacaagtgtcaggtttggatgtgttttgttatctgaaacaaatgttcagaagctgaaaatgttgtctctattagtgtacacatgttaccagtttctgttattatgcacaggttccaaatgttcagtatatgtggcccttctgtttgtgctgcagttcagctagagctgaaccaatgtcccaggctcccagctggacctcgcctcacggatggccccctggagctggacctcgcctggagctgagcgacgtacgttcgtttcgttgcctgtgattttaatcaatggcaaaagtgttcgatcaatagctatcaatataataaaataaagttaatggtattttatatgtaaggcaacgcttgagaatgataaattagtgaaacacgt

SEQ ID NO: 37386 - DNA, 2350 bp, Zea Mays
gaacgggtaggggagtaggcgagattgtttcgcctcctggtgaacctggctcgagagataaatgtcatcaagcgtcgtcttacaataaatgtcatttatgaggttatttataacttcagcttattttagtgtcagcctttcactggatagttttgcccctgaccaaaagtgtcgacgctcatctgctcgtgggtgaaatcacctggccctgtctctattttctcatcctctcgtccgactcatcttgtactgcggcggtggcgcccggcttccctcgacgaactccaccgacggcgaccggctccctcgtcctccaccggtcgcgcccggccctctacctccatcgatcgcgcccgaccctctgcctccaccgtcgtcgctcgctcaggttttgcacttggattacttgaacaaatcagacaagaagtggctagatagaatacaactggaatgattctatgtacggatgcatgcaaagggttagaaaatgcaataaagcttgttttccctcaggttgaccaaagagaatgatttaggcatctcatgcataattttgtgaaaaggtttggaggtgacatatcctctaagatgtaccctacacctagggcatataggccagaagtttcatagtactttttcaatcaagttgtagaagcctcccaagatgtaaagaaatggctagatgcttaccacaagctgaattggaggaggagtcagtttaaccctaccatcaagtgtgattatgtcaccaacaatctagctgaagtattcaacaactggattaaagattggaatgaccttcctgttgcggagcttgcagacaagtgtagcgagatgataatggtgttgtgggaaacggaggagacatgggggaaagcttactggcaagatcttacctgctgttttgcagcagttgaaagcaaggactagaggcctaggacatctataagtgacaaaggcagttgaggacagcacaaacattcataataggcatgtggtgaagtcatatttgcattagtgtacataccttgagtggcagcacactgacaaaccttgcccacatgcattggccttgattacagcagaaggattttgtgcatgaatactactcagtccaaaggttcaaaaaagtatacaagagaataattaaaccactaccaaataggtctcaatggccacaagtggaacaaccctatgtggttggtgcaccacttgacaagataggaagaggaaggtataaaaaaactaagaattaagagttgtttggaaggtgggaacaacaaaggaaaaaggtagctaaagaaaaaggcaaggaaactcacaaggatgcagtcctagaggctgacatggaggctacaaaccaatctaagaagggaaaaaagaagatgatgtgaggcaaaagaaagtgcaaaagatgtggagagttaaatcatagcgaaactagctacaagtgcccgttaaatggaacaaagaaaagaaagagaaggcctcacattaataaaacaaagtatggggagaataccaagatccccaaaagccgacttgaagaaggtgtccaaggtgaaggtgttatccaaggtgaagctgttgtctaagatcatggtgttgtccaaattgaagctgttgttcaagttggtccaagtggaagtttctcttccagtgcaaagcccaattatacgaacaagggagtctattttacaggacaacttgataagtcagcttgctatgctactaggagatggttagattgaaatccagtcacctcctaataatacaactcctaagaagtttctagtgaagaagctcacagcaagctgaagagaacgtgacaagattctaagaaactactgttttatgtgttacccaagatttaaataagctagtgttagaagtgaacattttatgctatcagatgaactatatttggatagagatagtagttattttgatgtgtgatgttatcttaaacaagtgtcaggtttggatgtgttttgttatctgaaacaaatgttcagaagctgaaaatgttgtctctattagtgtacacatgttaccagtttctgttattatgcacaggttccaaatgttcagtatatgtggcccttctgtttgtgctgcagttcagctagagctgaaccaatgtcccaggctcccagctggacctcgcctcacggatggccccctggagctggacctcgcctggagctgagcgacgtacgttcgtttcgttgcctgtgattttaatcaatggcaaaagtgttcgatcaatagctatcaatataataaaataaagttaatggtattttatatgtaaggcaacgcttgagaatgataaattagtgaaacacgt

SEQ ID NO: 37387 - DNA, 2899 bp, Zea Mays
tgtgtggaccattgatgcacccggtggctttcttttcgagtggtggtcggttttctgggatatattcatagcaagaactaacgagaagcattcagatgttgcagcctcatatattgagactcagctcatgaaggccagggagcaacagcagccacaaacacctcaacagaggcagcagcaaccacagcatatacaaatgcaacaaatgctgttacaaagagctgtgcatcagcagcaacagcagcaacagcagcagcagcaacaacaacaacaacaacaacaacaacctcagcagcagcagcagctgcaacagcagcgcagagatggttctcatcttctcaatggttctgcgaatggaatttctggaaacaatcctttaatgcgacaaaaccaaagtactgcaaatgttatggcaacaaaaatgtatgaggaaaggttaaaggtaccttcccagagagactctttcgaagaggcatcattgaagtatggttgcagcaaagatacggagagaacgctgggcaactacttgattcaaatgaagcatcattgttgaaagcagcttcaagtgcacaatcctcagggcaaattttgcatggaactgttggtggcttatcaggcactctgcaacaagttcaggccaggagcccccaacttcctgggcctgctcagggtatcaagacagagattaatcacgttctgactcccagaggtgcaggcccagaagggtcatttataggtgtccaaggatctaatcaagctgggaacaatttgactctgaaaggatggccactcacgggacttgagcaacttaggtcaggaattcttcagcagaagtcatttatacagaatcaacagcaattgcaccagcaaatccagatgctgactccacagcagcagcagcagcttatgctgcaggctcagcaaaatatgtcttcaccaacatctagtgacgtcgacaacagaagattgaggatgatgctaaatagaaatgctgttcttggccgggatggacagacaaatagtggtagtgatattattccaaatattggctctcctagtcaaagtggcggagatatagatatgcttataaagtagaagaaacttgctcagcagcagcaactattacaacagcaaagcaatagccaacagctcccacagcaacatcagcttcagcaacctgctgtctctagccagcaatctcaaagttcaaatcaacatcttcaacaagaaaaactaggaattggaagtatgcctgttgatgggggcataccaaactcatttgggggagctgaacagacagcgaaaaagagaaagaagccaggctcatcctctggtagagccaatagttcaggcacagccaatactgctggtccctctccaagttctgcaccctcgacaccttccactcatacaccaggagatgcaatgtctgtgccacagctgcagcagaatggcggttcagctaaacccatggtaatgtttggctctgatggaactgggagcttgacatctccagcaaacccattggatgatgtggaccgtttgctggaagatggctcattggatgataatgttgaatcttttctatcacaggatgacatggatcctagggacaacttggggcgatgcatggatgctagcaaaggttttggtttttctgaggttgccaaagcacgtgcaagtgcagccaaagttgtctgttgccacttctcagctgatggtaagctgcttgctactggtggtcatgataaaaaggttactttgtggtgtacagattctctgaagcctaaatccttcctggaagagcactcgtttcttatcactgatgttagatttagcccaagcatgtcgcgccttgcaacatcctccttcgacaaaactgtgcgggtttgggatgcagataacactgactattcactccgaactttcacgggccattcagcatctgtcatgtcacttgattttcatccaaacaaagaggatatgatatgctcctgtgatggtgatggggaagtgcgcagctggagcataaataatggtagctgtttgacatgtgttaaggtgtttaaggcaggtgctactcagatgagatttcaacctcgtaagggaaagtatctagcagctgcctcagagaaagcaatctacatacttgatggggagacacaacatgcttgtagaagccccttgcaggggcacaataagaatattcaatcgctttgttgggactctgctggtgaatatctggcttctgtcagtgaagactcagtcagaatatggtcattcagttctggacgtgatggtgaatttgtgcacgaattgaatcgcagtggaaatcagttccactcatgtgttttccacccaacttatcaatccttgttagtgattggttgttacgagtccttggaactttgggacataagggagaagaacaccatgaccttcaacaatgcgcatgacggtttggttgcagccctggcagcatccagtgcaacagggaaggttgcctcagtaagccatgataggactctcaagctctggaaatgacttgtatgaaacccatgttggacttctgtattctggctgttagatgatagacaaacaagactttgccaaaaatgaccacatgacgaaaaggttgctgacaagatactctggagccgcgtgggctcaagaactaacagtgttttgttttgtggtcgttgtatgctgttcagtatgccactgaagcttgtaacttgtaactcgtaatagaaactttggttgaagaaagattgtacctcggacaagtggcaaatatttattctctaaaatattctgcattttgttttttgaccttgtattttaacgtaattgagcctgaagcatagttttattgccggtaaaactacatggactcaaa

SEQ ID NO: 37388 - DNA, 3202 bp, Zea Mays
ctcaatccatgtggattggtcaaacaagtcaaattctttcataattttttccaatcctatccaattcatatgagccgaacaaggcctaaaccctttgtttgttctcgaggtcgaggagagctgatttgagggttgccccaggctggatgtttacatatatgactattttatgaagagaaatttgcaggcaactgcaaaggccttccaagcagaaggaaaggtctcttcagatccagttgccattgatgcacccggtggctttcttttcgagtggtggtcggttttctgggatatattcatagcaagaactaacgagaagcattcagatgttgcagcctcatatattgagactcagctcatgaaggccagggagcaacagcagccacaaacacctcaacagaggcagcagcaaccacagcatatacaaatgcaacaaatgctgttacaaagagctgtgcatcagcagcaacagcagcaacagcagcagcagcaacaacaacaacaacaacaacaacaacctcagcagcagcagcagctgcaacagcagcgcagagatggttctcatcttctcaatggttctgcgaatggaatttctggaaacaatcctttaatgcgacaaaaccaaagtactgcaaatgttatggcaacaaaaatgtatgaggaaaggttaaaggtaccttcccagagagactctttcgaagaggcatcattgaagcaaagatacggagagaacgctgggcaactacttgattcaaatgaagcatcattgttgaaagcagcttcaagtgcacaatcctcagggcaaattttgcatggaactgttggtggcttatcaggcactctgcaacaagttcaggccaggagcccccaacttcctgggcctgctcagggtatcaagacagagattaatcacgttctgactcccagaggtgcaggcccagaagggtcatttataggtgtccaaggatctaatcaagctgggaacaatttgactctgaaaggatggccactcacgggacttgagcaacttaggtcaggaattcttcagcagaagtcatttatacagaatcaacagcaattgcaccagcaaatccagatgctgactccacagcagcagcagcagcttatgctgcaggctcagcaaaatatgtcttcaccaacatctagtgacgtcgacaacagaagattgaggatgatgctaaatagaaatgctgttcttggccgggatggacagacaaatagtggtagtgatattattccaaatattggctctcctagtcaaagtggcggagatatagatatgcttataaagtagaagaaacttgctcagcagcagcaactattacaacagcaaagcaatagccaacagctcccacagcaacatcagcttcagcaacctgctgtctctagccagcaatctcaaagttcaaatcaacatcttcaacaagaaaaactaggaattggaagtatgcctgttgatgggggcataccaaactcatttgggggagctgaacagacagcgaaaaagagaaagaagccaggctcatcctctggtagagccaatagttcaggcacagccaatactgctggtccctctccaagttctgcaccctcgacaccttccactcatacaccaggagatgcaatgtctgtgccacagctgcagcagaatggcggttcagctaaacccatggtaatgtttggctctgatggaactgggagcttgacatctccagcaaacccattggatgatgtggaccgtttgctggaagatggctcattggatgataatgttgaatcttttctatcacaggatgacatggatcctagggacaacttggggcgatgcatggatgctagcaaaggttttggtttttctgaggttgccaaagcacgtgcaagtgcagccaaagttgtctgttgccacttctcagctgatggtaagctgcttgctactggtggtcatgataaaaaggttactttgtggtgtacagattctctgaagcctaaatccttcctggaagagcactcgtttcttatcactgatgttagatttagcccaagcatgtcgcgccttgcaacatcctccttcgacaaaactgtgcgggtttgggatgcagataacactgactattcactccgaactttcacgggccattcagcatctgtcatgtcacttgattttcatccaaacaaagaggatatgatatgctcctgtgatggtgatggggaagtgcgcagctggagcataaataatggtagctgtttgacatgtgttaaggtgtttaaggtatgatgttatctttatatttcatggggtcataagcttaatcattaagattttctctgatcaatcgtattttgtcgtcccaggcaggtgctactcagatgagatttcaacctcgtaagggaaagtatctagcagctgcctcagagaaagcaatctacatacttgatggggagacacaacatgcttgtagaagccccttgcaggggcacaataagaatattcaatcgctttgttgggactctgctggtgaatatctggcttctgtcagtgaagactcagtcagaatatggtcattcagttctggacgtgatggtgaatttgtgcacgaattgaatcgcagtggaaatcagttccactcatgtgttttccacccaacttatcaatccttgttagtgattggttgttacgagtccttggaactttgggacataagggagaagaacaccatgaccttcaacaatgcgcatgacggtttggttgcagccctggcagcatccagtgcaacagggaaggttgcctcagtaagccatgataggactctcaagctctggaaatgacttgtatgaaacccatgttggacttctgtattctggctgttagatgatagacaaacaagactttgccaaaaatgaccacatgacgaaaaggttgctgacaagatactctggagccgcgtgggctcaagaactaacagtgttttgttttgtggtcgttgtatgctgttcagtatgccactgaagcttgtaacttgtaactcgtaatagaaactttggttgaagaaagattgtacctcggacaagtggcaaatatttattctctaaaatattctgcattttgttttttgaccttgtattttaacgtaattgagcctgaagcatagttttattgccggtaaaactacatggactcaaa

SEQ ID NO: 37389 - DNA, 3030 bp, Zea Mays
gttatcgcgttcgtggggacgcgttgcagctgtctccagtattgtgtgcgaggctggatgtttacatatatgactattttatgaagagaaatttgcaggcaactgcaaaggccttccaagcagaaggaaaggtctcttcagatccagttgccattgatgcacccggtggctttcttttcgagtggtggtcggttttctgggatatattcatagcaagaactaacgagaagcattcagatgttgcagcctcatatattgagactcagctcatgaaggccagggagcaacagcagccacaaacacctcaacagaggcagcagcaaccacagcatatacaaatgcaacaaatgctgttacaaagagctgtgcatcagcagcaacagcagcaacagcagcagcagcaacaacaacaacaacaacaacaacaacctcagcagcagcagcagctgcaacagcagcgcagagatggttctcatcttctcaatggttctgcgaatggaatttctggaaacaatcctttaatgcgacaaaaccaaagtactgcaaatgttatggcaacaaaaatgtatgaggaaaggttaaaggtaccttcccagagagactctttcgaagaggcatcattgaagcaaagatacggagagaacgctgggcaactacttgattcaaatgaagcatcattgttgaaagcagcttcaagtgcacaatcctcagggcaaattttgcatggaactgttggtggcttatcaggcactctgcaacaagttcaggccaggagcccccaacttcctgggcctgctcagggtatcaagacagagattaatcacgttctgactcccagaggtgcaggcccagaagggtcatttataggtgtccaaggatctaatcaagctgggaacaatttgactctgaaaggatggccactcacgggacttgagcaacttaggtcaggaattcttcagcagaagtcatttatacagaatcaacagcaattgcaccagcaaatccagatgctgactccacagcagcagcagcagcttatgctgcaggctcagcaaaatatgtcttcaccaacatctagtgacgtcgacaacagaagattgaggatgatgctaaatagaaatgctgttcttggccgggatggacagacaaatagtggtagtgatattattccaaatattggctctcctagtcaaagtggcggagatatagatatgcttataaagtagaagaaacttgctcagcagcagcaactattacaacagcaaagcaatagccaacagctcccacagcaacatcagcttcagcaacctgctgtctctagccagcaatctcaaagttcaaatcaacatcttcaacaagaaaaactaggaattggaagtatgcctgttgatgggggcataccaaactcatttgggggagctgaacagacagcgaaaaagagaaagaagccaggctcatcctctggtagagccaatagttcaggcacagccaatactgctggtccctctccaagttctgcaccctcgacaccttccactcatacaccaggagatgcaatgtctgtgccacagctgcagcagaatggcggttcagctaaacccatggtaatgtttggctctgatggaactgggagcttgacatctccagcaaacccattggatgatgtggaccgtttgctggaagatggctcattggatgataatgttgaatcttttctatcacaggatgacatggatcctagggacaacttggggcgatgcatggatgctagcaaaggttttggtttttctgaggttgccaaagcacgtgcaagtgcagccaaagttgtctgttgccacttctcagctgatggtaagctgcttgctactggtggtcatgataaaaaggttactttgtggtgtacagattctctgaagcctaaatccttcctggaagagcactcgtttcttatcactgatgttagatttagcccaagcatgtcgcgccttgcaacatcctccttcgacaaaactgtgcgggtttgggatgcagataacactgactattcactccgaactttcacgggccattcagcatctgtcatgtcacttgattttcatccaaacaaagaggatatgatatgctcctgtgatggtgatggggaagtgcgcagctggagcataaataatggtagctgtttgacatgtgttaaggtgtttaaggcaggtgctactcagatgagatttcaacctcgtaagggaaagtatctagcagctgcctcagagaaagcaatctacatacttgatggggagacacaacatgcttgtagaagccccttgcaggggcacaataagaatattcaatcgctttgttgggactctgctggtgaatatctggcttctgtcagtgaagactcagtcagaatatggtcattcagttctggacgtgatggtgaatttgtgcacgaattgaatcgcagtggaaatcagttccactcatgtgttttccacccaacttatcaatccttgttagtgattggttgttacgagtccttggaactttgggacataagggagaagaacaccatgaccttcaacaatgcgcatgacggtttggttgcagccctggcagcatccagtgcaacagggaaggttgcctcagtaagccatgataggactctcaagctctggaaatgacttgtatgaaacccatgttggacttctgtattctggctgttagatgatagacaaacaagactttgccaaaaatgaccacatgacgaaaaggttgctgacaagatactctggagccgcgtgggctcaagaactaacagtgttttgttttgtggtcgttgtatgctgttcagtatgccactgaagcttgtaacttgtaactcgtaatagaaactttggttgaagaaagattgtacctcggacaagtggcaaatatttattctctaaaatattctgcattttgttttttgaccttgtattttaacgtaattgagcctgaagcatagttttattgccggtaaaactacatggactcaaa

SEQ ID NO: 37390 - DNA, 3361 bp, Zea Mays
gtcccactcctcccgtctctattccccaattggccctcgcctccattaccttccccgtccccctcgtacatttcgacatcccctcccccccgactctcccgtcccgctcccgccgctaccagcgattccaatccgccctcccttccgccgctcaccgccgcggccccgccgcaagcgtttcgcctcgatatctccaccccgccttgctcgagccacgctcccaccgtccaggcgtccgctgcggaggtgtcggtggcccatctgaacaggctctcctcgtcggggcttttttgcttcggagggagaggcttcctgttcggcgcgccgtgagaagagcaccggccatgtcgcagactaactgggaggcggacaagatgctggatgtttacatatatgactattttatgaagagaaatttgcaggcaactgcaaaggccttccaagcagaaggaaaggtctcttcagatccagttgccattgatgcacccggtggctttcttttcgagtggtggtcggttttctgggatatattcatagcaagaactaacgagaagcattcagatgttgcagcctcatatattgagactcagctcatgaaggccagggagcaacagcagccacaaacacctcaacagaggcagcagcaaccacagcatatacaaatgcaacaaatgctgttacaaagagctgtgcatcagcagcaacagcagcaacagcagcagcagcaacaacaacaacaacaacaacaacaacctcagcagcagcagcagctgcaacagcagcgcagagatggttctcatcttctcaatggttctgcgaatggaatttctggaaacaatcctttaatgcgacaaaaccaaagtactgcaaatgttatggcaacaaaaatgtatgaggaaaggttaaaggtaccttcccagagagactctttcgaagaggcatcattgaagtatggttgcagcaaagatacggagagaacgctgggcaactacttgattcaaatgaagcatcattgttgaaagcagcttcaagtgcacaatcctcagggcaaattttgcatggaactgttggtggcttatcaggcactctgcaacaagttcaggccaggagcccccaacttcctgggcctgctcagggtatcaagacagagattaatcacgttctgactcccagaggtgcaggcccagaagggtcatttataggtgtccaaggatctaatcaagctgggaacaatttgactctgaaaggatggccactcacgggacttgagcaacttaggtcaggaattcttcagcagaagtcatttatacagaatcaacagcaattgcaccagcaaatccagatgctgactccacagcagcagcagcagcttatgctgcaggctcagcaaaatatgtcttcaccaacatctagtgacgtcgacaacagaagattgaggatgatgctaaatagaaatgctgttcttggccgggatggacagacaaatagtggtagtgatattattccaaatattggctctcctagtcaaagtggcggagatatagatatgcttataaagtagaagaaacttgctcagcagcagcaactattacaacagcaaagcaatagccaacagctcccacagcaacatcagcttcagcaacctgctgtctctagccagcaatctcaaagttcaaatcaacatcttcaacaagaaaaactaggaattggaagtatgcctgttgatgggggcataccaaactcatttgggggagctgaacagacagcgaaaaagagaaagaagccaggctcatcctctggtagagccaatagttcaggcacagccaatactgctggtccctctccaagttctgcaccctcgacaccttccactcatacaccaggagatgcaatgtctgtgccacagctgcagcagaatggcggttcagctaaacccatggtaatgtttggctctgatggaactgggagcttgacatctccagcaaacccattggatgatgtggaccgtttgctggaagatggctcattggatgataatgttgaatcttttctatcacaggatgacatggatcctagggacaacttggggcgatgcatggatgctagcaaaggttttggtttttctgaggttgccaaagcacgtgcaagtgcagccaaagttgtctgttgccacttctcagctgatggtaagctgcttgctactggtggtcatgataaaaaggttactttgtggtgtacagattctctgaagcctaaatccttcctggaagagcactcgtttcttatcactgatgttagatttagcccaagcatgtcgcgccttgcaacatcctccttcgacaaaactgtgcgggtttgggatgcagataacactgactattcactccgaactttcacgggccattcagcatctgtcatgtcacttgattttcatccaaacaaagaggatatgatatgctcctgtgatggtgatggggaagtgcgcagctggagcataaataatggtagctgtttgacatgtgttaaggtgtttaaggtgctactcagatgagatttcaacctcgtaagggaaagtatctagcagctgcctcagagaaagcaatctacatacttgatggggagacacaacatgcttgtagaagccccttgcaggggcacaataagaatattcaatcgctttgttgggactctgctggtgaatatctggcttctgtcagtgaagactcagtcagaatatggtcattcagttctggacgtgatggtgaatttgtgcacgaattgaatcgcagtggaaatcagttccactcatgtgttttccacccaacttatcaatccttgttagtgattggttgttacgagtccttggaactttgggacataagggagaagaacaccatgaccttcaacaatgcgcatgacggtttggttgcagccctggcagcatccagtgcaacagggaaggttgcctcagtaagccatgataggactctcaagctctggaaatgacttgtatgaaacccatgttggacttctgtattctggctgttagatgatagacaaacaagactttgccaaaaatgaccacatgacgaaaaggttgctgacaagatactctggagccgcgtgggctcaagaactaacagtgttttgttttgtggtcgttgtatgctgttcagtatgccactgaagcttgtaacttgtaactcgtaatagaaactttggttgaagaaagattgtacctcggacaagtggcaaatatttattctctaaaatattctgcattttgttttttgaccttgtattttaacgtaattgagcctgaagcatagttttattgccggtaaaactacatggactcaaa

SEQ ID NO: 37391 - DNA, 3354 bp, Zea Mays
cttgtcccactcctcccgtctctattccccaattggccctcgcctccattaccttccccgtccccctcgtacatttcgacatcccctcccccccgactctcccgtcccgctcccgccgctaccagcgattccaatccgccctcccttccgccgctcaccgccgcggccccgccgcaagcgtttcgcctcgatatctccaccccgccttgctcgagccacgctcccaccgtccaggcgtccgctgcggaggtgtcggtggcccatctgaacaggctctcctcgtcggggcttttttgcttcggagggagaggcttcctgttcggcgcgccgtgagaagagcaccggccatgtcgcagactaactgggaggcggacaagatgctggatgtttacatatatgactattttatgaagagaaatttgcaggcaactgcaaaggccttccaagcagaaggaaaggtctcttcagatccagttgccattgatgcacccggtggctttcttttcgagtggtggtcggttttctgggatatattcatagcaagaactaacgagaagcattcagatgttgcagcctcatatattgagactcagctcatgaaggccagggagcaacagcagccacaaacacctcaacagaggcagcagcaaccacagcatatacaaatgcaacaaatgctgttacaaagagctgtgcatcagcagcaacagcagcaacagcagcagcagcaacaacaacaacaacaacaacaacaacctcagcagcagcagcagctgcaacagcagcgcagagatggttctcatcttctcaatggttctgcgaatggaatttctggaaacaatcctttaatgcgacaaaaccaaagtactgcaaatgttatggcaacaaaaatgtatgaggaaaggttaaaggtaccttcccagagagactctttcgaagaggcatcattgaagcaaagatacggagagaacgctgggcaactacttgattcaaatgaagcatcattgttgaaagcagcttcaagtgcacaatcctcagggcaaattttgcatggaactgttggtggcttatcaggcactctgcaacaagttcaggccaggagcccccaacttcctgggcctgctcagggtatcaagacagagattaatcacgttctgactcccagaggtgcaggcccagaagggtcatttataggtgtccaaggatctaatcaagctgggaacaatttgactctgaaaggatggccactcacgggacttgagcaacttaggtcaggaattcttcagcagaagtcatttatacagaatcaacagcaattgcaccagcaaatccagatgctgactccacagcagcagcagcagcttatgctgcaggctcagcaaaatatgtcttcaccaacatctagtgacgtcgacaacagaagattgaggatgatgctaaatagaaatgctgttcttggccgggatggacagacaaatagtggtagtgatattattccaaatattggctctcctagtcaaagtggcggagatatagatatgcttataaagaagaaacttgctcagcagcagcaactattacaacagcaaagcaatagccaacagctcccacagcaacatcagcttcagcaacctgctgtctctagccagcaatctcaaagttcaaatcaacatcttcaacaagaaaaactaggaattggaagtatgcctgttgatgggggcataccaaactcatttgggggagctgaacagacagcgaaaaagagaaagaagccaggctcatcctctggtagagccaatagttcaggcacagccaatactgctggtccctctccaagttctgcaccctcgacaccttccactcatacaccaggagatgcaatgtctgtgccacagctgcagcagaatggcggttcagctaaacccatggtaatgtttggctctgatggaactgggagcttgacatctccagcaaacccattggatgatgtggaccgtttgctggaagatggctcattggatgataatgttgaatcttttctatcacaggatgacatggatcctagggacaacttggggcgatgcatggatgctagcaaaggttttggtttttctgaggttgccaaagcacgtgcaagtgcagccaaagttgtctgttgccacttctcagctgatggtaagctgcttgctactggtggtcatgataaaaaggttactttgtggtgtacagattctctgaagcctaaatccttcctggaagagcactcgtttcttatcactgatgttagatttagcccaagcatgtcgcgccttgcaacatcctccttcgacaaaactgtgcgggtttgggatgcagataacactgactattcactccgaactttcacgggccattcagcatctgtcatgtcacttgattttcatccaaacaaagaggatatgatatgctcctgtgatggtgatggggaagtgcgcagctggagcataaataatggtagctgtttgacatgtgttaaggtgtttaaggcaggtgctactcagatgagatttcaacctcgtaagggaaagtatctagcagctgcctcagagaaagcaatctacatacttgatggggagacacaacatgcttgtagaagccccttgcaggggcacaataagaatattcaatcgctttgttgggactctgctggtgaatatctggcttctgtcagtgaagactcagtcagaatatggtcattcagttctggacgtgatggtgaatttgtgcacgaattgaatcgcagtggaaatcagttccactcatgtgttttccacccaacttatcaatccttgttagtgattggttgttacgagtccttggaactttgggacataagggagaagaacaccatgaccttcaacaatgcgcatgacggtttggttgcagccctggcagcatccagtgcaacagggaaggttgcctcagtaagccatgataggactctcaagctctggaaatgacttgtatgaaacccatgttggacttctgtattctggctgttagatgatagacaaacaagactttgccaaaaatgaccacatgacgaaaaggttgctgacaagatactctggagccgcgtgggctcaagaactaacagtgttttgttttgtggtcgttgtatgctgttcagtatgccactgaagcttgtaacttgtaactcgtaatagaaactttggttgaagaaagattgtacctcggacaagtggcaaatatttattctctaaaatattctgcattttgttttttgaccttgtattttaacgtaattgagcctgaagcatagttttattgccggtaaaactacatggactcaaa

SEQ ID NO: 37392 - DNA, 3504 bp, Zea Mays
atctagaaatagaggttgtactatatagaacctgcgagtcataactcataactatcttttattacataagaagtcataattattaatgattttctctaactattttaatacgcccggtcttgtctcctgtgtcctgtactcctgtgtcttgtcccactcctcccgtctctattccccaattggccctcgcctccattaccttccccgtccccctcgtacatttcgacatcccctcccccccgactctcccgtcccgctcccgccgctaccagcgattccaatccgccctcccttccgccgctcaccgccgcggccccgccgcaagcgtttcgcctcgatatctccaccccgccttgctcgagccacgctcccaccgtccaggcgtccgctgcggaggtgtcggtggcccatctgaacaggctctcctcgtcggggcttttttgcttcggagggagaggcttcctgttcggcgcgccgtgagaagagcaccggccatgtcgcagactaactgggaggcggacaagatgctggatgtttacatatatgactattttatgaagagaaatttgcaggcaactgcaaaggccttccaagcagaaggaaaggtctcttcagatccagttgccattgatgcacccggtggctttcttttcgagtggtggtcggttttctgggatatattcatagcaagaactaacgagaagcattcagatgttgcagcctcatatattgagactcagctcatgaaggccagggagcaacagcagccacaaacacctcaacagaggcagcagcaaccacagcatatacaaatgcaacaaatgctgttacaaagagctgtgcatcagcagcaacagcagcaacagcagcagcagcaacaacaacaacaacaacaacaacaacctcagcagcagcagcagctgcaacagcagcgcagagatggttctcatcttctcaatggttctgcgaatggaatttctggaaacaatcctttaatgcgacaaaaccaaagtactgcaaatgttatggcaacaaaaatgtatgaggaaaggttaaaggtaccttcccagagagactctttcgaagaggcatcattgaagcaaagatacggagagaacgctgggcaactacttgattcaaatgaagcatcattgttgaaagcagcttcaagtgcacaatcctcagggcaaattttgcatggaactgttggtggcttatcaggcactctgcaacaagttcaggccaggagcccccaacttcctgggcctgctcagggtatcaagacagagattaatcacgttctgactcccagaggtgcaggcccagaagggtcatttataggtgtccaaggatctaatcaagctgggaacaatttgactctgaaaggatggccactcacgggacttgagcaacttaggtcaggaattcttcagcagaagtcatttatacagaatcaacagcaattgcaccagcaaatccagatgctgactccacagcagcagcagcagcttatgctgcaggctcagcaaaatatgtcttcaccaacatctagtgacgtcgacaacagaagattgaggatgatgctaaatagaaatgctgttcttggccgggatggacagacaaatagtggtagtgatattattccaaatattggctctcctagtcaaagtggcggagatatagatatgcttataaagtagaagaaacttgctcagcagcagcaactattacaacagcaaagcaatagccaacagctcccacagcaacatcagcttcagcaacctgctgtctctagccagcaatctcaaagttcaaatcaacatcttcaacaagaaaaactaggaattggaagtatgcctgttgatgggggcataccaaactcatttgggggagctgaacagacagcgaaaaagagaaagaagccaggctcatcctctggtagagccaatagttcaggcacagccaatactgctggtccctctccaagttctgcaccctcgacaccttccactcatacaccaggagatgcaatgtctgtgccacagctgcagcagaatggcggttcagctaaacccatggtaatgtttggctctgatggaactgggagcttgacatctccagcaaacccattggatgatgtggaccgtttgctggaagatggctcattggatgataatgttgaatcttttctatcacaggatgacatggatcctagggacaacttggggcgatgcatggatgctagcaaaggttttggtttttctgaggttgccaaagcacgtgcaagtgcagccaaagttgtctgttgccacttctcagctgatggtaagctgcttgctactggtggtcatgataaaaaggttactttgtggtgtacagattctctgaagcctaaatccttcctggaagagcactcgtttcttatcactgatgttagatttagcccaagcatgtcgcgccttgcaacatcctccttcgacaaaactgtgcgggtttgggatgcagataacactgactattcactccgaactttcacgggccattcagcatctgtcatgtcacttgattttcatccaaacaaagaggatatgatatgctcctgtgatggtgatggggaagtgcgcagctggagcataaataatggtagctgtttgacatgtgttaaggtgtttaaggcaggtgctactcagatgagatttcaacctcgtaagggaaagtatctagcagctgcctcagagaaagcaatctacatacttgatggggagacacaacatgcttgtagaagccccttgcaggggcacaataagaatattcaatcgctttgttgggactctgctggtgaatatctggcttctgtcagtgaagactcagtcagaatatggtcattcagttctggacgtgatggtgaatttgtgcacgaattgaatcgcagtggaaatcagttccactcatgtgttttccacccaacttatcaatccttgttagtgattggttgttacgagtccttggaactttgggacataagggagaagaacaccatgaccttcaacaatgcgcatgacggtttggttgcagccctggcagcatccagtgcaacagggaaggttgcctcagtaagccatgataggactctcaagctctggaaatgacttgtatgaaacccatgttggacttctgtattctggctgttagatgatagacaaacaagactttgccaaaaatgaccacatgacgaaaaggttgctgacaagatactctggagccgcgtgggctcaagaactaacagtgttttgttttgtggtcgttgtatgctgttcagtatgccactgaagcttgtaacttgtaactcgtaatagaaactttggttgaagaaagattgtacctcggacaagtggcaaatatttattctctaaaatattctgcattttgttttttgaccttgtattttaacgtaattgagcctgaagcatagttttattgccggtaaaactacatggactcaaa

SEQ ID NO: 37393 - DNA, 872 bp, Zea Mays
gtccatgtcattcctaaattgcgggccacgtacagattattcagtcagtatgttgggatgccgcgggcaactatctggcgtctgtcagtgaagattctgtcagggtgtggtcatttacctcagggaactacatcgaatgcatacatgagctgatctgcagcgggaacaagttccattcgtgtgtttttcacccaaattacccgaatttgcttataatcggttgttatgagtccctagagctttgggacataagggagaagaacacggtgacaatcagcaacgctcatgacggcatggttgctgccctagccgcgtcaagtgcatcggggctggttgcatcagtgagtcatgatcagctcgttaagctctggaggtgacactgaacacagcaacgctcgtctgtgtcattctcatttccagtgtcgtggcaaaagcgaaagggcagctgatctgatctcctaggttgatttgcgactgtggcatgcgcaaactattcaaatagttgtcagtaatgtgcttcccttatttctttgtttgtttatccatgccgggtgatactatgttacaattttatctatttagagaactgctattataatttgacctcccacttaggcctatttggctactctagtatttattccaatccatgtgtattgaagtgggttagggtgtaaattagtttaatttatacacaattcaactcaatacatgtggatttagttgaatactagggattaatgtaaatactatagtatccaaataaagtaggcttatgttcatttcatcccctagtccacggggattgaaggagattggagtggactgatagtggttttgagtttatcccccatgagtttgataaaaacgaa

SEQ ID NO: 37394 - DNA, 2637 bp, Zea Mays
cgcatctccatcccgccgccccctgcccttggagcatggcgcgggccgcgggggctgctgctgcgccgtcgcaggcactgctgctttgcaggcactcgtcgtcctcaccagccttacacatgacgtatccaggaaaaggactagggagagaacagaggaaggagatgtcatgttggcctgcaaattttgcatgggactgctagtggtttgtcaggtactccgcaacaagttcaggcaagaagcccacaacaaccacctacagcagaacagaatatcaggaccgagatcaatccagtgttgacaccaagagcagcaggcactgagggttcattgattggtatccaaggatctaatcaggctggaaacaatttaactctgaaaggctggccgctcacgggacttgatcattttcgctctggaattctgcagcagaagccatttatgcaatctccacagcaatttcagcagctccagtttctgaccccacagcagcagcagcagcttttgctgcacgctcagcaaaatctgtcgtcctcgatgtcaagcgatgttgataccaggagattaaggatgcttcttaacaacaggaatgtggtccttggacaggatgggcagacaaatagcggcggtgatgttatcccaaatattggttcgccagggcaaagtggtggatcgcgtaatgatatagatatactaataaagaagaaatttgctcttctacagcagcagcagcagcagcaaagtcatagccagcagcagcagcttcagcaacctgcgctctctggacagcaatctcaaagttcaaaccagcttctccatcagcatggaaaaccaggagttgggagcttgcctattgatggaaacttgccaaactcttttggatttcctgaacaaggatcaaagaagagaaagaaacctgtctcatcctctggtagagctaatagttcaggaacagcgaacactgctgggccatctcctagctctgcaccctcaacaccatctactcacacgccaggagatgcaatgtccattccacagctgcagtataatggtggcccttcaaaaccattgatgatgtttggctctgatggcactggaagcttgacttctccagcaaacccgctgggtgatgttgaacgtctgttggaagatggttccttggatgaaaatgtagaatcttttttatcgcaagatgacatggatcctcgagaaacaatgggacgctgcatggattctagtaaagggttgggttttactgaggttgcaaaagcccgtgcgagtacaaacaaagttgtttgttgccatttctcattggatgggaaacttcttgccaccggagggcatgataaaaaggtcgttttatggtttacagatgtgctaaaacgtaaatccgcattagaagagcactcttccctaattacagatgtccgattcagccctggcatgacccgccttgccacatcttcctttgacaaaaccgtgcgggtttgggacgctgacaatccagattattcgctacgcacttttacaggtcattcagcatctgtcatgtcacttgattttcatccgaacaaagaagacatcgtttgttcgtgtgatagtgatggtgaagtgcggtgttggagcataaataatggtagttgtgtgacctgcgttagggttttcaatggaggagctactcggttaagatttcaacctcgccagggtaaatatctggcagctgcctcagaaaagggaatatccatactggatgcggagacattacaagtttgtagaactcctttgcagggccacgtacagattattcagtcagtatgttgggatgccgcgggcaactatctggcgtctgtcagtgaagattctgtcagggtgtggtcatttacctcagggaactacatcgaatgcatacatgagctgatctgcagcgggaacaagttccattcgtgtgtttttcacccaaattacccgaatttgcttataatcggttgttatgagtccctagagctttgggacataagggagaagaacacggtgacaatcagcaacgctcatgacggcatggttgctgccctagccgcgtcaagtgcatcggggctggttgcatcagtgagtcatgatcagctcgttaagctctggaggtgacactgaacacagcaacgctcgtctgtgtcattctcatttccagtgtcgtggcaaaagcgaaagggcagctgatctgatctcctaggttgatttgcgactgtggcatgcgcaaactattcaaatagttgtcagtaatgtgcttcccttatttctttgtttgtttatccatgccgggtgatactatgttacaattttatctatttagagaactgctattataatttgacctcccacttaggcctatttggctactctagtatttattccaatccatgtgtattgaagtgggttagggtgtaaattagtttaatttatacacaattcaactcaatacatgtggatttagttgaatactagggattaatgtaaatactatagtatccaaataaagtaggcttatgttcatttcatcccctagtccacggggattgaaggagattggagtggactgatagtggttttgagtttatcccccatgagtttgataaaaacgaa

SEQ ID NO: 37395 - DNA, 2809 bp, Zea Mays
cagggaggcggctgagaagagcagggcgcaaaggtggaggcgtatgtggtgatgcctgaggcctgacggttttaggactcagctaattaaagcaagggaacaacaacaccagcagccacctcaacaacagcaacagcagcagcaaatacaaatgcaacaaatgctgttacatagagctgcacagcagcagcaacagcagcagcgtagagatggttctcttctcaatgcaaaaatgtatgaagagaggttaaagctccctccccagcgggattctctggatgaggcgtcaataaagttgcagcaaagatatggagaaaatgtgggacaagtaattgatccgaaccaagcactattgaaagcagctgcagctggacaatcctctgggcaaattttgcatgggactgctagtggtttgtcaggtactccgcaacaagttcaggcaagaagcccacaacaaccacctacagcagaacagaatatcaggaccgagatcaatccagtgttgacaccaagagcagcaggcactgagggttcattgattggtatccaaggatctaatcaggctggaaacaatttaactctgaaaggctggccgctcacgcagaagccatttatgcaatctccacagcaatttcagcagctccagtttctgaccccacagcagcagcagcagcttttgctgcacgctcagcaaaatctgtcgtcctcgatgtcaagcgatgttgataccaggagattaaggatgcttcttaacaacaggaatgtggtccttggacaggatgggcagacaaatagcggcggtgatgttatcccaaatattggttcgccagggcaaagtggtggatcgcgtaatgatatagatatactaataaagaagaaatttgctcttctacagcagcagcagcagcagcaaagtcatagccagcagcagcagcttcagcaacctgcgctctctggacagcaatctcaaagttcaaaccagcttctccatcagcatggaaaaccaggagttgggagcttgcctattgatggaaacttgccaaactcttttggatttcctgaacaaggatcaaagaagagaaagaaacctgtctcatcctctggtagagctaatagttcaggaacagcgaacactgctgggccatctcctagctctgcaccctcaacaccatctactcacacgccaggagatgcaatgtccattccacagctgcagtataatggtggcccttcaaaaccattgatgatgtttggctctgatggcactggaagcttgacttctccagcaaacccgctgggtgatgttgaacgtctgttggaagatggttccttggatgaaaatgtagaatcttttttatcgcaagatgacatggatcctcgagaaacaatgggacgctgcatggattctagtaaagggttgggttttactgaggttgcaaaagcccgtgcgagtacaaacaaagttgtttgttgccatttctcattggatgggaaacttcttgccaccggagggcatgataaaaaggtcgttttatggtttacagatgtgctaaaacgtaaatccgcattagaagagcactcttccctaattacagatgtccgattcagccctggcatgacccgccttgccacatcttcctttgacaaaaccgtgcgggtttgggacgctgacaatccagattattcgctacgcacttttacaggtcattcagcatctgtcatgtcacttgattttcatccgaacaaagaagacatcgtttgttcgtgtgatagtgatggtgaagtgcggtgttggagcataaataatggtagttgtgtgacctgcgttagggttttcaatggaggagctactcggttaagatttcaacctcgccagggtaaatatctggcagctgcctcagaaaagggaatatccatactggatgcggagacattacaagtttgtagaactcctttgcagggccacgtacagattattcagtcagtatgttgggatgccgcgggcaactatctggcgtctgtcagtgaagattctgtcagggtgtggtcatttacctcagggaactacatcgaatgcatacatgagctgatctgcagcgggaacaagttccattcgtgtgtttttcacccaaattacccgaatttgcttataatcggttgttatgagtccctagagctttgggacataagggagaagaacacggtgacaatcagcaacgctcatgacggcatggttgctgccctagccgcgtcaagtgcatcggggctggttgcatcagtgagtcatgatcagctcgttaagctctggaggtgacactgaacacagcaacgctcgtctgtgtcattctcatttccagtgtcgtggcaaaagcgaaagggcagctgatctgatctcctaggttgatttgcgactgtggcatgcgcaaactattcaaatagttgtcagtaatgtgcttcccttatttctttgtttgtttatccatgccgggtgatactatgttacaattttatctatttagagaactgctattataatttgacctcccacttaggcctatttggctactctagtatttattccaatccatgtgtattgaagtgggttagggtgtaaattagtttaatttatacacaattcaactcaatacatgtggatttagttgaatactagggattaatgtaaatactatagtatccaaataaagtaggcttatgttcatttcatcccctagtccacggggattgaaggagattggagtggactgatagtggttttgagtttatcccccatgagtttgataaaaacgaa

SEQ ID NO: 37396 - DNA, 2918 bp, Zea Mays
cggcagacgagctcatcgtcgtcgagctgagagcagggcagcaggcgaggaggacaggcaccaggtgggcaaagcacagggaggcggctgagaagagcagggcgcaaaggtggaggcgtatgtggtgatgcctgaggcctgacggttttaggactcagctaattaaagcaagggaacaacaacaccagcagccacctcaacaacagcaacagcagcagcaaatacaaatgcaacaaatgctgttacatagagctgcacagcagcagcaacagcagcagcgtagagatggttctcttctcaatgcaaaaatgtatgaagagaggttaaagctccctccccagcgggattctctggatgaggcgtcaataaagttgcagcaaagatatggagaaaatgtgggacaagtaattgatccgaaccaagcactattgaaagcagctgcagctggacaatcctctgggcaaattttgcatgggactgctagtggtttgtcaggtactccgcaacaagttcaggcaagaagcccacaacaaccacctacagcagaacagaatatcaggaccgagatcaatccagtgttgacaccaagagcagcaggcactgagggttcattgattggtatccaaggatctaatcaggctggaaacaatttaactctgaaaggctggccgctcacgggacttgatcattttcgctctggaattctgcagcagaagccatttatgcaatctccacagcaatttcagcagctccagtttctgaccccacagcagcagcagcagcttttgctgcacgctcagcaaaatctgtcgtcctcgatgtcaagcgatgttgataccaggagattaaggatgcttcttaacaacaggaatgtggtccttggacaggatgggcagacaaatagcggcggtgatgttatcccaaatattggttcgccagggcaaagtggtggatcgcgtaatgatatagatatactaataaagaagaaatttgctcttctacagcagcagcagcagcagcaaagtcatagccagcagcagcagcttcagcaacctgcgctctctggacagcaatctcaaagttcaaaccagcttctccatcagcatggaaaaccaggagttgggagcttgcctattgatggaaacttgccaaactcttttggatttcctgaacaaggatcaaagaagagaaagaaacctgtctcatcctctggtagagctaatagttcaggaacagcgaacactgctgggccatctcctagctctgcaccctcaacaccatctactcacacgccaggagatgcaatgtccattccacagctgcagtataatggtggcccttcaaaaccattgatgatgtttggctctgatggcactggaagcttgacttctccagcaaacccgctgggtgatgttgaacgtctgttggaagatggttccttggatgaaaatgtagaatcttttttatcgcaagatgacatggatcctcgagaaacaatgggacgctgcatggattctagtaaagggttgggttttactgaggttgcaaaagcccgtgcgagtacaaacaaagttgtttgttgccatttctcattggatgggaaacttcttgccaccggagggcatgataaaaaggtcgttttatggtttacagatgtgctaaaacgtaaatccgcattagaagagcactcttccctaattacagatgtccgattcagccctggcatgacccgccttgccacatcttcctttgacaaaaccgtgcgggtttgggacgctgacaatccagattattcgctacgcacttttacaggtcattcagcatctgtcatgtcacttgattttcatccgaacaaagaagacatcgtttgttcgtgtgatagtgatggtgaagtgcggtgttggagcataaataatggtagttgtgtgacctgcgttagggttttcaatggaggagctactcggttaagatttcaacctcgccagggtaaatatctggcagctgcctcagaaaagggaatatccatactggatgcggagacattacaagtttgtagaactcctttgcagggccacgtacagattattcagtcagtatgttgggatgccgcgggcaactatctggcgtctgtcagtgaagattctgtcagggtgtggtcatttacctcagggaactacatcgaatgcatacatgagctgatctgcagcgggaacaagttccattcgtgtgtttttcacccaaattacccgaatttgcttataatcggttgttatgagtccctagagctttgggacataagggagaagaacacggtgacaatcagcaacgctcatgacggcatggttgctgccctagccgcgtcaagtgcatcggggctggttgcatcagtgagtcatgatcagctcgttaagctctggaggtgacactgaacacagcaacgctcgtctgtgtcattctcatttccagtgtcgtggcaaaagcgaaagggcagctgatctgatctcctaggttgatttgcgactgtggcatgcgcaaactattcaaatagttgtcagtaatgtgcttcccttatttctttgtttgtttatccatgccgggtgatactatgttacaattttatctatttagagaactgctattataatttgacctcccacttaggcctatttggctactctagtatttattccaatccatgtgtattgaagtgggttagggtgtaaattagtttaatttatacacaattcaactcaatacatgtggatttagttgaatactagggattaatgtaaatactatagtatccaaataaagtaggcttatgttcatttcatcccctagtccacggggattgaaggagattggagtggactgatagtggttttgagtttatcccccatgagtttgataaaaacgaa

SEQ ID NO: 37397 - DNA, 3052 bp, Zea Mays
cttgtattctcaagtcattgacttcttgactccttgtaggctggatgtgtacatatatgactattttgtcaagagaaacctgcaggcaaccgcaaaggccttccaagcagaaggcaaggtctcatcagatccagttgctattgatgctcctggtggctttctctttgagtggtggtctgtattttgggatatattcatagcaagaacaaatgagaagcattcagatgttgcagcatcatatatcgagactcagctaattaaagcaagggaacaacaacaccagcagccacctcaacaacagcaacagcagcagcaaatacaaatgcaacaaatgctgttacatagagctgcacagcagcagcaacagcagcagcgtagagatggttctcttctcaatggtactgcaagtggattttctgggaatgatcctttaatccgacaaaatccagctaatgcgaattcgatggcagcaaaaatgtatgaagagaggttaaagctccctccccagcgggattctctggatgaggcgtcaataaagttgcagcaaagatatggagaaaatgtgggacaagtaattgatccgaaccaagcactattgaaagcagctgcagctggacaatcctctgggcaaattttgcatgggactgctagtggtttgtcaggtactccgcaacaagttcaggcaagaagcccacaacaaccacctacagcagaacagaatatcaggaccgagatcaatccagtgttgacaccaagagcagcaggcactgagggttcattgattggtatccaaggatctaatcaggctggaaacaatttaactctgaaaggctggccgctcacgcagaagccatttatgcaatctccacagcaatttcagcagctccagtttctgaccccacagcagcagcagcagcttttgctgcacgctcagcaaaatctgtcgtcctcgatgtcaagcgatgttgataccaggagattaaggatgcttcttaacaacaggaatgtggtccttggacaggatgggcagacaaatagcggcggtgatgttatcccaaatattggttcgccagggcaaagtggtggatcgcgtaatgatatagatatactaataaagaagaaatttgctcttctacagcagcagcagcagcagcaaagtcatagccagcagcagcagcttcagcaacctgcgctctctggacagcaatctcaaagttcaaaccagcttctccatcagcatggaaaaccaggagttgggagcttgcctattgatggaaacttgccaaactcttttggatttcctgaacaaggatcaaagaagagaaagaaacctgtctcatcctctggtagagctaatagttcaggaacagcgaacactgctgggccatctcctagctctgcaccctcaacaccatctactcacacgccaggagatgcaatgtccattccacagctgcagtataatggtggcccttcaaaaccattgatgatgtttggctctgatggcactggaagcttgacttctccagcaaacccgctgggtgatgttgaacgtctgttggaagatggttccttggatgaaaatgtagaatcttttttatcgcaagatgacatggatcctcgagaaacaatgggacgctgcatggattctagtaaagggttgggttttactgaggttgcaaaagcccgtgcgagtacaaacaaagttgtttgttgccatttctcattggatgggaaacttcttgccaccggagggcatgataaaaaggtcgttttatggtttacagatgtgctaaaacgtaaatccgcattagaagagcactcttccctaattacagatgtccgattcagccctggcatgacccgccttgccacatcttcctttgacaaaaccgtgcgggtttgggacgctgacaatccagattattcgctacgcacttttacaggtcattcagcatctgtcatgtcacttgattttcatccgaacaaagaagacatcgtttgttcgtgtgatagtgatggtgaagtgcggtgttggagcataaataatggtagttgtgtgacctgcgttagggttttcaatggaggagctactcggttaagatttcaacctcgccagggtaaatatctggcagctgcctcagaaaagggaatatccatactggatgcggagacattacaagtttgtagaactcctttgcagggccacgtacagattattcagtcagtatgttgggatgccgcgggcaactatctggcgtctgtcagtgaagattctgtcagggtgtggtcatttacctcagggaactacatcgaatgcatacatgagctgatctgcagcgggaacaagttccattcgtgtgtttttcacccaaattacccgaatttgcttataatcggttgttatgagtccctagagctttgggacataagggagaagaacacggtgacaatcagcaacgctcatgacggcatggttgctgccctagccgcgtcaagtgcatcggggctggttgcatcagtgagtcatgatcagctcgttaagctctggaggtgacactgaacacagcaacgctcgtctgtgtcattctcatttccagtgtcgtggcaaaagcgaaagggcagctgatctgatctcctaggttgatttgcgactgtggcatgcgcaaactattcaaatagttgtcagtaatgtgcttcccttatttctttgtttgtttatccatgccgggtgatactatgttacaattttatctatttagagaactgctattataatttgacctcccacttaggcctatttggctactctagtatttattccaatccatgtgtattgaagtgggttagggtgtaaattagtttaatttatacacaattcaactcaatacatgtggatttagttgaatactagggattaatgtaaatactatagtatccaaataaagtaggcttatgttcatttcatcccctagtccacggggattgaaggagattggagtggactgatagtggttttgagtttatcccccatgagtttgataaaaacgaa

SEQ ID NO: 37398 - DNA, 3181 bp, Zea Mays
gattgcatgggcggattggtagcttggtagaggcctacagatgatgccttacaatcgagaatcgacaaccattacaataaaagatgttgctagttccttgtattctcaagtcattgacttcttgactccttgtaggctggatgtgtacatatatgactattttgtcaagagaaacctgcaggcaaccgcaaaggccttccaagcagaaggcaaggtctcatcagatccagttgctattgatgctcctggtggctttctctttgagtggtggtctgtattttgggatatattcatagcaagaacaaatgagaagcattcagatgttgcagcatcatatatcgagactcagctaattaaagcaagggaacaacaacaccagcagccacctcaacaacagcaacagcagcagcaaatacaaatgcaacaaatgctgttacatagagctgcacagcagcagcaacagcagcagcgtagagatggttctcttctcaatggtactgcaagtggattttctgggaatgatcctttaatccgacaaaatccagctaatgcgaattcgatggcagcaaaaatgtatgaagagaggttaaagctccctccccagcgggattctctggatgaggcgtcaataaagttgcagcaaagatatggagaaaatgtgggacaagtaattgatccgaaccaagcactattgaaagcagctgcagctggacaatcctctgggcaaattttgcatgggactgctagtggtttgtcaggtactccgcaacaagttcaggcaagaagcccacaacaaccacctacagcagaacagaatatcaggaccgagatcaatccagtgttgacaccaagagcagcaggcactgagggttcattgattggtatccaaggatctaatcaggctggaaacaatttaactctgaaaggctggccgctcacgggacttgatcattttcgctctggaattctgcagcagaagccatttatgcaatctccacagcaatttcagcagctccagtttctgaccccacagcagcagcagcagcttttgctgcacgctcagcaaaatctgtcgtcctcgatgtcaagcgatgttgataccaggagattaaggatgcttcttaacaacaggaatgtggtccttggacaggatgggcagacaaatagcggcggtgatgttatcccaaatattggttcgccagggcaaagtggtggatcgcgtaatgatatagatatactaataaagaagaaatttgctcttctacagcagcagcagcagcagcaaagtcatagccagcagcagcagcttcagcaacctgcgctctctggacagcaatctcaaagttcaaaccagcttctccatcagcatggaaaaccaggagttgggagcttgcctattgatggaaacttgccaaactcttttggatttcctgaacaaggatcaaagaagagaaagaaacctgtctcatcctctggtagagctaatagttcaggaacagcgaacactgctgggccatctcctagctctgcaccctcaacaccatctactcacacgccaggagatgcaatgtccattccacagctgcagtataatggtggcccttcaaaaccattgatgatgtttggctctgatggcactggaagcttgacttctccagcaaacccgctgggtgatgttgaacgtctgttggaagatggttccttggatgaaaatgtagaatcttttttatcgcaagatgacatggatcctcgagaaacaatgggacgctgcatggattctagtaaagggttgggttttactgaggttgcaaaagcccgtgcgagtacaaacaaagttgtttgttgccatttctcattggatgggaaacttcttgccaccggagggcatgataaaaaggtcgttttatggtttacagatgtgctaaaacgtaaatccgcattagaagagcactcttccctaattacagatgtccgattcagccctggcatgacccgccttgccacatcttcctttgacaaaaccgtgcgggtttgggacgctgacaatccagattattcgctacgcacttttacaggtcattcagcatctgtcatgtcacttgattttcatccgaacaaagaagacatcgtttgttcgtgtgatagtgatggtgaagtgcggtgttggagcataaataatggtagttgtgtgacctgcgttagggttttcaatggaggagctactcggttaagatttcaacctcgccagggtaaatatctggcagctgcctcagaaaagggaatatccatactggatgcggagacattacaagtttgtagaactcctttgcagggccacgtacagattattcagtcagtatgttgggatgccgcgggcaactatctggcgtctgtcagtgaagattctgtcagggtgtggtcatttacctcagggaactacatcgaatgcatacatgagctgatctgcagcgggaacaagttccattcgtgtgtttttcacccaaattacccgaatttgcttataatcggttgttatgagtccctagagctttgggacataagggagaagaacacggtgacaatcagcaacgctcatgacggcatggttgctgccctagccgcgtcaagtgcatcggggctggttgcatcagtgagtcatgatcagctcgttaagctctggaggtgacactgaacacagcaacgctcgtctgtgtcattctcatttccagtgtcgtggcaaaagcgaaagggcagctgatctgatctcctaggttgatttgcgactgtggcatgcgcaaactattcaaatagttgtcagtaatgtgcttcccttatttctttgtttgtttatccatgccgggtgatactatgttacaattttatctatttagagaactgctattataatttgacctcccacttaggcctatttggctactctagtatttattccaatccatgtgtattgaagtgggttagggtgtaaattagtttaatttatacacaattcaactcaatacatgtggatttagttgaatactagggattaatgtaaatactatagtatccaaataaagtaggcttatgttcatttcatcccctagtccacggggattgaaggagattggagtggactgatagtggttttgagtttatcccccatgagtttgataaaaacgaa

SEQ ID NO: 37399 - DNA, 3315 bp, Zea Mays
ccacacctctgctcttccctctcgcctcccgccgttacagcttgcagctccagccccaacccccgtccctctctccctgagccgtcgccttcgccttcgctgcgaaatctagggtttacgccgcgcatcgggtaccgcgcacgcaccgaccgaccacccggcggtcggcgccgctacacgcgggctcgctctcaggtggttgagcgtggccggagaaggggaggggcgacactgctcgtgggtgggtcagccagtgtgccccacgaggaacggcaatcatgtcgcagacgaactgggaggcggataagatgctggatgtgtacatatatgactattttgtcaagagaaacctgcaggcaaccgcaaaggccttccaagcagaaggcaaggtctcatcagatccagttgctattgatgctcctggtggctttctctttgagtggtggtctgtattttgggatatattcatagcaagaacaaatgagaagcattcagatgttgcagcatcatatatcgagactcagctaattaaagcaagggaacaacaacaccagcagccacctcaacaacagcaacagcagcagcaaatacaaatgcaacaaatgctgttacatagagctgcacagcagcagcaacagcagcagcgtagagatggttctcttctcaatggtactgcaagtggattttctgggaatgatcctttaatccgacaaaatccagctaatgcgaattcgatggcagcaaaaatgtatgaagagaggttaaagctccctccccagcgggattctctggatgaggcgtcaataaagttgcagcaaagatatggagaaaatgtgggacaagtaattgatccgaaccaagcactattgaaagcagctgcagctggacaatcctctgggcaaattttgcatgggactgctagtggtttgtcaggtactccgcaacaagttcaggcaagaagcccacaacaaccacctacagcagaacaggaccgagatcaatccagtgttgacaccaagagcagcaggcactgagggttcattgattggtatccaaggatctaatcaggctggaaacaatttaactctgaaaggctggccgctcacgcagaagccatttatgcaatctccacagcaatttcagcagctccagtttctgaccccacagcagcagcagcagcttttgctgcacgctcagcaaaatctgtcgtcctcgatgtcaagcgatgttgataccaggagattaaggatgcttcttaacaacaggaatgtggtccttggacaggatgggcagacaaatagcggcggtgatgttatcccaaatattggttcgccagggcaaagtggtggatcgcgtaatgatatagatatactaataaagaagaaatttgctcttctacagcagcagcagcagcagcaaagtcatagccagcagcagcagcttcagcaacctgcgctctctggacagcaatctcaaagttcaaaccagcttctccatcagcatggaaaaccaggagttgggagcttgcctattgatggaaacttgccaaactcttttggatttcctgaacaaggatcaaagaagagaaagaaacctgtctcatcctctggtagagctaatagttcaggaacagcgaacactgctgggccatctcctagctctgcaccctcaacaccatctactcacacgccaggagatgcaatgtccattccacagctgcagtataatggtggcccttcaaaaccattgatgatgtttggctctgatggcactggaagcttgacttctccagcaaacccgctgggtgatgttgaacgtctgttggaagatggttccttggatgaaaatgtagaatcttttttatcgcaagatgacatggatcctcgagaaacaatgggacgctgcatggattctagtaaagggttgggttttactgaggttgcaaaagcccgtgcgagtacaaacaaagttgtttgttgccatttctcattggatgggaaacttcttgccaccggagggcatgataaaaaggtcgttttatggtttacagatgtgctaaaacgtaaatccgcattagaagagcactcttccctaattacagatgtccgattcagccctggcatgacccgccttgccacatcttcctttgacaaaaccgtgcgggtttgggacgctgacaatccagattattcgctacgcacttttacaggtcattcagcatctgtcatgtcacttgattttcatccgaacaaagaagacatcgtttgttcgtgtgatagtgatggtgaagtgcggtgttggagcataaataatggtagttgtgtgacctgcgttagggttttcaatggaggagctactcggttaagatttcaacctcgccagggtaaatatctggcagctgcctcagaaaagggaatatccatactggatgcggagacattacaagtttgtagaactcctttgcagggccacgtacagattattcagtcagtatgttgggatgccgcgggcaactatctggcgtctgtcagtgaagattctgtcagggtgtggtcatttacctcagggaactacatcgaatgcatacatgagctgatctgcagcgggaacaagttccattcgtgtgtttttcacccaaattacccgaatttgcttataatcggttgttatgagtccctagagctttgggacataagggagaagaacacggtgacaatcagcaacgctcatgacggcatggttgctgccctagccgcgtcaagtgcatcggggctggttgcatcagtgagtcatgatcagctcgttaagctctggaggtgacactgaacacagcaacgctcgtctgtgtcattctcatttccagtgtcgtggcaaaagcgaaagggcagctgatctgatctcctaggttgatttgcgactgtggcatgcgcaaactattcaaatagttgtcagtaatgtgcttcccttatttctttgtttgtttatccatgccgggtgatactatgttacaattttatctatttagagaactgctattataatttgacctcccacttaggcctatttggctactctagtatttattccaatccatgtgtattgaagtgggttagggtgtaaattagtttaatttatacacaattcaactcaatacatgtggatttagttgaatactagggattaatgtaaatactatagtatccaaataaagtaggcttatgttcatttcatcccctagtccacggggattgaaggagattggagtggactgatagtggttttgagtttatcccccatgagtttgataaaaacgaa

SEQ ID NO: 37400 - DNA, 3406 bp, Zea Mays
catctctccaactctccttgcccggctgccccacacctctgctcttccctctcgcctcccgccgttacagcttgcagctccagccccaacccccgtccctctctccctgagccgtcgccttcgccttcgctgcgaaatctagggtttacgccgcgcatcgggtaccgcgcacgcaccgaccgaccacccggcggtcggcgccgctacacgcgggctcgctctcaggtggttgagcgtggccggagaaggggaggggcgacactgctcgtgggtgggtcagccagtgtgccccacgaggaacggcaatcatgtcgcagacgaactgggaggcggataagatgctggatgtgtacatatatgactattttgtcaagagaaacctgcaggcaaccgcaaaggccttccaagcagaaggcaaggtctcatcagatccagttgctattgatgctcctggtggctttctctttgagtggtggtctgtattttgggatatattcatagcaagaacaaatgagaagcattcagatgttgcagcatcatatatcgagactcagctaattaaagcaagggaacaacaacaccagcagccacctcaacaacagcaacagcagcagcaaatacaaatgcaacaaatgctgttacatagagctgcacagcagcagcaacagcagcagcgtagagatggttctcttctcaatggtactgcaagtggattttctgggaatgatcctttaatccgacaaaatccagctaatgcgaattcgatggcagcaaaaatgtatgaagagaggttaaagctccctccccagcgggattctctggatgaggcgtcaataaagttgcagcaaagatatggagaaaatgtgggacaagtaattgatccgaaccaagcactattgaaagcagctgcagctggacaatcctctgggcaaattttgcatgggactgctagtggtttgtcaggtactccgcaacaagttcaggcaagaagcccacaacaaccacctacagcagaacaggttacctatgatatcaaaataatatcaggaccgagatcaatccagtgttgacaccaagagcagcaggcactgagggttcattgattggtatccaaggatctaatcaggctggaaacaatttaactctgaaaggctggccgctcacgggacttgatcattttcgctctggaattctgcagcagaagccatttatgcaatctccacagcaatttcagcagctccagtttctgaccccacagcagcagcagcagcttttgctgcacgctcagcaaaatctgtcgtcctcgatgtcaagcgatgttgataccaggagattaaggatgcttcttaacaacaggaatgtggtccttggacaggatgggcagacaaatagcggcggtgatgttatcccaaatattggttcgccagggcaaagtggtggatcgcgtaatgatatagatatactaataaagaagaaatttgctcttctacagcagcagcagcagcagcaaagtcatagccagcagcagcagcttcagcaacctgcgctctctggacagcaatctcaaagttcaaaccagcttctccatcagcatggaaaaccaggagttgggagcttgcctattgatggaaacttgccaaactcttttggatttcctgaacaaggatcaaagaagagaaagaaacctgtctcatcctctggtagagctaatagttcaggaacagcgaacactgctgggccatctcctagctctgcaccctcaacaccatctactcacacgccaggagatgcaatgtccattccacagctgcagtataatggtggcccttcaaaaccattgatgatgtttggctctgatggcactggaagcttgacttctccagcaaacccgctgggtgatgttgaacgtctgttggaagatggttccttggatgaaaatgtagaatcttttttatcgcaagatgacatggatcctcgagaaacaatgggacgctgcatggattctagtaaagggttgggttttactgaggttgcaaaagcccgtgcgagtacaaacaaagttgtttgttgccatttctcattggatgggaaacttcttgccaccggagggcatgataaaaaggtcgttttatggtttacagatgtgctaaaacgtaaatccgcattagaagagcactcttccctaattacagatgtccgattcagccctggcatgacccgccttgccacatcttcctttgacaaaaccgtgcgggtttgggacgctgacaatccagattattcgctacgcacttttacaggtcattcagcatctgtcatgtcacttgattttcatccgaacaaagaagacatcgtttgttcgtgtgatagtgatggtgaagtgcggtgttggagcataaataatggtagttgtgtgacctgcgttagggttttcaatggaggagctactcggttaagatttcaacctcgccagggtaaatatctggcagctgcctcagaaaagggaatatccatactggatgcggagacattacaagtttgtagaactcctttgcagggccacgtacagattattcagtcagtatgttgggatgccgcgggcaactatctggcgtctgtcagtgaagattctgtcagggtgtggtcatttacctcagggaactacatcgaatgcatacatgagctgatctgcagcgggaacaagttccattcgtgtgtttttcacccaaattacccgaatttgcttataatcggttgttatgagtccctagagctttgggacataagggagaagaacacggtgacaatcagcaacgctcatgacggcatggttgctgccctagccgcgtcaagtgcatcggggctggttgcatcagtgagtcatgatcagctcgttaagctctggaggtgacactgaacacagcaacgctcgtctgtgtcattctcatttccagtgtcgtggcaaaagcgaaagggcagctgatctgatctcctaggttgatttgcgactgtggcatgcgcaaactattcaaatagttgtcagtaatgtgcttcccttatttctttgtttgtttatccatgccgggtgatactatgttacaattttatctatttagagaactgctattataatttgacctcccacttaggcctatttggctactctagtatttattccaatccatgtgtattgaagtgggttagggtgtaaattagtttaatttatacacaattcaactcaatacatgtggatttagttgaatactagggattaatgtaaatactatagtatccaaataaagtaggcttatgttcatttcatcccctagtccacggggattgaaggagattggagtggactgatagtggttttgagtttatcccccatgagtttgataaaaacgaa

SEQ ID NO: 37401 - DNA, 3387 bp, Zea Mays
cgcccatgtcccctcgatagcaccccctgttctttcccatctctccaactctccttgcccggctgccccacacctctgctcttccctctcgcctcccgccgttacagcttgcagctccagccccaacccccgtccctctctccctgagccgtcgccttcgccttcgctgcgaaatctagggtttacgccgcgcatcgggtaccgcgcacgcaccgaccgaccacccggcggtcggcgccgctacacgcgggctcgctctcaggtggttgagcgtggccggagaaggggaggggcgacactgctcgtgggtgggtcagccagtgtgccccacgaggaacggcaatcatgtcgcagacgaactgggaggcggataagatgctggatgtgtacatatatgactattttgtcaagagaaacctgcaggcaaccgcaaaggccttccaagcagaaggcaaggtctcatcagatccagttgctattgatgctcctggtggctttctctttgagtggtggtctgtattttgggatatattcatagcaagaacaaatgagaagcattcagatgttgcagcatcatatatcgagactcagctaattaaagcaagggaacaacaacaccagcagccacctcaacaacagcaacagcagcagcaaatacaaatgcaacaaatgctgttacatagagctgcacagcagcagcaacagcagcagcgtagagatggttctcttctcaatggtactgcaagtggattttctgggaatgatcctttaatccgacaaaatccagctaatgcgaattcgatggcagcaaaaatgtatgaagagaggttaaagctccctccccagcgggattctctggatgaggcgtcaataaagttgcagcaaagatatggagaaaatgtgggacaagtaattgatccgaaccaagcactattgaaagcagctgcagctggacaatcctctgggcaaattttgcatgggactgctagtggtttgtcaggtactccgcaacaagttcaggcaagaagcccacaacaaccacctacagcagaacagaatatcaggaccgagatcaatccagtgttgacaccaagagcagcaggcactgagggttcattgattggtatccaaggatctaatcaggctggaaacaatttaactctgaaaggctggccgctcacgaagccatttatgcaatctccacagcaatttcagcagctccagtttctgaccccacagcagcagcagcagcttttgctgcacgctcagcaaaatctgtcgtcctcgatgtcaagcgatgttgataccaggagattaaggatgcttcttaacaacaggaatgtggtccttggacaggatgggcagacaaatagcggcggtgatgttatcccaaatattggttcgccagggcaaagtggtggatcgcgtaatgatatagatatactaataaagaagaaatttgctcttctacagcagcagcagcagcagcaaagtcatagccagcagcagcagcttcagcaacctgcgctctctggacagcaatctcaaagttcaaaccagcttctccatcagcatggaaaaccaggagttgggagcttgcctattgatggaaacttgccaaactcttttggatttcctgaacaaggatcaaagaagagaaagaaacctgtctcatcctctggtagagctaatagttcaggaacagcgaacactgctgggccatctcctagctctgcaccctcaacaccatctactcacacgccaggagatgcaatgtccattccacagctgcagtataatggtggcccttcaaaaccattgatgatgtttggctctgatggcactggaagcttgacttctccagcaaacccgctgggtgatgttgaacgtctgttggaagatggttccttggatgaaaatgtagaatcttttttatcgcaagatgacatggatcctcgagaaacaatgggacgctgcatggattctagtaaagggttgggttttactgaggttgcaaaagcccgtgcgagtacaaacaaagttgtttgttgccatttctcattggatgggaaacttcttgccaccggagggcatgataaaaaggtcgttttatggtttacagatgtgctaaaacgtaaatccgcattagaagagcactcttccctaattacagatgtccgattcagccctggcatgacccgccttgccacatcttcctttgacaaaaccgtgcgggtttgggacgctgacaatccagattattcgctacgcacttttacaggtcattcagcatctgtcatgtcacttgattttcatccgaacaaagaagacatcgtttgttcgtgtgatagtgatggtgaagtgcggtgttggagcataaataatggtagttgtgtgacctgcgttagggttttcaatggaggagctactcggttaagatttcaacctcgccagggtaaatatctggcagctgcctcagaaaagggaatatccatactggatgcggagacattacaagtttgtagaactcctttgcagggccacgtacagattattcagtcagtatgttgggatgccgcgggcaactatctggcgtctgtcagtgaagattctgtcagggtgtggtcatttacctcagggaactacatcgaatgcatacatgagctgatctgcagcgggaacaagttccattcgtgtgtttttcacccaaattacccgaatttgcttataatcggttgttatgagtccctagagctttgggacataagggagaagaacacggtgacaatcagcaacgctcatgacggcatggttgctgccctagccgcgtcaagtgcatcggggctggttgcatcagtgagtcatgatcagctcgttaagctctggaggtgacactgaacacagcaacgctcgtctgtgtcattctcatttccagtgtcgtggcaaaagcgaaagggcagctgatctgatctcctaggttgatttgcgactgtggcatgcgcaaactattcaaatagttgtcagtaatgtgcttcccttatttctttgtttgtttatccatgccgggtgatactatgttacaattttatctatttagagaactgctattataatttgacctcccacttaggcctatttggctactctagtatttattccaatccatgtgtattgaagtgggttagggtgtaaattagtttaatttatacacaattcaactcaatacatgtggatttagttgaatactagggattaatgtaaatactatagtatccaaataaagtaggcttatgttcatttcatcccctagtccacggggattgaaggagattggagtggactgatagtggttttgagtttatcccccatgagtttgataaaaacgaa

SEQ ID NO: 37402 - DNA, 3425 bp, Zea Mays
cgtcgacccgcccatgtcccctcgatagcaccccctgttctttcccatctctccaactctccttgcccggctgccccacacctctgctcttccctctcgcctcccgccgttacagcttgcagctccagccccaacccccgtccctctctccctgagccgtcgccttcgccttcgctgcgaaatctagggtttacgccgcgcatcgggtaccgcgcacgcaccgaccgaccacccggcggtcggcgccgctacacgcgggctcgctctcaggtggttgagcgtggccggagaaggggaggggcgacactgctcgtgggtgggtcagccagtgtgccccacgaggaacggcaatcatgtcgcagacgaactgggaggcggataagatgctggatgtgtacatatatgactattttgtcaagagaaacctgcaggcaaccgcaaaggccttccaagcagaaggcaaggtctcatcagatccagttgctattgatgctcctggtggctttctctttgagtggtggtctgtattttgggatatattcatagcaagaacaaatgagaagcattcagatgttgcagcatcatatatcgagactcagctaattaaagcaagggaacaacaacaccagcagccacctcaacaacagcaacagcagcagcaaatacaaatgcaacaaatgctgttacatagagctgcacagcagcagcaacagcagcagcgtagagatggttctcttctcaatggtactgcaagtggattttctgggaatgatcctttaatccgacaaaatccagctaatgcgaattcgatggcagcaaaaatgtatgaagagaggttaaagctccctccccagcgggattctctggatgaggcgtcaataaagcaaagatatggagaaaatgtgggacaagtaattgatccgaaccaagcactattgaaagcagctgcagctggacaatcctctgggcaaattttgcatgggactgctagtggtttgtcaggtactccgcaacaagttcaggcaagaagcccacaacaaccacctacagcagaacagaatatcaggaccgagatcaatccagtgttgacaccaagagcagcaggcactgagggttcattgattggtatccaaggatctaatcaggctggaaacaatttaactctgaaaggctggccgctcacgggacttgatcattttcgctctggaattctgcagcagaagccatttatgcaatctccacagcaatttcagcagctccagtttctgaccccacagcagcagcagcagcttttgctgcacgctcagcaaaatctgtcgtcctcgatgtcaagcgatgttgataccaggagattaaggatgcttcttaacaacaggaatgtggtccttggacaggatgggcagacaaatagcggcggtgatgttatcccaaatattggttcgccagggcaaagtggtggatcgcgtaatgatatagatatactaataaagaagaaatttgctcttctacagcagcagcagcagcagcaaagtcatagccagcagcagcagcttcagcaacctgcgctctctggacagcaatctcaaagttcaaaccagcttctccatcagcatggaaaaccaggagttgggagcttgcctattgatggaaacttgccaaactcttttggatttcctgaacaaggatcaaagaagagaaagaaacctgtctcatcctctggtagagctaatagttcaggaacagcgaacactgctgggccatctcctagctctgcaccctcaacaccatctactcacacgccaggagatgcaatgtccattccacagctgcagtataatggtggcccttcaaaaccattgatgatgtttggctctgatggcactggaagcttgacttctccagcaaacccgctgggtgatgttgaacgtctgttggaagatggttccttggatgaaaatgtagaatcttttttatcgcaagatgacatggatcctcgagaaacaatgggacgctgcatggattctagtaaagggttgggttttactgaggttgcaaaagcccgtgcgagtacaaacaaagttgtttgttgccatttctcattggatgggaaacttcttgccaccggagggcatgataaaaaggtcgttttatggtttacagatgtgctaaaacgtaaatccgcattagaagagcactcttccctaattacagatgtccgattcagccctggcatgacccgccttgccacatcttcctttgacaaaaccgtgcgggtttgggacgctgacaatccagattattcgctacgcacttttacaggtcattcagcatctgtcatgtcacttgattttcatccgaacaaagaagacatcgtttgttcgtgtgatagtgatggtgaagtgcggtgttggagcataaataatggtagttgtgtgacctgcgttagggttttcaatggaggagctactcggttaagatttcaacctcgccagggtaaatatctggcagctgcctcagaaaagggaatatccatactggatgcggagacattacaagtttgtagaactcctttgcagggccacgtacagattattcagtcagtatgttgggatgccgcgggcaactatctggcgtctgtcagtgaagattctgtcagggtgtggtcatttacctcagggaactacatcgaatgcatacatgagctgatctgcagcgggaacaagttccattcgtgtgtttttcacccaaattacccgaatttgcttataatcggttgttatgagtccctagagctttgggacataagggagaagaacacggtgacaatcagcaacgctcatgacggcatggttgctgccctagccgcgtcaagtgcatcggggctggttgcatcagtgagtcatgatcagctcgttaagctctggaggtgacactgaacacagcaacgctcgtctgtgtcattctcatttccagtgtcgtggcaaaagcgaaagggcagctgatctgatctcctaggttgatttgcgactgtggcatgcgcaaactattcaaatagttgtcagtaatgtgcttcccttatttctttgtttgtttatccatgccgggtgatactatgttacaattttatctatttagagaactgctattataatttgacctcccacttaggcctatttggctactctagtatttattccaatccatgtgtattgaagtgggttagggtgtaaattagtttaatttatacacaattcaactcaatacatgtggatttagttgaatactagggattaatgtaaatactatagtatccaaataaagtaggcttatgttcatttcatcccctagtccacggggattgaaggagattggagtggactgatagtggttttgagtttatcccccatgagtttgataaaaacgaa

SEQ ID NO: 37403 - DNA, 3510 bp, Zea Mays
gttcccacctgtcattcactatccaagtcagataccaccgaaaaatcgatgcctcttgccgtctagcgcacacagagccgcggcgtcgacccgcccatgtcccctcgatagcaccccctgttctttcccatctctccaactctccttgcccggctgccccacacctctgctcttccctctcgcctcccgccgttacagcttgcagctccagccccaacccccgtccctctctccctgagccgtcgccttcgccttcgctgcgaaatctagggtttacgccgcgcatcgggtaccgcgcacgcaccgaccgaccacccggcggtcggcgccgctacacgcgggctcgctctcaggtggttgagcgtggccggagaaggggaggggcgacactgctcgtgggtgggtcagccagtgtgccccacgaggaacggcaatcatgtcgcagacgaactgggaggcggataagatgctggatgtgtacatatatgactattttgtcaagagaaacctgcaggcaaccgcaaaggccttccaagcagaaggcaaggtctcatcagatccagttgctattgatgctcctggtggctttctctttgagtggtggtctgtattttgggatatattcatagcaagaacaaatgagaagcattcagatgttgcagcatcatatatcgagactcagctaattaaagcaagggaacaacaacaccagcagccacctcaacaacagcaacagcagcagcaaatacaaatgcaacaaatgctgttacatagagctgcacagcagcagcaacagcagcagcgtagagatggttctcttctcaatggtactgcaagtggattttctgggaatgatcctttaatccgacaaaatccagctaatgcgaattcgatggcagcaaaaatgtatgaagagaggttaaagctccctccccagcgggattctctggatgaggcgtcaataaagttgcagcaaagatatggagaaaatgtgggacaagtaattgatccgaaccaagcactattgaaagcagctgcagctggacaatcctctgggcaaattttgcatgggactgctagtggtttgtcaggtactccgcaacaagttcaggcaagaagcccacaacaaccacctacagcagaacagaatatcaggaccgagatcaatccagtgttgacaccaagagcagcaggcactgagggttcattgattggtatccaaggatctaatcaggctggaaacaatttaactctgaaaggctggccgctcacgggacttgatcattttcgctctggaattctgcagcagaagccatttatgcaatctccacagcaatttcagcagctccagtttctgaccccacagcagcagcagcagcttttgctgcacgctcagcaaaatctgtcgtcctcgatgtcaagcgatgttgataccaggagattaaggatgcttcttaacaacaggaatgtggtccttggacaggatgggcagacaaatagcggcggtgatgttatcccaaatattggttcgccagggcaaagtggtggatcgcgtaatgatatagatatactaataaagaagaaatttgctcttctacagcagcagcagcagcagcaaagtcatagccagcagcagcagcttcagcaacctgcgctctctggacagcaatctcaaagttcaaaccagcttctccatcagcatggaaaaccaggagttgggagcttgcctattgatggaaacttgccaaactcttttggatttcctgaacaaggatcaaagaagagaaagaaacctgtctcatcctctggtagagctaatagttcaggaacagcgaacactgctgggccatctcctagctctgcaccctcaacaccatctactcacacgccaggagatgcaatgtccattccacagctgcagtataatggtggcccttcaaaaccattgatgatgtttggctctgatggcactggaagcttgacttctccagcaaacccgctgggtgatgttgaacgtctgttggaagatggttccttggatgaaaatgtagaatcttttttatcgcaagatgacatggatcctcgagaaacaatgggacgctgcatggattctagtaaagggttgggttttactgaggttgcaaaagcccgtgcgagtacaaacaaagttgtttgttgccatttctcattggatgggaaacttcttgccaccggagggcatgataaaaaggtcgttttatggtttacagatgtgctaaaacgtaaatccgcattagaagagcactcttccctaattacagatgtccgattcagccctggcatgacccgccttgccacatcttcctttgacaaaaccgtgcgggtttgggacgctgacaatattattcgctacgcacttttacaggtcattcagcatctgtcatgtcacttgattttcatccgaacaaagaagacatcgtttgttcgtgtgatagtgatggtgaagtgcggtgttggagcataaataatggtagttgtgtgacctgcgttagggttttcaatggaggagctactcggttaagatttcaacctcgccagggtaaatatctggcagctgcctcagaaaagggaatatccatactggatgcggagacattacaagtttgtagaactcctttgcagggccacgtacagattattcagtcagtatgttgggatgccgcgggcaactatctggcgtctgtcagtgaagattctgtcagggtgtggtcatttacctcagggaactacatcgaatgcatacatgagctgatctgcagcgggaacaagttccattcgtgtgtttttcacccaaattacccgaatttgcttataatcggttgttatgagtccctagagctttgggacataagggagaagaacacggtgacaatcagcaacgctcatgacggcatggttgctgccctagccgcgtcaagtgcatcggggctggttgcatcagtgagtcatgatcagctcgttaagctctggaggtgacactgaacacagcaacgctcgtctgtgtcattctcatttccagtgtcgtggcaaaagcgaaagggcagctgatctgatctcctaggttgatttgcgactgtggcatgcgcaaactattcaaatagttgtcagtaatgtgcttcccttatttctttgtttgtttatccatgccgggtgatactatgttacaattttatctatttagagaactgctattataatttgacctcccacttaggcctatttggctactctagtatttattccaatccatgtgtattgaagtgggttagggtgtaaattagtttaatttatacacaattcaactcaatacatgtggatttagttgaatactagggattaatgtaaatactatagtatccaaataaagtaggcttatgttcatttcatcccctagtccacggggattgaaggagattggagtggactgatagtggttttgagtttatcccccatgagtttgataaaaacgaa

SEQ ID NO: 37404 - DNA, 1687 bp, Zea Mays
ctcgatcccacaccacactccccgtcccgcgcgcataaaaacagcctacagctatcacgcgcacattccctctcttcctcccgaaatttcccacctcagactccgagagaagcaaacacaagaagaagaagaaaaaaaaccgtccgcacaaaaaagaaaacggcagcgccagccagtgaggagaaaagcttcagatccagctccagctccaggtccccctcctccccaatgcctcgcccgtagccgcgtccgccgcacgtcgcaatggccggccccagcgtgcccgcagcggcgctggcggccctgctcgcggtcgccgccctcacgtgctgcgccgtcgcggagccgccgccgagcgagcggtccgctctgctggcgttcctcaccgcgaccccgcacgagcgccgcctcgggtggaacgcctccaccccggcgtgcggctgggtcggggtcacgtgcgacaacgccaactccaccgtcgtcgaggtgcgcctcccgggcgtgggcctcgtcggcgccatcccgccgggcacgctcggccggctcaccaacctccgcgtgctctcgctccgctccaaccgcgtcctcgggaccgtccccgacgacgtgctccagcttgccagcctcaaggcgctgtttctgcaacagaacctgctctccggccccatcccgacgggaatccagaagctcggcggcctcgagcgcctcgtgctctcccacaacaacctctcgggctccatccccttcgcgctcaacaagctcaccgcgctgcgagtgctcaagctcgacggcaaccacctctccgggagcattcccagcatcagcatcgcggggctcggcgccttgaacgtctccgacaacaacctcaacggctccatccccaaatcgctctcgcacttcccgcgggaatccttcgccggaaacctccagctctgcggggacccgctgccgccctgcagcagctcgttctttcccccagcaccatcgcccgggcttagccctggccccgcgacgggctcctccaagaggcggaagctctccggcgccgcaatcgcgggcatcgtcgtgggcggcgtggtggtggggctcctcctcctcatcgccgtcgtgctctgcgcggtgtccaaacgtcggagcgccggcgcccgtgaggggcccaaggccgcgacgtcgtccgcggcggcggcggcgggttcgggagcgaccaggggccagcccccgccggcgtccggcgagggcggcggcatgacgtcttcgtccaaggaggacctcggaggcggcgcgtccgggtctgccgcggccgtcgcagccgcggcggcgggcggcgccgcgggggagcagagccggctggtgttcgtggggaagggcgccgggtacagcttcgacctggaggacctgctgcgcgcgtcggcggaggtgctgggcaaaggcagcgtggggacgtcgtacaaggcggtgctggaggaaggcacgacggtggtggtgaagcggctcaaggacgtggcggtgcagcggcgcgagttcgacgcgcacatggaggcggtcggcagggtggagcaccggaacgtgctccccgtccgcgcctactacttctccaaggacgagaagctgctcgtctacgactacctccccaacggcagcctctccgccatgctccacggactgtgcgaggaatccaccatcagag

SEQ ID NO: 37405 - DNA, 887 bp, Zea Mays
taaggagtctgaaaatcttgaaagagagatgtcgtcattgaaaaggcaaagtatgtacaaaagaaaacttgattcttcagtctcccagcacaaaagttgtttgaagataagttcattcaaggatttgaaggaggtgattcttcagtacaagaaatttgtatcctccttttcttgacagaatctatgacataataacatctcaggcatgcatggcaatgaggcacaatcaggattgagaacggatgggctacaaagttctttgaagatgctgctagaggtagagcgcccacacttatgttcatgacttttgttgataatttcccagcttgtcgacagttagaggctctcccattcttggatccactgaagcattttagagatctgaaagaccacatcgatgagttcatccatgcctccatggacgagcacaagacctgctttaagaagacgatccagaagatgtttgggatgtcgaaggctattgcagagagatccgcggcagaagcgaaggaagctggagttgaaagtgctttgccacttcagaccagtgtctcgcagtagaatttcacaaaaattaatgcactgcgctgaaaaaggacagaacaaagaaagatcttcaaatcaaagctaaagaagcggagattcaaaatctgaaaaagctaatgtgtaagtactactggtttcatatgtacataagttatcgtgttattatacggttccgttgcaacgcacgggcactcacctagtagtagaatagtaggagaagaagaggagcaccgtttccaatcaaattgtcttgttaaatttatgcgatcgattattttcccatatgatattttgtaatcactttgtgatgatgttcaattcttttcactcttgcactgttg

SEQ ID NO: 37406 - DNA, 920 bp, Zea Mays
catctaagaatgttaccgtaatgtaaatgactttgtatataatctttttcaggatagttcttgtgcaaaagaattacaaaaagatgggacttcaaatttaaattttgaattggaacttgactccttaagtagagatgtcgtcattgaaaaggcaaagtatgtacaaaagaaaacttgattcttcagtctcccagcacaaaagttgtttgaagataagttcattcaaggatttgaaggaggtgattcttcagtacaagaaatttgtatcctccttttcttgacagaatctatgacataataacatctcaggcatgcatggcaatgaggcacaatcaggattgagaacggatgggctacaaagttctttgaagatgctgctagaggtagagcgcccacacttatgttcatgacttttgttgataatttcccagcttgtcgacagttagaggctctcccattcttggatccactgaagcattttagagatctgaaagaccacatcgatgagttcatccatgcctccatggacgagcacaagacctgctttaagaagacgatccagaagatgtttgggatgtcgaaggctattgcagagagatccgcggcagaagcgaaggaagctggagttgaaagtgctttgccacttcagaccagtgtctcgcagtagaatttcacgttggtagtttcttgctcgatgctggctgaaagggaattaggcttacacctagttcctaaataattttggtggttgaattgcccaacacaaataattggactaactagtttgctctagtgtataagttatacaggtgccaaaggttcacaacaagccaattaaaaagaccaacgttgagttcaaaatggagagctaaaagcataccgaagtgtgccctggtctggcgcaccgaacatgtccggtg

SEQ ID NO: 37407 - DNA, 4442 bp, Zea Mays
ctcagcctcggcccacgcgagaggcgggcgctgctggagcgcctcgtccgcgtcgccgacgaggacaacgagcggttcctgctcaagctcaaggaccgcgtcgacagggtcgggatcgacatgcccacgatcgaggtacggttccagaaccttgaggcggaggcggaggtgcgcgtcggcagcagcggcctccccaccgtcctcaactccgtcgtcaacacgatcgaggaagcggcgaacgccctgcacatactgcccagtaggaagcggatcatgcccattcttcacgacgtcagcggaatcatcaagcctcgcaggatgacacttctgttaggtccgcctggatcaggcaagaccactttgttgctcgccttggccggaaggcttgacaaagacctcaaggtttcaggcaaagtgacctataatggtcatgagatgacagagtttgttccagagaggacggccgcttacatcagccagcatgacctccacataggagagatgactgtgagggagacgcttgcattctctgcacgctgccagggtgtcggctcccgttttgatatgctgactgagttgtcgaggcgagagaaggcggctaatatcaagcctgatgctgatattgatgcattcatgaaggcgtctgcaatgggtgggcaagatgccaatgtggtcactgactatattctgaagatattaggactagagatatgtgcagacacaatggtaggggatgagatgctcaggggcatatctggtggacaacggaagcgcgttacaactggtgagatgctggttgggccagccagggcgcttttcatggacgagatctcaactgggcttgatagctccactacattccaaattgtgaactcgctgaggcagtccattcacatcctcggtggcacagctgttatctccctactgcagccagcacctgagacatataacttgtttgatgatatcatactcctctcagatggtcaggttgtgtaccagggtcccagagaagaagtgcttgagttttttgagtctgtaggtttcagatgccctgagaggaagggcgttgctgacttcctgcaagaagtgacctcgaaaaaagatcagaaacagtactgggcgcgacctaatgagccctacaggtttgtggctgtgaaggaatttgcgactgcattcaagtcatcccacacagggagatctataacaaatgagcttgctgttccgttcgacaagagcaaaagccacccagccgcactaaccaccacaaggtatggtgtgagtggcaaggagctgctcaaagcaaacatagaccgggagatccttctcatgagaggaactcttttgtctacatgttcagaaccttccagctgatgctcatgtcaatcattgcaatgactctcttcttccgtaccaagatgaagcatggcacggtgaatgacgggggtctctacatgggcgcactcttctttggtgtgcttatgatcatgttcaatggcttctctgagctggcactaactgtcttcaagctgcctgtattcttcaagcagagggatctccttttctttccagcatggtcctatactataccctcatggatcctcaaggttcttcaagcagtatctgcttctgttagtagtcaatcagatggcagcatcactcttccggtttattggtggggtatcgaggaacatgattgttgctaatgtcttcgcatcgttcatgttgctagttgtcatggtgttgggaggatttattctagtaagagataaagtgaagaaatggtggatctggggctactggatctccccaatgatgtatgcacaaaatgccatttcagtgaatgagatgttgggccacagctgggacaaaatattgaatagcactgcatccaacgagaccctaggtgtgcaagtccttaagtcgcgtggagtattcaccgaagcaaagtggtactggattggctttggtgctatggttggtttcaccatactcttcaacgctctcttcactgttgcccttacatatcttaagccatatggcaactcccggccatctgtatccgaagaggagctgaaggagaagcatgcaaacatcaaaggggaggttctggatggcaatcacttggtatcagcaagcagtcatcgatcaacaggagttaaccctgaaactgattcagcaatcatggaagatgattctgccttgactaaaaggggaatgatcctcccatttgtcccgctctcgctcacctttgacaacatcaaatactctgttgacatgccacaggaaatgaaagctcaaggtgtacaagaagatcgtttggagctcctcaaaggtgtcagtggatcttttaggccgggtgtgttgaccgcactgatgggcgttagcggtgcaggaaaaactactttgatggatgtgttggctgggagaaagacaggtggatacattgaaggagacatccgtatttcaggatacccaaagaaacaagacacctttgcacgtgtatcaggatactgtgaacaaaatgatatccactcgccacaggtgacagtctatgagtccctgcttttctcagcatggctccggcttcccaaggacgtcgattcaaacaaaagaaagatcttcattgaggaggtgatggagcttgtggagctgaaaccactgagaaatgctttggttggacttcctggagtgaatggtctgtcaactgagcagaggaaaaggcttaccattgctgtggaacttgttgcaaatccatctatcatctttatggatgagccaacctcagggcttgatgcccgagcagctgcaattgtgatgcggacggtgaggaacactgtcgatactggtagaactgtggtctgcacgatacatcagcctagcattgacatatttgaagcatttgatgagcttttcctcatgaagcgtggtggagaagagatctatgctggtccacttggacatcattcttcagatctaatcaagtattttgagtcacttcatggggtcagcaaaattaaagatggctacaatccagcaacatggatgctggaagtgaccacaacttctcaggaacagattctaggtgttgatttcagtgacatatacaagaaatctgaactctaccagaggaacaaggccttgataaaggaattgagccaaccagcaccaggttcaactgacctgcatttccctagcaagtatgcgcagtcttccattacacaatgcgtggcttgcctatggaagcagaacctgtcatactggaggaaccctccttacaataccgttaggttctttttcactaccatcattgctctcctccttggcaccatcttttgggacctcggcggcaaaacgtatacatcacaagacttgatgaatgccatgggatcaatgtactctgcggtgctgttcattggagtcatgaattgtacctcagttcagccagtggtggccgtggagcgaacagtcttttaccgtgaaagagctgctggcatgtactcagctttcccatacgcgtttggccaggttgtcattgagcttccatacgcactggctcaggatatcctttacggtgtcatagtgtactctatgatagggttcgagtggacggctgctaagttcttctggtacctcttctttgggtacttcacgctgctctacttcacattctacggcatgatggccgtggggctgacacctaactaccacatcgccgcgatcgtctcctcggcattctacgccatctggaacctcttctccgggttcatcatcccccgaccgaaagtgccgatctggtggaggtggtactgctggatatgccccgtggcgtggacgctgtacgggctggttgtgtcacagttcggtgacgtcatgactccgatggacgacggaagggccgtgaaggtgttcgtcgaggactacttcgacttcaagcacagctggcttgggtgggtggccgccgtggtggtggcgttcgccgtgctctttgcgaccctgtttggctttgccatcatgaagcttaacttccagaagagataatgacgataggagttgggaaatcacctcctaggagacaaagggatttttgcattcgttgggtcgtgcaagtagatttgactgtgcatattgggagagtacgccataatatatggattcgttgattagttaaagttatagaagttattgtgtgctcctgttttttttttttgataggatattgtgctcctgtttttttttgataggatatattgtgctccttttctaggagggtgatgccgtagtactttgtaaagaatatttcacacatccagtaaaattccttgtcgccccttgcaaatgatgagttggagaaagcaaacgaaatacctcgtgcactgctgttgacgtataagtgtataatgtatatatgtttttgaatataatggcaagagctctgaagaatg

SEQ ID NO: 37408 - DNA, 4973 bp, Zea Mays
aaaaaccccaccctccgcctgagcgctctcccatcgtcccaaagcgtggcaagcgcacgccccatcccctccaaggctccaagcctccaacacaacggaatctcgttggtaacccggtgcctgctcggcgttgtggacttgtggtgcggattggtagggggagcaggaggcggcagcagagggaaggaggagggacggcgagatggacgcggcgggggacattcagaaggtggcgagtatgcggcggggcgacagcggctccatttggcggcgcggtgacgacgtgttctcgcgctcctccagggaggaggacgacgaggaggcgcttcgctgggccgcgctagagaagctgcccacctacgaccgcgtccgccgcgccatggtcccgctcggcctcggcgccgacggcgccgaggcggcgggcaggaaggggctcgtcgacgtggacgtgctcagcctcggcccacgcgagaggcgggcgctgctggagcgcctcgtccgcgtcgccgacgaggacaacgagcggttcctgctcaagctcaaggaccgcgtcgacagggtcgggatcgacatgcccacgatcgaggtacggttccagaaccttgaggcggaggcggaggtgcgcgtcggcagcagcggcctccccaccgtcctcaactccgtcgtcaacacgatcgaggaagcggcgaacgccctgcacatactgcccagtaggaagcggatcatgcccattcttcacgacgtcagcggaatcatcaagcctcgcaggatgacacttctgttaggtccgcctggatcaggcaagaccactttgttgctcgccttggccggaaggcttgacaaagacctcaaggtttcaggcaaagtgacctataatggtcatgagatgacagagtttgttccagagaggacggccgcttacatcagccagcatgacctccacataggagagatgactgtgagggagacgcttgcattctctgcacgctgccagggtgtcggctcccgttttgatatgctgactgagttgtcgaggcgagagaaggcggctaatatcaagcctgatgctgatattgatgcattcatgaaggcgtctgcaatgggtgggcaagatgccaatgtggtcactgactatattctgaagatattaggactagagatatgtgcagacacaatggtaggggatgagatgctcaggggcatatctggtggacaacggaagcgcgttacaactggtgagatgctggttgggccagccagggcgcttttcatggacgagatctcaactgggcttgatagctccactacattccaaattgtgaactcgctgaggcagtccattcacatcctcggtggcacagctgttatctccctactgcagccagcacctgagacatataacttgtttgatgatatcatactcctctcagatggtcaggttgtgtaccagggtcccagagaagaagtgcttgagttttttgagtctgtaggtttcagatgccctgagaggaagggcgttgctgacttcctgcaagaagtgacctcgaaaaaagatcagaaacagtactgggcgcgacctaatgagccctacaggtttgtggctgtgaaggaatttgcgactgcattcaagtcatcccacacagggagatctataacaaatgagcttgctgttccgttcgacaagagcaaaagccacccagccgcactaaccaccacaaggtatggtgtgagtggcaaggagctgctcaaagcaaacatagaccgggagatccttctcatgagaggaactcttttgtctacatgttcagaaccttccagctgatgctcatgtcaatcattgcaatgactctcttcttccgtaccaagatgaagcatggcacggtgaatgacgggggtctctacatgggcgcactcttctttggtgtgcttatgatcatgttcaatggcttctctgagctggcactaactgtcttcaagctgcctgtattcttcaagcagagggatctccttttctttccagcatggtcctatactataccctcatggatcctcaaggtacccatcacatttatcgaggttggtggttatgtattcttgacatactatgtcattgggttcgacccaaatgtcggcaggttcttcaagcagtatctgcttctgttagtagtcaatcagatggcagcatcactcttccggtttattggtggggtatcgaggaacatgattgttgctaatgtcttcgcatcgttcatgttgctagttgtcatggtgttgggaggatttattctagtaagagataaagtgaagaaatggtggatctggggctactggatctccccaatgatgtatgcacaaaatgccatttcagtgaatgagatgttgggccacagctgggacaaaatattgaatagcactgcatccaacgagaccctaggtgtgcaagtccttaagtcgcgtggagtattcaccgaagcaaagtggtactggattggctttggtgctatggttggtttcaccatactcttcaacgctctcttcactgttgcccttacatatcttaagccatatggcaactcccggccatctgtatccgaagaggagctgaaggagaagcatgcaaacatcaaaggggaggttctggatggcaatcacttggtatcagcaagcagtcatcgatcaacaggagttaaccctgaaactgattcagcaatcatggaagatgattctgccttgactaaaaggggaatgatcctcccatttgtcccgctctcgctcacctttgacaacatcaaatactctgttgacatgccacaggaaatgaaagctcaaggtgtacaagaagatcgtttggagctcctcaaaggtgtcagtggatcttttaggccgggtgtgttgaccgcactgatgggcgttagcggtgcaggaaaaactactttgatggatgtgttggctgggagaaagacaggtggatacattgaaggagacatccgtatttcaggatacccaaagaaacaagacacctttgcacgtgtatcaggatactgtgaacaaaatgatatccactcgccacaggtgacagtctatgagtccctgcttttctcagcatggctccggcttcccaaggacgtcgattcaaacaaaagaaagatcttcattgaggaggtgatggagcttgtggagctgaaaccactgagaaatgctttggttggacttcctggagtgaatggtctgtcaactgagcagaggaaaaggcttaccattgctgtggaacttgttgcaaatccatctatcatctttatggatgagccaacctcagggcttgatgcccgagcagctgcaattgtgatgcggacggtgaggaacactgtcgatactggtagaactgtggtctgcacgatacatcagcctagcattgacatatttgaagcatttgatgagcttttcctcatgaagcgtggtggagaagagatctatgctggtccacttggacatcattcttcagatctaatcaagtattttgagtcacttcatggggtcagcaaaattaaagatggctacaatccagcaacatggatgctggaagtgaccacaacttctcaggaacagattctaggtgttgatttcagtgacatatacaagaaatctgaactctaccagaggaacaaggccttgataaaggaattgagccaaccagcaccaggttcaactgacctgcatttccctagcaagtatgcgcagtcttccattacacaatgcgtggcttgcctatggaagcagaacctgtcatactggaggaaccctccttacaataccgttaggttctttttcactaccatcattgctctcctccttggcaccatcttttgggacctcggcggcaaaacgtatacatcacaagacttgatgaatgccatgggatcaatgtactctgcggtgctgttcattggagtcatgaattgtacctcagttcagccagtggtggccgtggagcgaacagtcttttaccgtgaaagagctgctggcatgtactcagctttcccatacgcgtttggccaggttgtcattgagcttccatacgcactggctcaggatatcctttacggtgtcatagtgtactctatgatagggttcgagtggacggctgctaagttcttctggtacctcttctttgggtacttcacgctgctctacttcacattctacggcatgatggccgtggggctgacacctaactaccacatcgccgcgatcgtctcctcggcattctacgccatctggaacctcttctccgggttcatcatcccccgaccgaaagtgccgatctggtggaggtggtactgctggatatgccccgtggcgtggacgctgtacgggctggttgtgtcacagttcggtgacgtcatgactccgatggacgacggaagggccgtgaaggtgttcgtcgaggactacttcgacttcaagcacagctggcttgggtgggtggccgccgtggtggtggcgttcgccgtgctctttgcgaccctgtttggctttgccatcatgaagcttaacttccagaagagataatgacgataggagttgggaaatcacctcctaggagacaaagggatttttgcattcgttgggtcgtgcaagtagatttgactgtgcatattgggagagtacgccataatatatggattcgttgattagttaaagttatagaagttattgtgtgctcctgttttttttttttgataggatattgtgctcctgtttttttttgataggatatattgtgctccttttctaggagggtgatgccgtagtactttgtaaagaatatttcacacatccagtaaaattccttgtcgccccttgcaaatgatgagttggagaaagcaaacgaaatacctcgtgcactgctgttgacgtataagtgtataatgtatatatgtttttgaatataatggcaagagctctgaagaatg

SEQ ID NO: 37409 - DNA, 4590 bp, Zea Mays
gaagggccaatattctgttacaaacaactccaaccaggcccagtggcccaccgacctgttttcctccaactaacgtactataactgcctccaaaaacaaaaccaaaaaaacgcagaaagaaggcgcagttgattgattcccccgacctctcccgccacaccaaccaccaatagccgccgccgccgctcccgcttccccctagctgcggcgccccgcctaccccgctccgctcgctgatcgtctgtccctgccgtcgcgtctccatccgtacatcgaggagtaacacccaccatggcgggcactcgcggcgactccggaaaccggctctgcgccgttccgtcgagcaccttcctccatcgggaacgcgctccacatcttgcccagcaggaagcggccgatgaccgtcctgcatgacgtaagcgggatcgtcaagccccggaggatgactctgctgctcggacctcccggctcggggaagaccaccttgctcctggcgctggcggggaagctcgacaaggacctcagggtctcggggaaggttacctacaacgggcacgggatgaacgagttcgtcccggagaggacagcggcctacatcagccagcacgacctccacatcggggagatgactgtgagggagaccttggccttctcggcgcggtgccaaggtgttggcaccagatacgaaatgctcactgagttggcgagaagggagaaggcagccaacatcaagccagatcatgacattgatgtctatatgaaggcctcagctatgggtgggcaagaatccagtattgttacggactacacactgaagatattaggcttggaggtctgtgctgatacgctggtaggaaatgagatgatgaggggtatttctggtggtcaacgaaagcgtgtcacaacaggtgaaatgcttgttggtccggcaagagctctgttcatggatgagatatccactggactggacagctcaaccacataccagattgtgaattcccttaggcagactatccacatccttggtggaactgcagtcatttccttgctccagccagcgcctgaaacatacaacttgttcgatgacattatactcctatctgatgggcatgttgtataccagggcccccgtgaacatgtgctcgagttctttgagttcatgggcttcagatgccctgccagaaagggtgttgctgacttcttgcaggaagtgacatcaaggaaagaccaggggcagtattggtatcggcaggacaggccataccgctttgtgcctgtgaagaaatttgcagatgcattcagtatattccacgtgggccggtccacacaaaatgaactttcagagccatttgataggacccggagccaccctgctgccctagcaacttcaaagttcggtgccagcaggatggagttgctcaaagccactattgatagggagcttctactcatgaagaggaacgcatttatgtacattttcaaagctgttaaccttactgttatgtcgtttatcgtgatgaccacatttttccgtaccaatatgaaacgagacgcatcttatggaaacatctacatgggggcactcttctttgctctcgacacaatcatgttcaatggttttgctgagcttgccatgactgtcatgaagctgccggttttcttcaagcagagggatcttttcttcttccctgcatgggcctacaccataccttcatggattgttcagatccctatcacatttttggaagtcggggtttatgttttcaccacatactatgtcattggatttgatcccaatgtgttcaggttcttgaagcaatatctgctgctccttgcactcaatcagatgtcatctgcccttttccgcttcattgctggaattggaagagacatggttgtgtctcatacctttggccccttagcactgttggcttttcaagcactgggtggctttatacttgcaagacctgatgtgaagaaatggtggatttggggttactggatctctcctctatcgtatgcacagaatgccatttcaacaaatgaatttttggggcacagttggagcaaaattcaaaatggaacaaccgtgggaattggggttcttcaaagtcgtggtgtctttactgaagctaagtggtattggattgggctcggtgtcttggttggatatgctctcctcttcaacctgctctacactgtagctcttgcagttttgagtccattcactgattcccacggatcaatgtctgaagaggaattgaaagaaaagcatgccaatttaactggtgaagtcatagaggtccgcaaggaaaagacatctaggaggcaggaattggagctgtcccacagtgttggccaaaactctgtgcatagcagtgaggattctagtcagaacaggaagggaatggcactcccatttccaccactatcacttacttttaacgacataagatactcggtggacatgccagaggcgatgaaagcgcaaggagtgacagaagatcgtttgcttcttttgaagggcgttagtggttcttttaggccaggagttctaactgcattgatgggtgttagtggtgctggaaagaccacccttatggatgtcttagctggcagaaaaactgggggatatatcgagggagatattaccatctcaggatatccaaagaagcaagagacgtttgcacgcatatcaggatactgtgagcaaaatgatattcattctccacatgtaacagtgtatgagtcactcctattttctgcatggctacgccttccttcaggcatcaacttagaaacaagaaagatgttcattgaggaggtcatggatcttgtagagctcacatcactgaggggtgcacttgttgggcttcctggagtgagtggcctgtcaactgagcaacgcaagaggctaactattgctgttgagcttgttgccaatccttcgatcattttcatggatgagcctacctccggtcttgatgctcgtgcagctgcaattgtgatgaggactgttaggaacactgtcaatactggaaggactgttgtttgcaccattcaccagccaagcattgacatatttgaagcatttgatgagcttttcttaatgaagagaggtggagaagagatatatgttggtccagtgggccagaattcatcaaaattgattgagtactttgagggaattgaaggtattagccagataaaggatgggtataacccagccacgtggatgttggaagtgagctctagttctcaggaagagatccttggggttgatttcagtgaaatctacaggcaatcagaattataccaaaggaacaaggcactcatagaggagctgagcaccccacctcctggctctagtgacctcaatttccctacacagtactccagatcgttctttactcagtgcctagcctgcttctggaagcagaaaaagtcgtattggaggaacccaacctacacagcagtgaggctactgttcactgtagtcattgcgctcatgtttgggaccatgttctgggaccttggacgaaaaactaataaacagcaggatctgttcaatgccatgggatcaatgtatgccgcagttgtatacatcggaatgcagaactctggctctgttcaaccagtggtggtggtggagcgaacagtcttctaccgagaacgagcagcgggcatgtattcagctttcccgtatgcatttggacaggtcgcaattgaaattccttatatctttgtacagactttgctatatggagtgctagtctattcaatgattgggtttgagtggactgttgccaagttcctctggtacctgttcttcatgtacttcacactgctttacttcacgttctacggaatgatggcggttggcttgactcccaacgaaaccatagccgtcattacctcatcggcgttctacaacgtgtggaacctcttctcaggatatctgatcccccgacctaaactgcctgtctggtggaggtggtacagctggatctgcccagtcgcatggacactctacggattggttgcctcccagttcggcgacatcgcgcatccgctggaggactcaccgacaggccagacggtggcgcagttcatcacggattacttcggcttccatcacgacttcctgtgggttgtcgcaggggtgcacgtcgggctgaccgtgctcttcgcgttcctgttcagttttgccatcatgaagttcaacttccagaatagatgaggacaggaggcccaggccattggcaatttttgcattcgtttgttggctgtgggtgggtgggtggacaagcatacctgctgtgcgtgtagcatctacggcccatcgattaggctgagcaagctaccatagtaccatgtaacggtgtatagagtttattttgtatttcaagcttatagaattagaaacactagaagttgtaggcgaacaaaagccttgacaagagttgagcctcctgctgccatggccagctgtagctttatacctgtcagaggcacggagcgcttctcagagaatgtaaaccgtatactggcattctaatgaatcagtgggagcagaattttgaccaagta

SEQ ID NO: 37410 - DNA, 1297 bp, Zea Mays
gggtgtgtatgttgatctagtttaatcaaatttctgcttagagcaacacgacggtgagcactttcatctcccgtatgcatccgcccgcgccgacacggttcaggtaaacagaacgtgccaggtgggcctggttgggtacaacccaacgacaacgagaagcggaggccggaggccaccgccagatcccgcataaaccatctgctctaccctccttcgcgcggccggcctgattcctcacccctgctcgccgcgaagcacagctctgtcaccgcggtttgccgtggccggcgaagatgatgtccggcggtgggtactccgccctcgacgaccccaaggcctccggatccgtcccggcggccacggggacagatccgccggccatcaggttcgccgactccaacctccagaccttcccgccgtccgaggccaggggcaagatctccggcgcctaccgcccgcccaccgacgccgatgacaccttctcgtccaagggcggaggagccggaagcggtggcagaggcggcagcgccgggttggatgatgccgcgcagggcggctggttccgcatgttctccgtggcagcgtacaagccctacttcgacgttgacacctctgacgttgtcgagagaatctgggagtccgtcttccccttccgcggcacatttaccgagaagacctccgagaaccctgacctgtatgggccattttggacatgcaccaccctgattttcgttgctgcatctattgccacttttgtcacctacctatctcacaaatggcacaagaaggaatggaactatgatatcaacttggttacctggtctgctggcttattctatggctacgtaacctttgttcctcttcttctatatgttattctcaagtacttctcagctcctgctggtctagtgcaattgtggtgcctatacggatactccctgttcatcttcattccagcatcgaaatattcagatgggtgattgctggtgttgctggtttcatgtctgctactttcgttgctgtaaatctccgtgcgcacattgtaaactctggcgagcgatggttcctgatcgttgcagggatattcctgttgcagctggggcttgctgttttgctgaaactctatttcttcacgataactgtatagggttatttacatctgtgcttgtactagtcaggaaaacacacaattttccatgtggagtcacctccatgttcattggacatcgatgtaatttcatcgggtatacaacgtgttgagcaccatttgcggtactgagcacggctggatggtacg

SEQ ID NO: 37411 - DNA, 1253 bp, Zea Mays
gccagggtgacgaagtagctgtccactaaggattaacttcttcgatgattctctagtacaaacttttggctggctttatagatcatgagccaccaaacctttcctattatttagcctagatatttggaaatagaaatatcagatctaaacttcctaacaactcagctcttgattggaggaactgatttaacttcctaacaactcatcccttgattggaggaactgatttattcaatcaaaaccttccttctaacctcttatttctttcctgtgttggctccttcctttcctgcgcctgctgctggccttgggcgcctttgatactggcggcccacaaactggtccacaacatccgtacaggtggacaccagaagaaatcaaagctgccactgggaaggatgaatgcactttcatgaaacacagtttgaaattaaggagtgtatatactgacgtcgaggattttgaaggaacaaaagacgccagcaaggaaccactggtgacaagctacaacagaaaattcatgggaacagtagactacatatgggcctcggagggtctgcatactgttaaagtcttggacacatttcccatagagattttgaaaaaaacaactgggttcccgaccaaggtatgggccattttggacatgcaccaccctgattttcgttgctgcatctattgccacttttgtcacctacctatctcacaaatggcacaagaaggaatggaactatgatatcaacttggttacctggtctgctggcttattctatggctacgtaacctttgttcctcttcttctatatgttattctcaagtacttctcagctcctgctggtctagtgcaattgtggtgcctatacggatactccctgttcatcttcattccagcatcgcttctgtctattgtgccaatagaaatattcagatgggtgattgctggtgttgctggtttcatgtctgctactttcgttgctgtaaatctccgtgcgcacattgtaaactctggcgagcgatggttcctgatcgttgcagggatattcctgttgcagctggggcttgctgttttgctgaaactctatttcttcacgataactgtatagggttatttacatctgtgcttgtactagtcaggaaaacacacaattttccatgtggagtcacctccatgttcattggacatcgatgtaatttcatcgggtatacaacgtgttgagcaccatttgcggtactgagcacggctggatggtacg

SEQ ID NO: 37412 - DNA, 1453 bp, Zea Mays
gataaaccagtgcaaaaaccaggattttgaaggaacaaaagacgccagcaaggaaccactggtgacaagctacaacagaaaattcatgggaacagtagactacatatgggcctcggagggtctgcatactgttaaagtcttggacacatttcccatagagattttgaaaaaaacaactgggttcccgaccaagaaatggggaagcgatcacattgcccttgcctgtgaattggcttttacaaaatgacgccttttatcaggcggagagggcgcctgcatagttgctagtgaccaaacacacctcaagagaaagaatactgtctacaggacgattaactgaaccaaacctcgctcttttagagctcgttaatttatttcatttttttttcgacacacctttttgaattgtgcgtgagtatggagaaccggagtacatcatttgggtccaattttagagcattgttcctgtttgattggctatggagagtgtattttggtgtgctgccactctacctgcggccctgccatctactggttcaatgacttgtttgagtcagtatgccctgcacggcactgtttggtgatttaaaccctgcacgacaattatagagtacaacataattgccctgatacaccgaccggcgtctattgccatcaggatatagatggccaaatggaagtgccggaacctagtcacaatactaacacctcttagccgtgccgtgttggcacgatagaacaggacagcccatagtggcaggaccagctagagcactacaatagtacacaattacatagtacacagttaaaacattgaaaaatcaaataagatgcttaagcataaggtatgtggagctccatcggttcttcacagcttgcttaaaatagacaaacacaaaaatgagtagatgacaaatgaatcaagattagggccttaggggataagagcacaatccaccacaactagatctagagatgataagagcaccacaagtccacaacaaacatcttattgccttaccacaagtgtcaacctcgttagatgtcggctagaggaagaagacgtaacaccatagcagcttatcatctcttaccaaagccccaagccaccaaggtgaggagaagccagaagggggaacgtgaggtggaggaccctaccggaggtcggagcctagaggtgaggcggtggtagagtggaacagtcggtggcaatgcagatttggaggaatggggaatcgcccccaaatcgccaggcgccagagagcggagagtccgagagggttcaaaagagagcgtgagaacgggcgactaacgagatggggcctaggggagggggcgatgggttagggtttagatggagccgggcttaaccgttcttggggctaatcgggtcgtgcccgtgccgaaccagcgtgcttggaaacgcggcctagacacactactagccaccggg

SEQ ID NO: 37413 - DNA, 1888 bp, Zea Mays
gccagggtgacgaagtagctgtccactaaggattaacttcttcgatgattctctagtacaaacttttggctggctttatagatcatgagccaccaaacctttcctattatttagcctagatatttggaaatagaaatatcagatctaaacttcctaacaactcagctcttgattggaggaactgatttaacttcctaacaactcatcccttgattggaggaactgatttattcaatcaaaaccttccttctaacctcttatttctttcctgtgttggctccttcctttcctgcgcctgctgctggccttgggcgcctttgatactggcggcccacaaactggtccacaacatccgtacaggtggacaccagaagaaatcaaagctgccactgggaaggatgaatgcactttcatgaaacacagtttgaaattaaggagtgtatatactgacgtcgaggattttgaaggaacaaaagacgccagcaaggaaccactggtgacaagctacaacagaaaattcatgggaacagtagactacatatgggcctcggagggtctgcatactgttaaagtcttggacacatttcccatagagattttgaaaaaaacaactgggttcccgaccaagaaatggggaagcgatcacattgcccttgcctgtgaattggcttttacaaaatgacgccttttatcaggcggagagggcgcctgcatagttgctagtgaccaaacacacctcaagagaaagaatactgtctacaggacgattaactgaaccaaacctcgctcttttagagctcgttaatttatttcatttttttttcgacacacctttttgaattgtgcgtgagtatggagaaccggagtacatcatttgggtccaattttagagcattgttcctgtttgattggctatggagagtgtattttggtgtgctgccactctacctgcggccctgccatctactggttcaatgacttgtttgagtcagtatgccctgcacggcactgtttggtgatttaaaccctgcacgacaattatagagtacaacataattgccctgatacaccgaccggcgtctattgccatcaggatatagatggccaaatggaagtgccggaacctagtcacaatactaacacctcttagccgtgccgtgttggcacgatagaacaggacagcccatagtggcaggaccagctagagcactacaatagtacacaattacatagtacacagttaaaacattgaaaaatcaaataagatgcttaagcataaggtatgtggagctccatcggttcttcacagcttgcttaaaatagacaaacacaaaaatgagtagatgacaaatgaatcaagattagggccttaggggataagagcacaatccaccacaactagatctagagatgataagagcaccacaagtccacaacaaacatcttattgccttaccacaagtgtcaacctcgttagatgtcggctagaggaagaagacgtaacaccatagcagcttatcatctcttaccaaagccccaagccaccaaggtgaggagaagccagaagggggaacgtgaggtggaggaccctaccggaggtcggagcctagaggtgaggcggtggtagagtggaacagtcggtggcaatgcagatttggaggaatggggaatcgcccccaaatcgccaggcgccagagagcggagagtccgagagggttcaaaagagagcgtgagaacgggcgactaacgagatggggcctaggggagggggcgatgggttagggtttagatggagccgggcttaaccgttcttggggctaatcgggtcgtgcccgtgccgaaccagcgtgcttggaaacgcggcctagacacactactagccaccggg

SEQ ID NO: 37414 - DNA, 1878 bp, Zea Mays
gccagggtgacgaagtagctgtccactaaggattaacttcttcgatgattctctagtacaaacttttggctggctttatagatcatgagccaccaaacctttcctattatttagcctagatatttggaaatagaaatatcagatctaaacttcctaacaactcagctcttgattggaggaactgatttaacttcctaacaactcatcccttgattggaggaactgatttattcaatcaaaaccttccttctaacctcttatttctttcctgtgttggctccttcctttcctgcgcctgctgctggccttgggcgcctttgatactggcggcccacaaactggtccacaacatccgtacaggtggacaccagaagaaatcaaagctgccactgggaaggatgaatgcactttcatgaaacacagtttgaaattaaggagtgtatatactgacgtcgaggaacaaaagacgccagcaaggaaccactggtgacaagctacaacagaaaattcatgggaacagtagactacatatgggcctcggagggtctgcatactgttaaagtcttggacacatttcccatagagattttgaaaaaaacaactgggttcccgaccaagaaatggggaagcgatcacattgcccttgcctgtgaattggcttttacaaaatgacgccttttatcaggcggagagggcgcctgcatagttgctagtgaccaaacacacctcaagagaaagaatactgtctacaggacgattaactgaaccaaacctcgctcttttagagctcgttaatttatttcatttttttttcgacacacctttttgaattgtgcgtgagtatggagaaccggagtacatcatttgggtccaattttagagcattgttcctgtttgattggctatggagagtgtattttggtgtgctgccactctacctgcggccctgccatctactggttcaatgacttgtttgagtcagtatgccctgcacggcactgtttggtgatttaaaccctgcacgacaattatagagtacaacataattgccctgatacaccgaccggcgtctattgccatcaggatatagatggccaaatggaagtgccggaacctagtcacaatactaacacctcttagccgtgccgtgttggcacgatagaacaggacagcccatagtggcaggaccagctagagcactacaatagtacacaattacatagtacacagttaaaacattgaaaaatcaaataagatgcttaagcataaggtatgtggagctccatcggttcttcacagcttgcttaaaatagacaaacacaaaaatgagtagatgacaaatgaatcaagattagggccttaggggataagagcacaatccaccacaactagatctagagatgataagagcaccacaagtccacaacaaacatcttattgccttaccacaagtgtcaacctcgttagatgtcggctagaggaagaagacgtaacaccatagcagcttatcatctcttaccaaagccccaagccaccaaggtgaggagaagccagaagggggaacgtgaggtggaggaccctaccggaggtcggagcctagaggtgaggcggtggtagagtggaacagtcggtggcaatgcagatttggaggaatggggaatcgcccccaaatcgccaggcgccagagagcggagagtccgagagggttcaaaagagagcgtgagaacgggcgactaacgagatggggcctaggggagggggcgatgggttagggtttagatggagccgggcttaaccgttcttggggctaatcgggtcgtgcccgtgccgaaccagcgtgcttggaaacgcggcctagacacactactagccaccggg

SEQ ID NO: 37415 - DNA, 1050 bp, Zea Mays
atttctccggggtgactggttgattcgaatgcagccgtgccgagtccgccgcctccgcctccgccgccgccgccgccgtgaacgagagtgatgcgcctcgcgtcctatgcctttctacgccgcgccgccgccatgtcctccccctcctcctacagccgcacaggctacccccgccctcgccgcggctactcgggaaggccctcgccgccgccgccgccgccgcccccggacgcggcctccgagatcgtcagcagggattaccatctcagtgccgtgcacgccgccaacgaatccctgcgtcgtggcggcggcggcgacatccgctggcctccaccgccatacaggcaggggcctcaccctcaccaaccgcactatggctatggctatggctacggatacggatacggccaaacgtggcagccgggtccatcctatgggtttgtgccgtacaactacggccacccgcagcagcagccgccggggcctcagtacggctacggggctccgaacccgtacgttcacgggcacctgcagccgcagccgcatgtgcgtggggcagcgagtccagggttccgtcctggcgcgccccagctgactccgaggctggcagattacctccgacggtggcgctttgcaaagcagaggccgccacatcaagctgggaggtttattattctatcatacaatatacttgcggactatctggcccaggagcaccgctttctttatgaaaaaatatcaccttttattttggattggaactggcgcaaggataagttactgtttgagttcggtctgtggtctccagacattctatgtcttcaggaggttgacaaatttacagaccttgaacaagaaatggcaagccaaggatataacggtacatggaagatacggactggagatgcagctgatggatgtgctattttttggagaacaacaaggttccagttgcgttatgaagaagacattgagttcaccaagcttggacttcgtgataatgttgcccagctctgtgttttagaggacacttaattctgctatttattt

SEQ ID NO: 37416 - DNA, 1593 bp, Zea Mays
atggcagttggacccgtgggtatggatacccgtgggtttcgtacccaccggatatggatacgggtacaaaaactcacccgtgggtcctatcgggtcggatacccgaaatacatcgggtcggtctacaataacatatccactggatacccaatacccggtggatatccgatgggcatggatacagtcatgctcgagcggcaccgcgttcatcgcgacgccgacggcgatctccccgccgccgtgaccgccccccttctcgcgcacccaccgtcgccggctgagccttggcctgcgaactttggttcatcggagataaccgacgaggagatcgacgccgcctccgccgcctgctgccgcatctgcctcgaatccgagtccgagcctggtgatgtgctaatatctccatgtatgtgcaaggggacacagcagttcgtgcatcgctcctgccttgaccactggaggtctgttaaggaaggaactgccttttcacactgcacaacatgcaaggcgcgattccatctacgggttgaatttctggaggatgacatttgtcgtagaatgaagtttcggatgttcgttgcaagagatgttatcattatattccttcttatacaagccaccatcgcagctataggtggtatggcatattttttggacaaagacggaaacttcagaaacaaattttctgatgattgggaacggtttctgtcaaagcatccagtgcccttttactactgtgttggtgtggttgtgttctttgtaatggttggatttttcgggctaatactacacctctcctcttacaacaacaacgatccgtgcctggttggctcccgtgattgttgctttgggtgtggtctggtggacttaccggcttcaatggaagcttgtttcgctttcgctgtcatatttgttattatgttggccatccttggagttgcctacgggtttcttgcggcgactgtggccatccagaggatctggcagcggcactatcacatacttaccaagaaggagctcacgaaggaatatgtggtggaggacctccctgggggttacacgccgccgaagatggatccagagcatgagcagcggttgaaggtgttgcagctcatgtagcttgcactttcgcaggtgatggacatgaagtatcgcatcttttttgttgcattgcatgtatgtacttttgcatgctgtgagtgttattagttggggtaaacatgtattctagtgacggaagtccatgtgcttataatgtacaaatatagaaccacggttaccagtcccaggtggggaatcacatacaggctaggaacaatgcaagttaaattgatcgactgtttcgctacacatactgcattactgccgagagacaatggtaatgctcactgtatcgaaacgttagtttccttttttttcactgctttggcgcctcggtgtttcgtccctttgtatctggatatgttgtacttcacctggaccaatcagaatcactctactaccaacataagaccgtctccaacagcttatttatatagtcgtgtaaaatattgttttgtattgtaaattatattgtttgcagagtaaagtttg

SEQ ID NO: 37417 - DNA, 1589 bp, Zea Mays
atggcagttggacccgtgggtatggatacccgtgggtttcgtacccaccggatatggatacgggtacaaaaactcacccgtgggtcctatcgggtcggatacccgaaatacatcgggtcggtctacaataacatatccactggatacccaatacccggtggatatccgatgggcatggatacagtcatgctcgagcggcaccgcgttcatcgcgacgccgacggcgatctccccgccgccgtgaccgccccccttctcgcgcacccaccgtcgccggctgagccttggcctgcgaactttggttcatcggagataaccgacgaggagatcgacgccgcctccgccgcctgctgccgcatctgcctcgaatccgagtccgagcctggtgatgtgctaatatctccatgtatgtgcaaggggacacagcagttcgtgcatcgctcctgccttgaccactggaggtctgttaaggaaggaactgccttttcacactgcacaacatgcaaggcgcgattccatctacgggttgaatttctggaggatgacatttgtcgtagaatgaagtttcggatgttcgttgcaagagatgttatcattatattccttcttatacaagccaccatcgcagctataggtggtatggcatattttttggacaaagacggaaacttcagaaacaaattttctgatgattgggaacggtttctgtcaaagcatccagtgcccttttactactgtgtgtggttgtgttctttgtaatggttggatttttcgggctaatactacacctctcctcttacaacaacaacgatccgtgcctggttggctcccgtgattgttgctttgggtgtggtctggtggacttaccggcttcaatggaagcttgtttcgctttcgctgtcatatttgttattatgttggccatccttggagttgcctacgggtttcttgcggcgactgtggccatccagaggatctggcagcggcactatcacatacttaccaagaaggagctcacgaaggaatatgtggtggaggacctccctgggggttacacgccgccgaagatggatccagagcatgagcagcggttgaaggtgttgcagctcatgtagcttgcactttcgcaggtgatggacatgaagtatcgcatcttttttgttgcattgcatgtatgtacttttgcatgctgtgagtgttattagttggggtaaacatgtattctagtgacggaagtccatgtgcttataatgtacaaatatagaaccacggttaccagtcccaggtggggaatcacatacaggctaggaacaatgcaagttaaattgatcgactgtttcgctacacatactgcattactgccgagagacaatggtaatgctcactgtatcgaaacgttagtttccttttttttcactgctttggcgcctcggtgtttcgtccctttgtatctggatatgttgtacttcacctggaccaatcagaatcactctactaccaacataagaccgtctccaacagcttatttatatagtcgtgtaaaatattgttttgtattgtaaattatattgtttgcagagtaaagtttg

SEQ ID NO: 37418 - DNA, 2037 bp, Zea Mays
cggcgtccccgtgcttgctgcctgctgccgcgacagccaccgacgctggctgtctagcagtggctctgctcatgcgcacctacccggctatcccctcacctgagtcgcctcgcgcaattggtgcggactgcggagcaatccccgaatcctccattgattaggcccaagcttcctcctcgggtggcggcggcggcggttgcagctgctggagatggccttggcgagggcggctgcgctgccgctgctcttgctccccttcctcgccgtcacgacctgcctcgacgttccttcccatgagtacccgactgctcaaattatgtgacatgaagcatcagcaacaccaatgtccatgtgacggttactcccttcagcagcattgatatgtggccctgaagcaccagcattgcacaatttgcggtgaagggttcagatagtggcatacggcaaaggtttatgattgggttcaactcatgcgtgtcaaacaccagcctgatgaatttgctgtagctgaatgctaaaggacttggatggttactgctgtgtgctgggtctccgactggcaaacacattttactgtagttctgtgtgaagcaactggatccacggacgaaatagagaccatagctaatttctatgaggtatttctttctaccaactagataatttcatcaaacataagtccctgacgcccaacaggttaataacatttatcgaaggaattctgaaactccagtgctgcagcaaactagtcaaatgcacgttccgcagggtgctattggactggttgccaaagcaaatggtttggagtctgtgctgctcgccacttcttggattctcagtcagatgattgtgacggtctttgtgtggagtcaaaaagccctccatgccttccactgcacacacatttctattgttgcaaaccaggaaccccaaaggtaacaaataagtgtgggcactgcaagagcaagctggattttggcaaagagtttatatgctgctcagattgctctgatccaaccattatggacaagaatagcaaactgggttactgcaaaagtggcgccgacttaacaatgcaattaaaactacaaggtgtattttcaccactaaatttacaagacaagaaacttttcgctgggttgctggcccatggatgacatgctcctctccatgtgatggtggtattcgatatcgtgatgttgcttgttatggaaatctggacgatgacacaatcaaacactaccctgtagatgatgctagctgttcagcagacaaaatgcctgcaagacaggaggcctgtaatcagcagagctgtagtgatcctgagatgacacagtcagtgaatcctaaggaaagtggaatgtctggttggttggtagtattggttgttatcctaggtctcagtgcagctgctggcattgcatttaccagctacacttactacgtgaggagaacctctgggacgagtggttttgtttatgtcatgatggaagcttattcttgaggattgagaggaacgatttcctgtaagtctgtgagcgactgtagaaaatctctggagttggagacaaccagcttgttcattctttggactttggtttgctgttttggtcgtcagaaatggttgtcgtctatttccgctgattcatgtgccgacgaggaactatcccgggtatagcctgggagtctagacaaaacaactgagtgtttctatggtacttgttagctgcaacttttcttcgagggcaattgaagttttgtctaggatagattcatgcatttgatagaggtgtctccgatcataccccgttgcttcttgatactaaatctcctgcctttgtcggatgcaataggctattcaaatttgaactatgttggctacaaagggaaggctttcatgaccatgtcaaagagattcggtcatgttcaaataagggcaagaacttggttcaaagatggaataacaaactgagtgccctactgagatttcttcgtggttgggctgtccagtataatggggaatataagaaaaagaaa

SEQ ID NO: 37419 - DNA, 2166 bp, Zea Mays
cggcgtccccgtgcttgctgcctgctgccgcgacagccaccgacgctggctgtctagcagtggctctgctcatgcgcacctacccggctatcccctcacctgagtcgcctcgcgcaattggtgcggactgcggagcaatccccgaatcctccattgattaggcccaagcttcctcctcgggtggcggcggcggcggttgcagctgctggagatggccttggcgagggcggctgcgctgccgctgctcttgctccccttcctcgccgtcacgacctgcctcgacgttccttcccatgagtacccgactgctcaaattatgtgacatgaagcatcagcaacaccaatgtccatgtgacggttactcccttcagcagcattgatatgtggccctgaagcaccagcattgcacaatttgcggtgaagggttcagatagtggcatacggcaaaggtttatgattgggttcaactcatgcgtgtcaaacaccagcctgatgaatttgctgtagctgaatgctaaaggacttggatggttactgctgtgtgctgggtctccgactggcaaacacattttactgtagttctgtgtgaagcaactggatccacggacgaaatagagaccatagctaatttctatgaggtatttctttctaccaactagataatttcatcaaacataagtccctgacgcccaacaggttaataacatttatcgaaggaattctgaaactccagtgctgcagcaaactagtcaaatgcacgttccgcaggtgcattgttctcattttatatgcctattaaattttacagcatggattacttgtttatggcaccaaagcacatgaagttttaccatactacctttggctcacggtgaagttggcaataaatcacattcacatttcactaaagcatcacattgaaattgcagggtgctattggactggttgccaaagcaaatggtttggagtctgtgctgctcgccacttcttggattctcagtcagatgattgtgacggtctttgtgtggagtcaaaaagccctccatgccttccactgcacacacatttctattgttgcaaaccaggaaccccaaaggtaacaaataagtgtgggcactgcaagagcaagctggattttggcaaagagtttatatgctgctcagattgctctgatccaaccattatggacaagaatagcaaactgggttactgcaaaagtggcgccgacttaacaatgcaattaaaactacaagaaacttttcgctgggttgctggcccatggatgacatgctcctctccatgtgatggtggtattcgatatcgtgatgttgcttgttatggaaatctggacgatgacacaatcaaacactaccctgtagatgatgctagctgttcagcagacaaaatgcctgcaagacaggaggcctgtaatcagcagagctgtagtgatcctgagatgacacagtcagtgaatcctaaggaaagtggaatgtctggttggttggtagtattggttgttatcctaggtctcagtgcagctgctggcattgcatttaccagctacacttactacgtgaggagaacctctgggacgagtggttttgtttatgtcatgatggaagcttattcttgaggattgagaggaacgatttcctgtaagtctgtgagcgactgtagaaaatctctggagttggagacaaccagcttgttcattctttggactttggtttgctgttttggtcgtcagaaatggttgtcgtctatttccgctgattcatgtgccgacgaggaactatcccgggtatagcctgggagtctagacaaaacaactgagtgtttctatggtacttgttagctgcaacttttcttcgagggcaattgaagttttgtctaggatagattcatgcatttgatagaggtgtctccgatcataccccgttgcttcttgatactaaatctcctgcctttgtcggatgcaataggctattcaaatttgaactatgttggctacaaagggaaggctttcatgaccatgtcaaagagattcggtcatgttcaaataagggcaagaacttggttcaaagatggaataacaaactgagtgccctactgagatttcttcgtggttgggctgtccagtataatggggaatataagaaaaagaaa

SEQ ID NO: 37420 - DNA, 1538 bp, Zea Mays
cggcgtccccgtgcttgctgcctgctgccgcgacagccaccgacgctggctgtctagcagtggctctgctcatgcgcacctacccggctatcccctcacctgagtcgcctcgcgcaattggtgcggactgcggagcaatccccgaatcctccattgattaggcccaagcttcctcctcgggtggcggcggcggcggttgcagctgctggagatggccttggcgagggcggctgcgctgccgctgctcttgctccccttcctcgccgtcacgacctgcctcgacgttccttcccatgggtgctattggactggttgccaaagcaaatggtttggagtctgtgctgctcgccacttcttggattctcagtcagatgattgtgacggtctttgtgtggagtcaaaaagccctccatgccttccactgcacacacatttctattgttgcaaaccaggacaggaaccccaaaggtaacaaataagtgtgggcactgcaagagcaagctggattttggcaaagagtttatatgctgctcagattgctctgatccaaccattatggacaagaatagcaaactgggttactgcaaaagtggcgccgacttaacaatgcaattaaaactacaagaaacttttcgctgggttgctggcccatggatgacatgctcctctccatgtgatggtggtattcgatatcgtgatgttgcttgttatggaaatctggacgatgacacaatcaaacactaccctgtagatgatgctagctgttcagcagacaaaatgcctgcaagacaggaggcctgtaatcagcagagctgtagtgatcctgagatgacacagtcagtgaatcctaaggaaagtggaatgtctggttggttggtagtattggttgttatcctaggtctcagtgcagctgctggcattgcatttaccagctacacttactacgtgaggagaacctctgggacgagtggttttgtttatgtcatgatggaagcttattcttgaggattgagaggaacgatttcctgtaagtctgtgagcgactgtagaaaatctctggagttggagacaaccagcttgttcattctttggactttggtttgctgttttggtcgtcagaaatggttgtcgtctatttccgctgattcatgtgccgacgaggaactatcccgggtatagcctgggagtctagacaaaacaactgagtgtttctatggtacttgttagctgcaacttttcttcgagggcaattgaagttttgtctaggatagattcatgcatttgatagaggtgtctccgatcataccccgttgcttcttgatactaaatctcctgcctttgtcggatgcaataggctattcaaatttgaactatgttggctacaaagggaaggctttcatgaccatgtcaaagagattcggtcatgttcaaataagggcaagaacttggttcaaagatggaataacaaactgagtgccctactgagatttcttcgtggttgggctgtccagtataatggggaatataagaaaaagaaa

SEQ ID NO: 37421 - DNA, 2948 bp, Zea Mays
gcagaagccgtgaactgtttttagctacaaaactggacggcgcggagcccatcaagcccctgcggcgccactatgcgcccgacacggctcctcgccgccgcctcctcaacgttccgacggcgccgcctttacactgccgccgcagtctccaccgtggcaccttcttctgcggccccgccaccgcagagcgccgtccagcccctctccacccaattcgctagaccatcccccgcccgtggccacggcgtcgccgatgacctcgcttcctccctccgcgcactcctcgcctcctcgcccaccgtccagcacgccttccatctgctccgttccgctgcgctggatacgcgcctcccgccgaacgagctcgtcgacgccgtcctctccaccgtggacgctggctcgccggccgcggttactctcctcagccacgtcctcacctgcctctcccgcgctgccagcgactgcgcggccgccgcggccgcatactctcgcatggtcacgaggggcgttgtcccggacgccaagtctcgcaccgacctgctagtcaccacggcgcggggcgcgtcggctgcggatgcgctaacgctgttcgacgagatgcggggcaagggatgctacgcggatgcgaagatgtacgacgtcgtgatacgggcctgcgtcaggggagggatgcactgtgatgccgtcaggctgtttgatgaaatggctggtgccggggtcaagcccgacgagcgcgtttatgccatcacaatctcaggtttgtgcaagctacgcgatgcagatcgggcactccaggtgttggggaagatgagggaggcagggttcgagccgtgggagttaacgtacagttctgtggtggatgtgcttgtgaaggtggggaggatggatgaggcattgaggctgaaggatcagatgctgctggctacgggaaagaagatggatgtggttctcgcgacgatgttgatgcacgggtattgcttgcatggagaagttgggaaggcattggatttgtttgatgaggttgtcagtgatggtgtgacaccgaccaatgtgacatatggggtgctaatcaaaggttgtgatgcagaggggatgtcagatgagacatataagctatgccgccagatgatagagcagggattgttactgagcacatatgagttcaatttggtgatcaaaggcctcttgagagacaaacggtggaaggatgccattggcttacttgaacttgtggtagatactggggtaccagatgtcttcacttacggctgtctaattcattggctctgcaagcatcaaaaactccacgaggcagtcaacttatgggataagatgaaggaagcaggagtcaaaccttctattgtgacataccacagcctactgctggggtactgtgagaaagggcgcatggatgaagcactcaagttatactctgagatgcctgataaaggattcccgcctaatgaggtcacttacacaactctgatgaaagggtacatcaagaagaaagcttttgacaatgcctacgcccttcttaatgaaatgcgtcagaatggagtttcttgcggcgattatacgtataatattctcataaatggactttacatggtcaatcgtgtttgtgaagttgatgaaatgttgaaaagatttttgagtgaaggttttgttccgaccacaatgacatacaatagtatcattaatggatttgtgaaagctggtatgatgggctctgcattcggtatgtatcggcagatgcgcaagaaagtgaagctgctcatttacgtgaggcgcgatggcattcaacctgacattgctgcatacaacgctttcatagatacgttttgcaaacaggggaatatgtctcgtgcactccattttttggttcttctgttgaaagatggtttaacaccagatgtcactgtctacaatagttttgttacagggtacaagaatttgaaaatgatggcagaagcttcaaagttctattatagcatgatcaaacagagagttgttgctgatacagaaatctatacaaccttaattgatgggttctcaaaagttggcaatgtggcctttgctttggaactgtactcagagatgatggccaatcacgttattcctgatgataaaactttcacagcactaacccacggtctttgccgaagtggagatattgatggtgctaagaggttattggatgatatgagaagattagatgtgtctccaaatattgttacttataacatgctgataaatgcatgcgtccgtgatggtaagctgcaagaggcattccaactgcatgatgagatgctcagcagtggagtcgtgcctgatgatactacatatgacatactccctcggaccaataatagttgattttccacctgccaggattgcttgctgcttgttcaagcctccagtctgacacagtgtattaccaaccagagggaatacgagttagcttgaaacttttggaagcaagtcctgcagatgctgaaaatcatgtttcaattctgccagtaaagtatgaagaaccttaacatgcgattcagcagattgaaatttaggaaacttgcactgtaaatgaagtgaactccttgtcagttataatttttccttttcaatatatctctacccctttaaagcacgactttgacacgtcgcgcactcccatggtgctgggaactcccgcacttccctcagcctcctctcgcgtggtgctcggaagtcggaaccctcaacctcctccctcgtccctcggtgtttgaaattactgtgcttcccttagcctcctcccctggttctcgaaactactagagatggatttagatctttatttaaatgttaatttttttgtcttctttctttgattgtaaacaagtaacatatataatttactgtgtaaatttatatttttattttcaatattgaatctattaatatttata

SEQ ID NO: 37422 - DNA, 3203 bp, Zea Mays
ctacatcatctgttcacagacgcgaacaatcactagccgatcgtatgaccagtgaccacacgaaacacggcaattcatcacttccatcagctgctcctgtacctgctggatgggagcagccaaacagcaggagaaagagaaatccacacctgcagaaaacagttcaattttgtagaaaaactgtagaaaacagttcaattttgtagcaatttctaaataaatgttgggttctgaatgatgaaactgaaccagaatgaagaaatgcagaagccgtgaactgtttagccacaaaactggacggcgcggagcccatcaagcccctgcggcgccaccatgcgcccgacacggctcctcgccgccgcctcctcaacgttccgacggcgccgcctttacactgccgccgcagtctccaccgtggcaccttcttctgcggccccgccaccgcagggcgccgtccagcccctctccacccaattcgctagaccatcccccgcccgtggccacggcgtcgccgatgacctcgcttcctccctccgcgcactcctcgcctcctcgcccaccgtccagcacgccttccatctgctccgttccgctgcgctggatacgcgcctcccgccgaacgagctcgtcgacgccgtcctctccaccgtggaccctggctcgccggccgcggttactctcctcagccacgtcctcacctgcctctcccgtgctgccagcgactgcgcggccgccgcggccgcatactctcgcatggtcacgaggggcgttgtcccggacgccaagtctcgcaccgacctgctcgtcaccacggcgctgggcgcgtcggctgcggatgcgctaacgctgttcgacgagatgcggggcaaggggtgctacgcggatgcgaagatgtacgacgtcgtgatacgggcctgcgtcaggggagggatgcactgtgatgccgtcaggctgtttgatgaaatggctggtgccggggtcaagcccgacgagcgcgtttatgccatcacaatctcaggtttgtgcaagctacgcgatgcagatcgggcactccaggtgttggggaagatgagggaggcagggttcgagccgtgggagttaacgtacagttctgtggtggatgtgcttgtgaaggtgaggaggatggatgaggcattgcggctgaaggatcagatgctgctggctacgggaaagaagatggatgtggttcttgcgacgatgttgatgcacgggtattgcttgaatggagaagttgggaaggcattggatttgtttgatgaggttgtcagtgatggtgtgacaccgaccaatgtgacatatggggtgctaatcaaaggttgtgatgcagaggggatgacagatgagacatataagctatgccgccagatgatagagcagggattgttaccgagcacatatgagttcaatttggtgatcaaaggcctcttgagagacaaacggtggaaggatgccattggcttacttaaacttgtggtagatactggggtaccagatgtcttcacttacggctgtctaattcattggctctgcaagcatcaaaaactccacgaggcagtcaacttatgggataagatgaaggaagcaggagtcaaaccttctattgtgacataccacagcctactgctggggtactgtgagaaagggcgcatggatgaagcactcaagttatactctgagatgcctgataaaggattcccgcctaatgaggtcacttacacaactctgatgaaagggtacatcaagaagaaagcttttgacaatgcctacgcccttcttaatgaaatgcgtcagaatggagtttcttgcggcgattatacgtataatattctcataaatggactttacatggtcaatcgtgtttgtgaagttgatgaaatgttgaaaagatttttgagtgaaggttttgttccgaccacaatgacatacaatagtatcattaatggatttgtgaaagctggtatgatgggctctgcattcggtatgtatcggcagatgcgcaagaaagtgaagctgctcatttacgtgaggcgcgatggcattcaacctgacattgctgcatacaacgctttcatagatacgttttgcaaacaggggaatatgtctcgtgcactccattttttggttcttctgttgaaagatggtttaacaccagatgtcactgtctacaatagttttgttacagggtacaagaatttgaaaatgatggcagaagcttcaaagttctattatagcatgatcaaacagagagttgttgctgatacagaaatctatacaaccttaattgatgggttctcaaaagttggcaatgtggcctttgctttggaactgtactcagagatgatggccaatcacgttattcctgatgataaaactttcacagcactaacccacggtctttgccgaagtggagatattgatggtgctaagaggttattggatgatatgagaagattagatgtgtctccaaatattgttacttataacatgctgataaatgcatgcgtccgtgatggtaagctgcaagaggcattccaactgcatgatgagatgctcagcagtggagtcgtgcctgatgatactacatatgacatactccctcggaccaataatagttgattttccacctgccaggattgcttgctgcttgttcaagcctccagtctgacacagtgtattaccaaccagagggaatacgagttagcttgaaacttttggaagcaagtcctgcagatgctgaaaatcatgtttcaattctgccagtaaagtatgaagaaccttaacatgcgattcagcagattgaaatttaggaaacttgcactgtaaatgaagtgaactccttgtcagttataatttttccttttcaatatatctctacccctttaaagcacgactttgacacgtcgcgcactcccatggtgctgggaactcccgcacttccttcagcctcctctcgcgtggtgctcggaagtcggaaccctcaacctcctccctcgtcgtttgaaattactgtgcttcccttagcctcctcccctggttctcgaaactactagagatggatttagatctttatttaaaatgttaatttttttgtcttctttctttgattgtaaacaagtaacatatataatttactgtgtaaatttatatttttattttcaatattgaatctattaatatttata

SEQ ID NO: 37423 - DNA, 543 bp, Zea Mays
cctgccacctcctggcctagcctttcttccttcattcccttggcttgcctggtgtatctactacctctatttcttcttctattcctcatcgtcgcttccctcctctgttgggcgtcttcctgctcccttcagccctcgcctcccaaaaacagacaagacctgacagcaggtcctaaaggctgtcacaaacctttatgaggctctggacaactgtgatggtattctaagcaggaagcggtgcgggctggtggagtaccagacgctgccggcttacctgcgggacaacgagtacatccaccgccactaccgctgcgagtggccgctcctacaggtgctgctctctgccttctccatccataacgagactctcaacgtctggaacataaacacatgaagttgttctgaaacttgtttgatctcacccctttgccattgcagtttgtatttgaatgggtcctattggtactaacagtatttccccccttctcttgctatgcaagtgttgtagttgtagtatatttaagtgtatttgcaagaactttg

SEQ ID NO: 37424 - DNA, 1349 bp, Zea Mays
ctcacaccgatggagttggctctttgctacatattaagcaaatagtgtatttgtgttgttactgcttggacttttaaacatttgctctctataatatatactgatttagtcatatcttttatttgtagtaggttgcttttatggcatcttgatccatcaattattaggcttgatctctcagtgatgctcaaggagtacttgatgatgaggccgtcatgaggaaacaactccacgaggcgagagaacagctagtgagacaaagtttggaggaaggaacttagaatttgctaatcctgaagaaagcttattgtttttttcgactgaaccaacaattatatttggtgctgatgtcactcaccctgctgctctagatgatacttccccgtccattgcttctttaagctctttttccgtttacaatacggatagtaccatcttattacaataacactttatgcctggtggttccttgtaggttgttgcctcccaagactggccctaggtggctaactataatggcattatccgtgcacaaggtcaccgtcaagagctcatcgatgggctggaaaacattgtcaaggaactcctacttgcattcgtggaacggtctaagcagagacccaagcagctgatcttctacaggatagtagtatcttcctccaaacttttctgactgacatgcaatggtaattgactccctctttcaccgttagggatggcgtaagtgagggccaattcaaacaagtgctggagcaagaaatccatgagatagagaaggcatggacagctctttacaatgagaagccaaagatcaccttcgtagtggtgcagaagaggcaccacacaaggctcttccccagcaaaccaaaggatcgccaatacgcggacaagagtgggaatattcgagctggcaccgtagttgataataatatctgccacccaacagaatttgatttcttcctgcgtggtcacataaggaacaaagctgtcacaaacctttatgaggctctggacaactgtgatggtattctaagcaggaagcggtgcgggctggtggagtaccagacgctgccggcttacctgcgggacaacgagtacatccaccgccactaccgctgcgagtggccgctcctacaggtgctgctctctgccttctccatccataacgagactctcaacgtctggaacataaacacatgaagttgttctgaaacttgtttgatctcacccctttgccattgcagtttgtatttgaatgggtcctattggtactaacagtatttccccccttctcttgctatgcaagtgttgtagttgtagtatatttaagtgtatttgcaagaactttg

SEQ ID NO: 37425 - DNA, 931 bp, Zea Mays
ctttaagtcaagttattaatactcccaactcgtatcccagcagaaagtcttgtgcttcctgttatatccacaaatgacagacttactctgggatgtgaactatgggatgggactatcattcgtggccaaaatgaaatatcacatccaagcaatggacgccgagaaattgtcaacaaggattgtaattcatgtagcacacttccttcaaggatcaagcgtgtgttttacatgtcaagtgaaggcagcaacctattgcatgaggttttccctgaagttaaccatacagttttggagcagctaagtaaggtggactgcattgtctatgctatgggatcactctttacatcagtctgtccatcactggtattacgtggcattggtgagactatagcatcaagatccatccccaagagagactgctgggctgtctgcctctggttttgtcactgcaattaccgattctctaaatcggacttatggcgaccctcacaaaagcttaaagaatcataccaatgactatgtaaatgctatattggttccagaaggaggccaagttcctttagatattgaaaatttggcagctcagggaatttttcatgtggtaaccgtgaagtctattcatgaccctaaagttggcgtcatatttgatgcacggtcattgatccaagccctaaccattctcatatctgaacatatggatatgtgtgtatcaaaagttcagaacgtggtcatgtaactgaaaatgtaaaagttgtaagctgatctttcaagtacaaaaatgaatgtaaagtccctcttaacaatttattgttttactaatcgatccatagtgcgaatactcatgtttttatttcagctagcactagtgttgcaattctgcctgacttgacatgattaatgaaaaatgagacatgtatttttcaatttctgt

SEQ ID NO: 37426 - DNA, 1014 bp, Zea Mays
ctggcggctgcaactaggagaggtttttgttcattggaaatttcttttttgctggggcacgcatattcttccagtcgttggatgctgcaatttttttgttttcacgcgtatcacagatcccagcagaaagtcttgtgcttcctgttatatccacaaatgacagacttactctgggatgtgaactatgggatgggactatcattcgtggccaaaatgaaatatcacatccaagcaatggacgccgagaaattgtcaacaaggattgtaattcatgtagcacacttccttcaaggatcaagcgtgtgttttacatgtcaagtgaaggcagcaacctattgcatgaggttttccctgaagttaaccatacagttttggagcagctaagtaaggtggactgcattgtctatgctatgggatcactctttacatcagtctgtccatcactggtattacgtggcattggtgagactatagcatcaagatccatccccaagagagactgctgggctgtctgcctctggttttgtcactgcaattaccgattctctaaatcggacttatggcgaccctcacaaaagcttaaagaatcataccaatgactatgtaaatgctatattggttccagaaggaggccaagttcctttagatattgaaaatttggcagctcagggaatttttcatgtggtaaccgtgaagtctattcatgaccctaaagttggcgtcatatttgatgcacggtcattgatccaagccctaaccattctcatatctgaacatatggatatgtgtgtatcaaaagttcagaacgtggtcatgtaactgaaaatgtaaaagttgtaagctgatctttcaagtacaaaaatgaatgtaaagtccctcttaacaatttattgttttactaatcgatccatagtgcgaatactcatgtttttatttcagctagcactagtgttgcaattctgcctgacttgacatgattaatgaaaaatgagacatgtatttttcaatttctgt

SEQ ID NO: 37427 - DNA, 1773 bp, Zea Mays
cgacacagtactccggtccgaccggtcggactggaagattaccgccgcggacgcgcgccggtcgtttccttggcgcgggccgccgcgctgcttcttccgcagtccgcccgcccgccccccttctacttccaccctacccgagagaggtcggaatggcactcgtcgcgtgcccgcgctgcaacataaccccgccccaagcctccgcttgcggaatccgctgcctactccgcgcgccgagatctgcagcgtccaggcccccgccgtggcgtctccgccgcagccgcgccatggccgtctacgaaggctggcactctgctgccgcaggcgcagacaccgatggaggcgctccagctcctcacgtgcccccgtcgctgctcgttttctcaggcgggacagcatttaacggtgttgttgaagaattgaagaaagtcactactcgagtcgcgcacgtgctccctgtttctgatgatggtggaagcactgctgagattgtgcgtgtgcttggcgggcctgctgtgggagacataagatcaagatgtttgaggttgtctgatgaaagtactgcagaagctctttctgttcgaaaattgcttgggcatcgtttgcctattgatccttcagaggcaaagctggaatggtaccagattgtagaaggagaccacactttatgggagggagtctctcgtccatacagggaaacaattcgtgcctttttggtctactttcacagtgagatacttcgacggtcagctgaaatgttttgcttcaccaatggcagcattggaaatttcttttttgctggggcacgcatattcttccagtcgttggatgctgcaatttttttgttttcacgcgtatcacagatcccagcagaaagtcttgtgcttcctgttatatccacaaatgacagacttactctgggatgtgaactatgggatgggactatcattcgtggccaaaatgaaatatcacatccaagcaatggacgccgagaaattgtcaacaagcacacttccttcaaggatcaagcgtgtgttttacatgtcaagtgaaggcagcaacctattgcatgaggttttccctgaagttaaccatacagttttggagcagctaagtaaggtggactgcattgtctatgctatgggatcactctttacatcagtctgtccatcactggtattacgtggcattggtgagactatagcatcaagatccatccccaagatacttcttctgaatgggtcacatgacagagagactgctgggctgtctgcctctggttttgtcactgcaattaccgattctctaaatcggacttatggcgaccctcacaaaagcttaaagaatcataccaatgactatgtaaatgctatattggttccagaaggaggccaagttcctttagatattgaaaatttggcagctcagggaatttttcatgtggtaaccgtgaagtctattcatgaccctaaagttggcgtcatatttgatgcacggtcattgatccaagccctaaccattctcatatctgaacatatggatatgtgtgtatcaaaagttcagaacgtggtcatgtaactgaaaatgtaaaagttgtaagctgatctttcaagtacaaaaatgaatgtaaagtccctcttaacaatttattgttttactaatcgatccatagtgcgaatactcatgtttttatttcagctagcactagtgttgcaattctgcctgacttgacatgattaatgaaaaatgagacatgtatttttcaatttctgt

SEQ ID NO: 37428 - DNA, 1832 bp, Zea Mays
cgacacagtactccggtccgaccggtcggactggaagattaccgccgcggacgcgcgccggtcgtttccttggcgcgggccgccgcgctgcttcttccgcagtccgcccgcccgccccccttctacttccaccctacccgagagaggtcggaatggcactcgtcgcgtgcccgcgctgcaacataaccccgccccaagcctccgcttgcggaatccgctgcctactccgcgcgccgagatctgcagcgtccaggcccccgccgtggcgtctccgccgcagccgcgccatggccgtctacgaaggctggcactctgctgccgcaggcgcagacaccgatggaggcgctccagctcctcacgtgcccccgtcgctgctcgttttctcaggcgggacagcatttaacggtgttgttgaagaattgaagaaagtcactactcgagtcgcgcacgtgctccctgtttctgatgatggtggaagcactgctgagattgtgcgtgtgcttggcgggcctgctgtgggagacataagatcaagatgtttgaggttgtctgatgaaagtactgcagaagctctttctgttcgaaaattgcttgggcatcgtttgcctattgatccttcagaggcaaagctggaatggtaccagattgtagaaggagaccacactttatgggagggagtctctcgtccatacagggaaacaattcgtgcctttttggtctactttcacagtgagatacttcgacggtcagctgaaatgttttgcttcaccaatggcaggtgattcttctaagcattggaaatttcttttttgctggggcacgcatattcttccagtcgttggatgctgcaatttttttgttttcacgcgtatcacagatcccagcagaaagtcttgtgcttcctgttatatccacaaatgacagacttactctgggatgtgaactatgggatgggactatcattcgtggccaaaatgaaatatcacatccaagcaatggacgccgagaaattgtcaacaaggattgtaattcatgtagcacacttccttcaaggatcaagcgtgtgttttacatgtcaagtgaaggcagcaacctattgcatgaggttttccctgaagttaaccatacagttttggagcagctaagtaaggtggactgcattgtctatgctatgggatcactctttacatcagtctgtccatcactggtattacgtggcattggtgagactatagcatcaagatccatccccaaggtatctaactatgctaagaccagattagatacttcttctgaatgggtcacatgacagagagactgctgggctgtctgcctctggttttgtcactgcaattaccgattctctaaatcggacttatggcgaccctcacaaaagcttaaagaatcataccaatgactatgtaaatgctatattggttccagaaggaggccaagttcctttagatattgaaaatttggcagctcagggaatttttcatgtggtaaccgtgaagtctattcatgaccctaaagttggcgtcatatttgatgcacggtcattgatccaagccctaaccattctcatatctgaacatatggatatgtgtgtatcaaaagttcagaacgtggtcatgtaactgaaaatgtaaaagttgtaagctgatctttcaagtacaaaaatgaatgtaaagtccctcttaacaatttattgttttactaatcgatccatagtgcgaatactcatgtttttatttcagctagcactagtgttgcaattctgcctgacttgacatgattaatgaaaaatgagacatgtatttttcaatttctgt

SEQ ID NO: 37429 - DNA, 1804 bp, Zea Mays
cgacacagtactccggtccgaccggtcggactggaagattaccgccgcggacgcgcgccggtcgtttccttggcgcgggccgccgcgctgcttcttccgcagtccgcccgcccgccccccttctacttccaccctacccgagagaggtcggaatggcactcgtcgcgtgcccgcgctgcaacataaccccgccccaagcctccgcttgcggaatccgctgcctactccgcgcgccgagatctgcagcgtccaggcccccgccgtggcgtctccgccgcagccgcgccatggccgtctacgaaggctggcactctgctgccgcaggcgcagacaccgatggaggcgctccagctcctcacgtgcccccgtcgctgctcgttttctcaggcgggacagcatttaacggtgttgttgaagaattgaagaaagtcactactcgagtcgcgcacgtgctccctgtttctgatgatggtggaagcactgctgagattgtgcgtgtgcttggcgggcctgctgtgggagacataagatcaagatgtttgaggttgtctgatgaaagtactgcagaagctctttctgttcgaaaattgcttgggcatcgtttgcctattgatccttcagaggcaaagctggaatggtaccagattgtagaaggagaccacactttatgggagggagtctctcgtccatacagggaaacaattcgtgcctttttggtctactttcacagtgagatacttcgacggtcagctgaaatgttttgcttcaccaatggcaggtgattcttctaagcattggaaatttcttttttgctggggcacgcatattcttccagtcgttggatgctgcaatttttttgttttcacgcgtatcacagatcccagcagaaagtcttgtgcttcctgttatatccacaaatgacagacttactctgggatgtgaactatgggatgggactatcattcgtggccaaaatgaaatatcacatccaagcaatggacgccgagaaattgtcaacaaggattgtaattcatgtagcacacttccttcaaggatcaagcgtgtgttttacatgtcaagtgaaggcagcaacctattgcatgaggttttccctgaagttaaccatacagttttggagcagctaagtaaggtggactgcattgtctatgctatgggatcactctttacatcagtctgtccatcactggtattacgtggcattggtgagactatagcatcaagatccatccccaagatacttcttctgaatgggtcacatgacagagagactgctgggctgtctgcctctggttttgtcactgcaattaccgattctctaaatcggacttatggcgaccctcacaaaagcttaaagaatcataccaatgactatgtaaatgctatattggttccagaaggaggccaagttcctttagatattgaaaatttggcagctcagggaatttttcatgtggtaaccgtgaagtctattcatgaccctaaagttggcgtcatatttgatgcacggtcattgatccaagccctaaccattctcatatctgaacatatggatatgtgtgtatcaaaagttcagaacgtggtcatgtaactgaaaatgtaaaagttgtaagctgatctttcaagtacaaaaatgaatgtaaagtccctcttaacaatttattgttttactaatcgatccatagtgcgaatactcatgtttttatttcagctagcactagtgttgcaattctgcctgacttgacatgattaatgaaaaatgagacatgtatttttcaatttctgt

SEQ ID NO: 37430 - DNA, 1872 bp, Zea Mays
cgacacagtactccggtccgaccggtcggactggaagattaccgccgcggacgcgcgccggtcgtttccttggcgcgggccgccgcgctgcttcttccgcagtccgcccgcccgccccccttctacttccaccctacccgagagaggtcggaatggcactcgtcgcgtgcccgcgctgcaacataaccccgccccaagcctccgcttgcggaatccgctgcctactccgcgcgccgagatctgcagcgtccaggcccccgccgtggcgtctccgccgcagccgcgccatggccgtctacgaaggctggcactctgctgccgcaggcgcagacaccgatggaggcgctccagctcctcacgtgcccccgtcgctgctcgttttctcaggcgggacagcatttaacggtgttgttgaagaattgaagaaagtcactactcgagtcgcgcacgtgctccctgtttctgatgatggtggaagcactgctgagattgtgcgtgtgcttggcgggcctgctgtgggagacataagatcaagatgtttgaggttgtctgatgaaagtactgcagaagctctttctgttcgaaaattgcttgggcatcgtttgcctattgatccttcagaggcaaagctggaatggtaccagattgtagaaggagaccacactttatgggagggagtctctcgtccatacagggaaacaattcgtgcctttttggtctactttcacagtgagatacttcgacggtcagctgaaatgttttgcttcaccaatggcagcattggaaatttcttttttgctggggcacgcatattcttccagtcgttggatgctgcaatttttttgttttcacgcgtatcacagatcccagcagaaagtcttgtgcttcctgttatatccacaaatgacagacttactctgggatgtgaactatgggatgggactatcattcgtggccaaaatgaaatatcacatccaagcaatggacgccgagaaattgtcaacaaggattgtaattcatgtagcacacttccttcaaggatcaagcgtgtgttttacatgtcaagtgaaggcagcaacctattgcatgaggttttccctgaagttaaccatacagttttggagcagctaagtaaggtggactgcattgtctatgctatgggatcactctttacatcagtctgtccatcactggtattacgtggcattggtgagactatagcatcaagatccatccccaaggtatctaactatgctaagaccagattagtttgtctagttgatgtttggctagaaagatgctctgaagtggcgagccttaaatatacttcttctgaatgggtcacatgacagagagactgctgggctgtctgcctctggttttgtcactgcaattaccgattctctaaatcggacttatggcgaccctcacaaaagcttaaagaatcataccaatgactatgtaaatgctatattggttccagaaggaggccaagttcctttagatattgaaaatttggcagctcagggaatttttcatgtggtaaccgtgaagtctattcatgaccctaaagttggcgtcatatttgatgcacggtcattgatccaagccctaaccattctcatatctgaacatatggatatgtgtgtatcaaaagttcagaacgtggtcatgtaactgaaaatgtaaaagttgtaagctgatctttcaagtacaaaaatgaatgtaaagtccctcttaacaatttattgttttactaatcgatccatagtgcgaatactcatgtttttatttcagctagcactagtgttgcaattctgcctgacttgacatgattaatgaaaaatgagacatgtatttttcaatttctgt

SEQ ID NO: 37431 - DNA, 2197 bp, Zea Mays
cgacacagtactccggtccgaccggtcggactggaagattaccgccgcggacgcgcgccggtcgtttccttggcgcgggccgccgcgctgcttcttccgcagtccgcccgcccgccccccttctacttccaccctacccgagagaggtcggaatggcactcgtcgcgtgcccgcgctgcaacataaccccgccccaagcctccgcttgcggaatccgctgcctactccgcgcgccgagatctgcagcgtccaggcccccgccgtggcgtctccgccgcagccgcgccatggccgtctacgaaggctggcactctgctgccgcaggcgcagacaccgatggaggcgctccagctcctcacgtgcccccgtcgctgctcgttttctcaggcgggacagcatttaacggtgttgttgaagaattgaagaaagtcactactcgagtcgcgcacgtgctccctgtttctgatgatggtggaagcactgctgagattgtgcgtgtgcttggcgggcctgctgtgggagacataagatcaagatgtttgaggttgtctgatgaaagtactgcagaagctctttctgttcgaaaattgcttgggcatcgtttgcctattgatccttcagaggcaaagctggaatggtaccagattgtagaaggagaccacactttatgggagggagtctctcgtccatacagggaaacaattcgtgcctttttggtctactttcacagtgagatacttcgacggtcagctgaaatgttttgcttcaccaatggcagcattggaaatttcttttttgctggggcacgcatattcttccagtcgttggatgctgcaatttttttgttttcacgcgtatcacagatcccagcagaaagtcttgtgcttcctgttatatccacaaatgacagacttactctgggatgtgaactatgggatgggactatcattcgtggccaaaatgaaatatcacatccaagcaatggacgccgagaaattgtcaacaaggattgtaattcatgtagcacacttccttcaaggatcaagcgtgtgttttacatgtcaagtgaaggcagcaacctattgcatgaggttttccctgaagttaaccatacagttttggagcagctaagtaaggtggactgcattgtctatgctatgggatcactctttacatcagtctgtccatcactggtattacgtggcattggtgagactatagcatcaagatccatccccaaggtatctaactatgctaagaccagattaggtatcaacttcccatgcttagtaacaatgatgttttgatgccattcatcttgggtcgaatgtgctctctaagttatttacatatcctgtgagtgcagtttgtctagttgatgtttggctagaaagatgctctgaagtggcgagccttaaatgtactctctatgttaaatgatttattgaccttttcactatgcaatggttatttcacaagcaagtattctaagcttgcagagctcattgcgttgcttgtatttttctgcagtttgtattagttacatcacttggcgctttcactaaaaatatgtttgtgtctgcatcctgctgaatctagatacttcttctgaatgggtcacatgacagagagactgctgggctgtctgcctctggttttgtcactgcaattaccgattctctaaatcggacttatggcgaccctcacaaaagcttaaagaatcatgtaagtttgttatatgttccgctaacaatttactggtagaatctgaagctatggaggagtcagacattgcgatttcgagaatgcaggaggccaagttcctttagatattgaaaatttggcagctcagggaatttttcatgtggtaaccgtgaagtctattcatgaccctaaagttggcgtcatatttgatgcacggtcattgatccaagccctaaccattctcatatctgaacatatggatatgtgtgtatcaaaagttcagaacgtggtcatgtaactgaaaatgtaaaagttgtaagctgatctttcaagtacaaaaatgaatgtaaagtccctcttaacaatttattgttttactaatcgatccatagtgcgaatactcatgtttttatttcagctagcactagtgttgcaattctgcctgacttgacatgattaatgaaaaatgagacatgtatttttcaatttctgt

SEQ ID NO: 37432 - DNA, 1719 bp, Zea Mays
cgacacagtactccggtccgaccggtcggactggaagattaccgccgcggacgcgcgccggtcgtttccttggcgcgggccgccgcgctgcttcttccgcagtccgcccgcccgccccccttctacttccaccctacccgagagaggtcggaatggcactcgtcgcgtgcccgcgctgcaacataaccccgccccaagcctccgcttgcggaatccgctgcctactccgcgcgccgagatctgcagcgtccaggcccccgccgtggcgtctccgccgcagccgcgccatggccgtctacgaaggctggcactctgctgccgcaggcgcagacaccgatggaggcgctccagctcctcacgtgcccccgtcgctgctcgttttctcaggtaccagattgtagaaggagaccacactttatgggagggagtctctcgtccatacagggaaacaattcgtgcctttttggtctactttcacagtgagatacttcgacggtcagctgaaatgttttgcttcaccaatggcagcattggaaatttcttttttgctggggcacgcatattcttccagtcgttggatgctgcaatttttttgttttcacgcgtatcacagatcccagcagaaagtcttgtgcttcctgttatatccacaaatgacagacttactctgggatgtgaactatgggatgggactatcattcgtggccaaaatgaaatatcacatccaagcaatggacgccgagaaattgtcaacaaggattgtaattcatgtagcacacttccttcaaggatcaagcgtgtgttttacatgtcaagtgaaggcagcaacctattgcatgaggttttccctgaagttaaccatacagttttggagcagctaagtaaggtggactgcattgtctatgctatgggatcactctttacatcagtctgtccatcactggtattacgtggcattggtgagactatagcatcaagatccatccccaaggtatctaactatgctaagaccagattaggtatcaacttcccatgcttagtaacaatgatgttttgatgccattcatcttgggtcgaatgtgctctctaagttatttacatatcctgtgagtgcagtttgtctagttgatgtttggctagaaagatgctctgaagtggcgagccttaaatatacttcttctgaatgggtcacatgacagagagactgctgggctgtctgcctctggttttgtcactgcaattaccgattctctaaatcggacttatggcgaccctcacaaaagcttaaagaatcataccaatgactatgtaaatgctatattggttccagaaggaggccaagttcctttagatattgaaaatttggcagctcagggaatttttcatgtggtaaccgtgaagtctattcatgaccctaaagttggcgtcatatttgatgcacggtcattgatccaagccctaaccattctcatatctgaacatatggatatgtgtgtatcaaaagttcagaacgtggtcatgtaactgaaaatgtaaaagttgtaagctgatctttcaagtacaaaaatgaatgtaaagtccctcttaacaatttattgttttactaatcgatccatagtgcgaatactcatgtttttatttcagctagcactagtgttgcaattctgcctgacttgacatgattaatgaaaaatgagacatgtatttttcaatttctgt

SEQ ID NO: 37433 - DNA, 1633 bp, Zea Mays
cgacacagtactccggtccgaccggtcggactggaagattaccgccgcggacgcgcgccggtcgtttccttggcgcgggccgccgcgctgcttcttccgcagtccgcccgcccgccccccttctacttccaccctacccgagagaggtcggaatggcactcgtcgcgtgcccgcgctgcaacataaccccgccccaagcctccgcttgcggaatccgctgcctactccgcgcgccgagatctgcagcgtccaggcccccgccgtggcgtctccgccgcagccgcgccatggccgtctacgaaggctggcactctgctgccgcaggcgcagacaccgatggaggcgctccagctcctcacgtgcccccgtcgctgctcgttttctcaggcgggacagcatttaacggtgttgttgaagaattgaagaaagtcactactcgagtcgcgcacgtgctccctgtttctgatgatggtggaagcactgctgagattgtgcgtgtgcttggcgggcctgctgtgggagacataagatcaagatgtttgaggttgtctgatgaaagtactgcagaagctctttctgttcgaaaattgcttgggcatcgtttgcctattgatccttcagaggcaaagctggaatggtaccagattgtagaaggagaccacactttatgggagggagtctctcgtccatacagggaaacaattcgtgcctttttggtctactttcacagtgagatacttcgacggtcagctgaaatgttttgcttcaccaatggcaggatgggactatcattcgtggccaaaatgaaatatcacatccaagcaatggacgccgagaaattgtcaacaaggattgtaattcatgtagcacacttccttcaaggatcaagcgtgtgttttacatgtcaagtgaaggcagcaacctattgcatgaggttttccctgaagttaaccatacagttttggagcagctaagtaaggtggactgcattgtctatgctatgggatcactctttacatcagtctgtccatcactggtattacgtggcattggtgagactatagcatcaagatccatccccaagatacttcttctgaatgggtcacatgacagagagactgctgggctgtctgcctctggttttgtcactgcaattaccgattctctaaatcggacttatggcgaccctcacaaaagcttaaagaatcataccaatgactatgtaaatgctatattggttccagaaggaggccaagttcctttagatattgaaaatttggcagctcagggaatttttcatgtggtaaccgtgaagtctattcatgaccctaaagttggcgtcatatttgatgcacggtcattgatccaagccctaaccattctcatatctgaacatatggatatgtgtgtatcaaaagttcagaacgtggtcatgtaactgaaaatgtaaaagttgtaagctgatctttcaagtacaaaaatgaatgtaaagtccctcttaacaatttattgttttactaatcgatccatagtgcgaatactcatgtttttatttcagctagcactagtgttgcaattctgcctgacttgacatgattaatgaaaaatgagacatgtatttttcaatttctgt

SEQ ID NO: 37434 - DNA, 1983 bp, Zea Mays
cgacacagtactccggtccgaccggtcggactggaagattaccgccgcggacgcgcgccggtcgtttccttggcgcgggccgccgcgctgcttcttccgcagtccgcccgcccgccccccttctacttccaccctacccgagagaggtcggaatggcactcgtcgcgtgcccgcgctgcaacataaccccgccccaagcctccgcttgcggaatccgctgcctactccgcgcgccgagatctgcagcgtccaggcccccgccgtggcgtctccgccgcagccgcgccatggccgtctacgaaggctggcactctgctgccgcaggcgcagacaccgatggaggcgctccagctcctcacgtgcccccgtcgctgctcgttttctcaggcgggacagcatttaacggtgttgttgaagaattgaagaaagtcactactcgagtcgcgcacgtgctccctgtttctgatgatggtggaagcactgctgagattgtgcgtgtgcttggcgggcctgctgtgggagacataagatcaagatgtttgaggttgtctgatgaaagtactgcagaagctctttctgttcgaaaattgcttgggcatcgtttgcctattgatccttcagaggcaaagctggaatggtaccagattgtagaaggagaccacactttatgggagggagtctctcgtccatacagggaaacaattcgtgcctttttggtctactttcacagtgagatacttcgacggtcagctgaaatgttttgcttcaccaatggcaggtgattcttctaagcattggaaatttcttttttgctggggcacgcatattcttccagtcgttggatgctgcaatttttttgttttcacgcgtatcacagatcccagcagaaagtcttgtgcttcctgttatatccacaaatgacagacttactctgggatgtgaactatgggatgggactatcattcgtggccaaaatgaaatatcacatccaagcaatggacgccgagaaattgtcaacaaggattgtaattcatgtagcacacttccttcaaggatcaagcgtgtgttttacatgtcaagtgaaggcagcaacctattgcatgaggttttccctgaagttaaccatacagttttggagcagctaagtaaggtggactgcattgtctatgctatgggatcactctttacatcagtctgtccatcactggtattacgtggcattggtgagactatagcatcaagatccatccccaaggtatctaactatgctaagaccagattaggtatcaacttcccatgcttagtaacaatgatgttttgatgccattcatcttgggtcgaatgtgctctctaagttatttacatatcctgtgagtgcagtttgtctagttgatgtttggctagaaagatgctctgaagtggcgagccttaaatatacttcttctgaatgggtcacatgacagagagactgctgggctgtctgcctctggttttgtcactgcaattaccgattctctaaatcggacttatggcgaccctcacaaaagcttaaagaatcataccaatgactatgtaaatgctatattggttccagaaggaggccaagttcctttagatattgaaaatttggcagctcagggaatttttcatgtggtaaccgtgaagtctattcatgaccctaaagttggcgtcatatttgatgcacggtcattgatccaagccctaaccattctcatatctgaacatatggatatgtgtgtatcaaaagttcagaacgtggtcatgtaactgaaaatgtaaaagttgtaagctgatctttcaagtacaaaaatgaatgtaaagtccctcttaacaatttattgttttactaatcgatccatagtgcgaatactcatgtttttatttcagctagcactagtgttgcaattctgcctgacttgacatgattaatgaaaaatgagacatgtatttttcaatttctgt

SEQ ID NO: 37435 - DNA, 3734 bp, Zea Mays
aagcacgccgatccctctttctttccgtcgtcctcctcgtcccaagttctaacccggccgccgcacatcgccaaaccctaactagggttttgccaagccctctccttccctatcctcacccccatggaccccttttccaagaagcgcaagcccgacgagaacggtgccgtcaccgcctctcccgccggtggggctgccacgctgggcctcacccgcgacgacgtcatccgccttctcgagccgctctcccgggaccagcttgcggacatagcggccgccgccgcgctcgtctcctcgcaagcgctcgacgccgtgcgcgcagccgccgaccgtgacccggccctccgcaagctcttcgttcgggggcttggttgggagaccacatccgactcgctccgcgccatcttctccgcttacggggacctggaggaggccgtcgtcatcactgacaaacccacggggcggtccaagggctacgggttcgtcaccttccgccacgccgattccgccgtcctcgcgctcaaggagccatccaagaagatcgacggtcgcatgactgtcacgcagctcgccgccgccggctcggctggtgggcccgccggtgggcccgccggcagtggcggtgctcctgtgtctgatgtgtcgctccggaagatcttcgttggtaacgttccggcagacatggcatcagagcgtctccttgcgcattttgcctcctatggcgagattgaggaggggccgctgggttttgacaagcagacgggcaagttccggggttttgcactcttcgtatacaagacaccagaaggtgcgcaggcctccctagtggacacggtgaaggtaattgacggccaccagcttgtatgcaagcttgccttagacgggaagaaggagaagcaggggcaatcacagcaacctggacctggcaatcaccagcagcagcagatactgccgggtggtccgcaggacattcagggagggcttgggcttgggtcacaaatgggagcacagtatggtgtccctggtactggtggtttagggtcgatgggaggccaggtgcccagtggtttggctagtgctggggctggtgcatttgggcctggcggattgggtggtggttcatttggtgtatcatctcagttcggtgctgctgggatgggggcatatggtggccttggaattggtggaggctctatgtaccgcatacaacagggagcaggtgggctgcctgcaggcacatttggtgatggagggagctacccacctccaggttctggtttccggggccaggaccctcaaggtggaatgtctcctcctggtccaggtggcagggctcctcctatgtatcccaacgtgccaccttatttctaaggtgtttgcctcttgggagcatatccgtttcttgtgctgaattcagaagtgttgttacatggatgtcttgcatattctggctacttctgatctgaaatgtggaatgagtttgcactcctaaattttgctgctaagggatacatgaagctagtttgttgtgatagttgtgataatgcttatctgtgataatgcttcacatgtacttatgactgctttgcagtttcattttctatatagataaaagaccttgcatgaagtgtatgttgtgttgattatcattgtattatcatatgaaatccctttattttcatggtctgatgatgtgtttaatcttatggctttctatttgtgtatatttttggtggaccaagggcaatctatatgtatgattggtgattgtaatgcaccttctctttttttctataaggtccaatttatagttatatcccctgcgacacaaatatctcattatagttaatatggttattgttagattggaaccatgagccacactttggtggtaactggagattacaggtcatatcgaaacctgaagtcaactttttgttgctattttttatttgtagataggtctgatctgatctgctccatgattacaagtttagaaaaattatctcacgtttgtttgaagctaggtttgacatttgctgctatgaaaattttagtttgtgttgtggaggtgttagttttgcttaaaaggttacagtgattggattgtgttattgagggtaaatgatgcagttatctgccttggtcaatgtggtgatagttgtaatattcctaatttctgattgtgatttgttcttttctaggttcatgatttttgatatgcgtctagatatagattatgtctagatacatgagtatctcgaaaaagctagctacggagccttacaatttggaaagaagcaagttgtgtttttgtgtacattatcttatgtttaggtgaacaagaatggcctagaatttggaattgagcattttgcagtcttggttcttattgattgtttattagtagccaatttaaaagccactgaggtgtttttttcctgctatgagaattgtgccactatttatatatatagtggtacatgttcgatgtaaatttgtacctacgttgcaatgcctacatattatgattctttgttctttgtggtaatgcctttatatatcttggaatctttgtttgtacgtcttctgttttgatttggtttgctgttcactccgaaataatgtaatcgactgcccaaaaatgtttttaactctagcgaatatacgtgaggcatgaactacggaaaaatgttttttacccaagcagatatattcttgaggtctaatcaggaaattaaacagaagcacgttccatgtgcctggtagccctgtagacaccagtggctgcagtcgcaatatgttagtggtggttgttactgctctttgtaagtggtttccctttgctgagtaactcggtaaattgatgggtgtgcattaattcgtagcttgtagagatgatgttcatatgtatggtagtcgtttctgtcctctcgatgtttttctcgataatgattaccaaacttattggaaatgatggagcgatggttctcttagatggaaacaatttggttgtagcaccaatttgcgctgcataatactactagaagggacgtgtcgactgtcgatccacctagcccaggacatcaatgctccatcgaaagttttctcacctgccgtctgcgccacctttccgtcccactcgagatgaccccaactgcctacagatgagtaggctgtggcaagtgaaacttgacattttggagcttgtgtacatacggcctgagtttggcggtgagcccagtgcccggtgttgaagatgaggtcgtcaagtccactgcaacataggccctgagtttgatgcgttcgtcttttgtttccaacttcacgaggaaggggcaccagaagaacactgcggattctgtgttttttttaattgggtgtgtcagaacgaaatgtgttaattgattttaggtgcaagattgtagtcaattaaaagataaatagagagcgttgggactctaggatatgattattggtaattaatttgttgccatgctcaagaaggcatgaaatttgaaaacgcacccgggaattaatcacacgtgcaagccagagctgatcgatgcacacggagatgttgctcttttctggtagatgtcatacgtatcaggaggtggtgtatttactacaccaaatcaccaatatatttagttaagtggggcggaattaaatcgttagatcacaatagacatatagtattataataaaacattcttgatgttgccactcct

SEQ ID NO: 37436 - DNA, 3743 bp, Zea Mays
aagcacgccgatccctctttctttccgtcgtcctcctcgtcccaagttctaacccggccgccgcacatcgccaaaccctaactagggttttgccaagccctctccttccctatcctcacccccatggaccccttttccaagaagcgcaagcccgacgagaacggtgccgtcaccgcctctcccgccggtggggctgccacgctgggcctcacccgcgacgacgtcatccgccttctcgagccgctctcccgggaccagcttgcggacatagcggccgccgccgcgctcgtctcctcgcaagcgctcgacgccgtgcgcgcagccgccgaccgtgacccggccctccgcaagctcttcgttcgggggcttggttgggagaccacatccgactcgctccgcgccatcttctccgcttacggggacctggaggaggccgtcgtcatcactgacaaacccacggggcggtccaagggctacgggttcgtcaccttccgccacgccgattccgccgtcctcgcgctcaaggagccatccaagaagatcgacggtcgcatgactgtcacgcagctcgccgccgccggctcggctggtgggcccgccggtgggcccgccggcagtggcggtgctcctgtgtctgatgtgtcgctccggaagatcttcgttggtaacgttccggcagacatggcatcagagcgtctccttgcgcattttgcctcctatggcgagattgaggaggggccgctgggttttgacaagcagacgggcaagttccggggttttgcactcttcgtatacaagacaccagaaggtgcgcaggcctccctagtggacacggtgaaggtaattgacggccaccagcttgtatgcaagcttgccttagacgggaagaaggagaagcaggggcaatcacagcaacctggacctggcaatcaccagcagcagcagatactgccgggtggtccgcaggacattcagggagggcttgggcttgggtcacaaatgggagcacagtatggtgtccctggtactggtggcgcaggtggtttagggtcgatgggaggccaggtgcccagtggtttggctagtgctggggctggtgcatttgggcctggcggattgggtggtggttcatttggtgtatcatctcagttcggtgctgctgggatgggggcatatggtggccttggaattggtggaggctctatgtaccgcatacaacagggagcaggtgggctgcctgcaggcacatttggtgatggagggagctacccacctccaggttctggtttccggggccaggaccctcaaggtggaatgtctcctcctggtccaggtggcagggctcctcctatgtatcccaacgtgccaccttatttctaaggtgtttgcctcttgggagcatatccgtttcttgtgctgaattcagaagtgttgttacatggatgtcttgcatattctggctacttctgatctgaaatgtggaatgagtttgcactcctaaattttgctgctaagggatacatgaagctagtttgttgtgatagttgtgataatgcttatctgtgataatgcttcacatgtacttatgactgctttgcagtttcattttctatatagataaaagaccttgcatgaagtgtatgttgtgttgattatcattgtattatcatatgaaatccctttattttcatggtctgatgatgtgtttaatcttatggctttctatttgtgtatatttttggtggaccaagggcaatctatatgtatgattggtgattgtaatgcaccttctctttttttctataaggtccaatttatagttatatcccctgcgacacaaatatctcattatagttaatatggttattgttagattggaaccatgagccacactttggtggtaactggagattacaggtcatatcgaaacctgaagtcaactttttgttgctattttttatttgtagataggtctgatctgatctgctccatgattacaagtttagaaaaattatctcacgtttgtttgaagctaggtttgacatttgctgctatgaaaattttagtttgtgttgtggaggtgttagttttgcttaaaaggttacagtgattggattgtgttattgagggtaaatgatgcagttatctgccttggtcaatgtggtgatagttgtaatattcctaatttctgattgtgatttgttcttttctaggttcatgatttttgatatgcgtctagatatagattatgtctagatacatgagtatctcgaaaaagctagctacggagccttacaatttggaaagaagcaagttgtgtttttgtgtacattatcttatgtttaggtgaacaagaatggcctagaatttggaattgagcattttgcagtcttggttcttattgattgtttattagtagccaatttaaaagccactgaggtgtttttttcctgctatgagaattgtgccactatttatatatatagtggtacatgttcgatgtaaatttgtacctacgttgcaatgcctacatattatgattctttgttctttgtggtaatgcctttatatatcttggaatctttgtttgtacgtcttctgttttgatttggtttgctgttcactccgaaataatgtaatcgactgcccaaaaatgtttttaactctagcgaatatacgtgaggcatgaactacggaaaaatgttttttacccaagcagatatattcttgaggtctaatcaggaaattaaacagaagcacgttccatgtgcctggtagccctgtagacaccagtggctgcagtcgcaatatgttagtggtggttgttactgctctttgtaagtggtttccctttgctgagtaactcggtaaattgatgggtgtgcattaattcgtagcttgtagagatgatgttcatatgtatggtagtcgtttctgtcctctcgatgtttttctcgataatgattaccaaacttattggaaatgatggagcgatggttctcttagatggaaacaatttggttgtagcaccaatttgcgctgcataatactactagaagggacgtgtcgactgtcgatccacctagcccaggacatcaatgctccatcgaaagttttctcacctgccgtctgcgccacctttccgtcccactcgagatgaccccaactgcctacagatgagtaggctgtggcaagtgaaacttgacattttggagcttgtgtacatacggcctgagtttggcggtgagcccagtgcccggtgttgaagatgaggtcgtcaagtccactgcaacataggccctgagtttgatgcgttcgtcttttgtttccaacttcacgaggaaggggcaccagaagaacactgcggattctgtgttttttttaattgggtgtgtcagaacgaaatgtgttaattgattttaggtgcaagattgtagtcaattaaaagataaatagagagcgttgggactctaggatatgattattggtaattaatttgttgccatgctcaagaaggcatgaaatttgaaaacgcacccgggaattaatcacacgtgcaagccagagctgatcgatgcacacggagatgttgctcttttctggtagatgtcatacgtatcaggaggtggtgtatttactacaccaaatcaccaatatatttagttaagtggggcggaattaaatcgttagatcacaatagacatatagtattataataaaacattcttgatgttgccactcct

SEQ ID NO: 37437 - DNA, 3846 bp, Zea Mays
aagcacgccgatccctctttctttccgtcgtcctcctcgtcccaagttctaacccggccgccgcacatcgccaaaccctaactagggttttgccaagccctctccttccctatcctcacccccatggaccccttttccaagaagcgcaagcccgacgagaacggtgccgtcaccgcctctcccgccggtggggctgccacgctgggcctcacccgcgacgacgtcatccgccttctcgagccgctctcccgggaccagcttgcggacatagcggccgccgccgcgctcgtctcctcgcaagcgctcgacgccgtgcgcgcagccgccgaccgtgacccggccctccgcaagctcttcgttcgggggcttggttgggagaccacatccgactcgctccgcgccatcttctccgcttacggggacctggaggaggccgtcgtcatcactgacaaacccacggggcggtccaagggctacgggttcgtcaccttccgccacgccgattccgccgtcctcgcgctcaaggagccatccaagaagatcgacggtcgcatgactgtcacgcagctcgccgccgccggctcggctggtgggcccgccggtgggcccgccggcagtggcggtgctcctgtgtctgatgtgtcgctccggaagatcttcgttggtaacgttccggcagacatggcatcagagcgtctccttgcgcattttgcctcctatggcgagattgaggaggggccgctgggttttgacaagcagacgggcaagttccggggttttgcactcttcgtatacaagacaccagaaggtgcgcaggcctccctagtggacacggtgaaggtaattgacggccaccagcttgtatgcaagcttgccttagacgggaagaaggagaagcaggggcaatcacagcaacctggacctggcaatcaccagcagcagcagatactgccgggtggtccgcaggacattcagggagggcttgggcttgggtcacaaatgggagcacagtatggtgtccctggtactggtatgccttcatttggttttggtggtgttggcggcgggtttgggggtccaaatccttatggtaacatgccatcttccatgggtggaggtggcgcaggtggtttagggtcgatgggaggccaggtgcccagtggtttggctagtgctggggctggtgcatttgggcctggcggattgggtggtggttcatttggtgtatcatctcagttcggtgctgctgggatgggggcatatggtggccttggaattggtggaggctctatgtaccgcatacaacagggagcaggtgggctgcctgcaggcacatttggtgatggagggagctacccacctccaggttctggtttccggggccaggaccctcaaggtggaatgtctcctcctggtccaggtggcagggctcctcctatgtatcccaacgtgccaccttatttctaagtgaatgtgtgactcaggtgtttgcctcttgggagcatatccgtttcttgtgctgaattcagaagtgttgttacatggatgtcttgcatattctggctacttctgatctgaaatgtggaatgagtttgcactcctaaattttgctgctaagggatacatgaagctagtttgttgtgatagttgtgataatgcttatctgtgataatgcttcacatgtacttatgactgctttgcagtttcattttctatatagataaaagaccttgcatgaagtgtatgttgtgttgattatcattgtattatcatatgaaatccctttattttcatggtctgatgatgtgtttaatcttatggctttctatttgtgtatatttttggtggaccaagggcaatctatatgtatgattggtgattgtaatgcaccttctctttttttctataaggtccaatttatagttatatcccctgcgacacaaatatctcattatagttaatatggttattgttagattggaaccatgagccacactttggtggtaactggagattacaggtcatatcgaaacctgaagtcaactttttgttgctattttttatttgtagataggtctgatctgatctgctccatgattacaagtttagaaaaattatctcacgtttgtttgaagctaggtttgacatttgctgctatgaaaattttagtttgtgttgtggaggtgttagttttgcttaaaaggttacagtgattggattgtgttattgagggtaaatgatgcagttatctgccttggtcaatgtggtgatagttgtaatattcctaatttctgattgtgatttgttcttttctaggttcatgatttttgatatgcgtctagatatagattatgtctagatacatgagtatctcgaaaaagctagctacggagccttacaatttggaaagaagcaagttgtgtttttgtgtacattatcttatgtttaggtgaacaagaatggcctagaatttggaattgagcattttgcagtcttggttcttattgattgtttattagtagccaatttaaaagccactgaggtgtttttttcctgctatgagaattgtgccactatttatatatatagtggtacatgttcgatgtaaatttgtacctacgttgcaatgcctacatattatgattctttgttctttgtggtaatgcctttatatatcttggaatctttgtttgtacgtcttctgttttgatttggtttgctgttcactccgaaataatgtaatcgactgcccaaaaatgtttttaactctagcgaatatacgtgaggcatgaactacggaaaaatgttttttacccaagcagatatattcttgaggtctaatcaggaaattaaacagaagcacgttccatgtgcctggtagccctgtagacaccagtggctgcagtcgcaatatgttagtggtggttgttactgctctttgtaagtggtttccctttgctgagtaactcggtaaattgatgggtgtgcattaattcgtagcttgtagagatgatgttcatatgtatggtagtcgtttctgtcctctcgatgtttttctcgataatgattaccaaacttattggaaatgatggagcgatggttctcttagatggaaacaatttggttgtagcaccaatttgcgctgcataatactactagaagggacgtgtcgactgtcgatccacctagcccaggacatcaatgctccatcgaaagttttctcacctgccgtctgcgccacctttccgtcccactcgagatgaccccaactgcctacagatgagtaggctgtggcaagtgaaacttgacattttggagcttgtgtacatacggcctgagtttggcggtgagcccagtgcccggtgttgaagatgaggtcgtcaagtccactgcaacataggccctgagtttgatgcgttcgtcttttgtttccaacttcacgaggaaggggcaccagaagaacactgcggattctgtgttttttttaattgggtgtgtcagaacgaaatgtgttaattgattttaggtgcaagattgtagtcaattaaaagataaatagagagcgttgggactctaggatatgattattggtaattaatttgttgccatgctcaagaaggcatgaaatttgaaaacgcacccgggaattaatcacacgtgcaagccagagctgatcgatgcacacggagatgttgctcttttctggtagatgtcatacgtatcaggaggtggtgtatttactacaccaaatcaccaatatatttagttaagtggggcggaattaaatcgttagatcacaatagacatatagtattataataaaacattcttgatgttgccactcct

SEQ ID NO: 37438 - DNA, 2998 bp, Zea Mays
aagcacgccgatccctctttctttccgtcgtcctcctcgtcccaagttctaacccggccgccgcacatcgccaaaccctaactagggttttgccaagccctctccttccctatcctcacccccatggaccccttttccaagaagcgcaagcccgacgagaacggtgccgtcaccgcctctcccgccggtggggctgccacgctgggcctcacccgcgacgacgtcatccgccttctcgagccgctctcccgggaccagcttgcggacatagcggccgccgccgcgctcgtctcctcgcaagcgctcgacgccgtgcgcgcagccgccgaccgtgacccggccctccgcaagctcttcgttcgggggcttggttgggagaccacatccgactcgctccgcgccatcttctccgcttacggggacctggaggaggccgtcgtcatcactgacaaacccacggggcggtccaagggctacgggttcgtcaccttccgccacgccgattccgccgtcctcgcgctcaaggagccatccaagaagatcgacggtcgcatgactgtcacgcagctcgccgccgccggctcggctggtgggcccgccggtgggcccgccggcagtggcggtgctcctgtgtctgatgtgtcgctccggaagatcttcgttggtaacgttccggcagacatggcatcagagcgtctccttgcgcattttgcctcctatggcgagattgaggaggggccgctgggttttgacaagcagacgggcaagttccggggttttgcactcttcgtatacaagacaccagaaggtgcgcaggcctccctagtggacacggtgaaggtaattgacggccaccagcttgtatgcaagcttgccttagacgggaagaaggagaagcaggggcaatcacagcaacctggacctggcaatcaccagcagcagcagatactgccgggtggtccgcaggacattcagggagggcttgggcttgggtcacaaatgggagcacagtatggtgtccctggtactggtatgccttcatttggttttggtggtgttggcggcgggtttgggggtccaaatccttatggtaacatgccatcttccatgggtggaggtggcgcaggtggtttagggtcgatgggaggccaggtgcccagtggtttggctagtgctggggctggtgcatttgggcctggcggattgggtggtggttcatttggtgtatcatctcagttcggtgctgctgggatgggggcatatggtggccttggaattggtggaggctctatgtaccgcatacaacagggagcaggtgggctgcctgcaggcacatttggtgatggagggagctacccacctccaggttctggtttccggggccaggaccctcaaggtggaatgtctcctcctggtccaggtggcagggctcctcctatgtatcccaacgtgccaccttatttctaaggttcatgatttttgatatgcgtctagatatagattatgtctagatacatgagtatctcgaaaaagctagctacggagccttacaatttggaaagaagcaagttgtgtttttgtgtacattatcttatgtttaggtgaacaagaatggcctagaatttggaattgagcattttgcagtcttggttcttattgattgtttattagtagccaatttaaaagccactgaggtgtttttttcctgctatgagaattgtgccactatttatatatatagtggtacatgttcgatgtaaatttgtacctacgttgcaatgcctacatattatgattctttgttctttgtggtaatgcctttatatatcttggaatctttgtttgtacgtcttctgttttgatttggtttgctgttcactccgaaataatgtaatcgactgcccaaaaatgtttttaactctagcgaatatacgtgaggcatgaactacggaaaaatgttttttacccaagcagatatattcttgaggtctaatcaggaaattaaacagaagcacgttccatgtgcctggtagccctgtagacaccagtggctgcagtcgcaatatgttagtggtggttgttactgctctttgtaagtggtttccctttgctgagtaactcggtaaattgatgggtgtgcattaattcgtagcttgtagagatgatgttcatatgtatggtagtcgtttctgtcctctcgatgtttttctcgataatgattaccaaacttattggaaatgatggagcgatggttctcttagatggaaacaatttggttgtagcaccaatttgcgctgcataatactactagaagggacgtgtcgactgtcgatccacctagcccaggacatcaatgctccatcgaaagttttctcacctgccgtctgcgccacctttccgtcccactcgagatgaccccaactgcctacagatgagtaggctgtggcaagtgaaacttgacattttggagcttgtgtacatacggcctgagtttggcggtgagcccagtgcccggtgttgaagatgaggtcgtcaagtccactgcaacataggccctgagtttgatgcgttcgtcttttgtttccaacttcacgaggaaggggcaccagaagaacactgcggattctgtgttttttttaattgggtgtgtcagaacgaaatgtgttaattgattttaggtgcaagattgtagtcaattaaaagataaatagagagcgttgggactctaggatatgattattggtaattaatttgttgccatgctcaagaaggcatgaaatttgaaaacgcacccgggaattaatcacacgtgcaagccagagctgatcgatgcacacggagatgttgctcttttctggtagatgtcatacgtatcaggaggtggtgtatttactacaccaaatcaccaatatatttagttaagtggggcggaattaaatcgttagatcacaatagacatatagtattataataaaacattcttgatgttgccactcct

SEQ ID NO: 37439 - DNA, 2205 bp, Zea Mays
aagcacgccgatccctctttctttccgtcgtcctcctcgtcccaagttctaacccggccgccgcacatcgccaaaccctaactagggttttgccaagccctctccttccctatcctcacccccatggaccccttttccaagaagcgcaagcccgacgagaacggtgccgtcaccgcctctcccgccggtggggctgccacgctgggcctcacccgcgacgacgtcatccgccttctcgagccgctctcccgggaccagcttgcggacatagcggccgccgccgcgctcgtctcctcgcaagcgctcgacgccgtgcgcgcagccgccgaccgtgacccggccctccgcaagctcttcgttcgggggcttggttgggagaccacatccgactcgctccgcgccatcttctccgcttacggggacctggaggaggccgtcgtcatcactgacaaacccacggggcggtccaagggctacgggttcgtcaccttccgccacgccgattccgccgtcctcgcgctcaaggagccatccaagaagatcgacggtcgcatgactgtcacgcagctcgccgccgccggctcggctggtgggcccgccggtgggcccgccggcagtggcggtgctcctgtgtctgatgtgtcgctccggaagatcttcgttggtaacgttccggcagacatggcatcagagcgtctccttgcgcattttgcctcctatggcgagattgaggaggggccgctgggttttgacaagcagacgggcaagttccggggttttgcactcttcgtatacaagacaccagaaggtgcgcaggcctccctagtggacacggtgaaggtaattgacggccaccagcttgtatgcaagcttgccttagacgggaagaaggagaagcaggggcaatcacagcaacctggacctggcaatcaccagcagcagcagatactgccgggtggtccgcaggacattcagggagggcttgggcttgggtcacaaatgggagcacagtatggtgtccctggtactggtatgccttcatttggttttggtggtgttggcggcgggtttgggggtccaaatccttatggtaacatgccatcttccatgggtggaggtggcgcaggtggtttagggtcgatgggaggccaggtgcccagtggtttggctagtgctggggctggtgcatttgggcctggcggattgggtggtggttcatttggtgtatcatctcagttcggtgctgctgggatgggggcatatggtggccttggaattggtggaggctctatgtaccgcatacaacagggagcaggtgggctgcctgcaggcacatttggtgatggagggagctacccacctccaggttctggtttccggggccaggaccctcaaggtggaatgtctcctcctggtccaggtggcagggctcctcctatgtatcccaacgtgccaccttatttctaagatggaaacaatttggttgtagcaccaatttgcgctgcataatactactagaagggacgtgtcgactgtcgatccacctagcccaggacatcaatgctccatcgaaagttttctcacctgccgtctgcgccacctttccgtcccactcgagatgaccccaactgcctacagatgagtaggctgtggcaagtgaaacttgacattttggagcttgtgtacatacggcctgagtttggcggtgagcccagtgcccggtgttgaagatgaggtcgtcaagtccactgcaacataggccctgagtttgatgcgttcgtcttttgtttccaacttcacgaggaaggggcaccagaagaacactgcggattctgtgttttttttaattgggtgtgtcagaacgaaatgtgttaattgattttaggtgcaagattgtagtcaattaaaagataaatagagagcgttgggactctaggatatgattattggtaattaatttgttgccatgctcaagaaggcatgaaatttgaaaacgcacccgggaattaatcacacgtgcaagccagagctgatcgatgcacacggagatgttgctcttttctggtagatgtcatacgtatcaggaggtggtgtatttactacaccaaatcaccaatatatttagttaagtggggcggaattaaatcgttagatcacaatagacatatagtattataataaaacattcttgatgttgccactcct

SEQ ID NO: 37440 - DNA, 2901 bp, Zea Mays
aagcacgccgatccctctttctttccgtcgtcctcctcgtcccaagttctaacccggccgccgcacatcgccaaaccctaactagggttttgccaagccctctccttccctatcctcacccccatggaccccttttccaagaagcgcaagcccgacgagaacggtgccgtcaccgcctctcccgccggtggggctgccacgctgggcctcacccgcgacgacgtcatccgccttctcgagccgctctcccgggaccagcttgcggacatagcggccgccgccgcgctcgtctcctcgcaagcgctcgacgccgtgcgcgcagccgccgaccgtgacccggccctccgcaagctcttcgttcgggggcttggttgggagaccacatccgactcgctccgcgccatcttctccgcttacggggacctggaggaggccgtcgtcatcactgacaaacccacggggcggtccaagggctacgggttcgtcaccttccgccacgccgattccgccgtcctcgcgctcaaggagccatccaagaagatcgacggtcgcatgactgtcacgcagctcgccgccgccggctcggctggtgggcccgccggtgggcccgccggcagtggcggtgctcctgtgtctgatgtgtcgctccggaagatcttcgttggtaacgttccggcagacatggcatcagagcgtctccttgcgcattttgcctcctatggcgagattgaggaggggccgctgggttttgacaagcagacgggcaagttccggggttttgcactcttcgtatacaagacaccagaaggtgcgcaggcctccctagtggacacggtgaaggtaattgacggccaccagcttgtatgcaagcttgccttagacgggaagaaggagaagcaggggcaatcacagcaacctggacctggcaatcaccagcagcagcagatactgccgggtggtccgcaggacattcagggagggcttgggcttgggtcacaaatgggagcacagtatggtgtccctggtactggtatgccttcatttggttttggtggtgttggcggcgggtttgggggtccaaatccttatggtaacatgccatcttccatgggtggaggtggcgcaggtggtttagggtcgatgggaggccaggtgcccagtggtttggctagtgctggggctggtgcatttgggcctggcggattgggtggtggttcatttggtgtatcatctcagttcggtgctgctgggatgggggcatatggtggccttggaattggtggaggctctatgtaccgcatacaacagggagcaggtgggctgcctgcaggcacatttggtgatggagggagctacccacctccaggttctggtttccggggccaggaccctcaaggtggaatgtctcctcctggtccaggtggcagggctcctcctatgtatcccaacgtgccaccttatttctaagtggtatggtgagacaaggcattggaccgctgcctggatgcctaggtggcgcctaggcgatgcaaggcgcctaggcgttggaccactgcctggacgcctaggcgacacctttaaaacagtggtgaaatctgcattgacctgtagatgtttttccttagcttctcttggatgaagtagagtacttgactaatgtgtttgcgaattatgttgacagtgttagtttctttgctttcattgaatggctgggaaatcaaacattttcattgattaagctccaatgatttgtaagaaatttaaggccattggtgcactaacaagtagtgattggctgagtattgtttacttgttctgattttattggttttcttggtgattgaagttcttatgatgctttgtaaaatacttgagataattacatgtctgatgaagttgattggtgggcatagcttcaaggattgataactgtgaatgagtcagcgtagtagaccttaatttccatactgtatttgccattattttgtcttgttttattgttctgaaacttcactttgggtgtatgggtctatccttagacttgccttggtattgtggaaggtactctcagagcatagcataacaccttttttggtctggctgcaccacccatcattttcagtttttcaccaccgaatttattcggttgtttatttgacaagagttcattcctgcacttgttagtttcttgcacatgtgcttgttggattctaatttgttatctcttaatgcttggggtctctaagatttggtattcaagttttatcatgatgatggccaataatgtgtatgtcttggatagttacttgatctaagtatctcaccttgctggttcatacttgatgctagatgtttgttgacatctgagattggtatgatgacccgtttaggatttcattgcgtgctggaattgttgcagtagatatggtatccagacatcctgtaaaatgtgtacctatatttattgtttttttgttaaaagctttggtttactttgtttgctttgtcaataggtgcatttggatcttctccactacttgatcagtccttttatttgcatccttttctttttactcagtcttattatcatagtctttactggtattagtggtttgtacaattatttacccgtgcatgtttttcagtattcatgttattgatacacataccttgactccaatttggtacttgagcatgtgcattgtcacatttttgtgaatgaaccccttttgtagaacttatgttgtttcgcaaatttaataatgcatgtattgcttgaggtgttgatccgaaatattttatttccttgttttatactataaaattactagtcgcatacactgacaaccctcaaatgtgtatttgaatgctagagatgttttgtttggtctatttttttct

SEQ ID NO: 37441 - DNA, 4655 bp, Zea Mays
tagaggaaaaccagtgcatcatgtaaagaagatattggaaggataatcacaaaaatgatgatcgcaggaaatgaattggattccttatcgaaaaacttagaaatatttcatagaactcacgttaaaacacacttgccaaataaactaagatctggcatgggtagaggatcaaataatcagatgttgaaaggtcccagacaacaatctacattctactatgtactaccaccattgctaatcgaaaatcaatagcaaatggccatatcaaatagaattccacatatagaactagtcattgaggaatcacacacggaaaaacacgtaattttgcaaattatgagattcataacatgtttgatgaacagaaggatacttcatatgatcatgtagggcagcttggaagtcatatgcttcaggtctttcccggaagcctaaacctatgaaagcatggcgctgacgcccatctgaagttcatggtaagatttgttatgctaatatattacccagcatgagactgaagtggccacaccaattcaaattaagtgccaagtgccatgactcaacgctaaccactgagcacaatattatggaataagtaatatcatagagcccacgaaagagacaaggaagctgagcctagctggttgagggtgtgaacgcccacaacacttaggttcaagtcctagaggtgaatttgagtgcttattttcttcttaatactgatataataaagccacctattccttttaggattggtctagttttatcaatggagtgtttcctaaactaaacaaggttttacaagctgcagggaatgaaggatccatatggtgtgcagctgaagcaatgaatctcttgagtattgttgttatgaccggcgtcacctataggcactggagccgcgtcaatggctaggccacgcgtgcagttaggggcgaaatactcaagattttccttagatattttgcattgttttcataaaaaatagaatcatgattgattcttgttaggaggtttccattaaattaaagattgcttgcttagggatcaagtaagcctctctctataaggagagaaggtgtatcaatctaatcaaaacaattatcttgcctgacctaaagggtaatctcccacgtctatctcccccgctcgcttgctccctgtgcgcgaccacagctcctatccactgctaggggtacacatgaacacgtcccgaccatcaatctcctacccgtacaacctacagtcacggtataatcctagatcctatcaatctggtattagaaatgtcgggtgacgatggctccaagaagtagccaccgaccccaccatcgtcggtcgtcgacgccacgatgaaagtcttggaggacatcgccacgtagctagccaatttcaccacccgcatgtcatcccaagagcaccagcaggcgtttgcacaagggtttcccctatgggatgccaaagtacggggcgacgacgttcctgtccttcaccaccactgctatgccaccctccaccctgcatgtcgtgctgcctgtcactctcctgcacaccacaaaaaccactgttgccccatccgccctcttcccatccaccaaatcagcttccctccctcaccatcctcgttgccaaagttttcagagggggcacctttctcatctgcgcgggcgccctacattgtaggtgttgcgaccaaaatataacaaccacgaatgggacttggtgatgaagaacaccatgacaaagggccacattatctcgtatttaatgactatatgtaatgttttattttcatgtcgtactatttgtccatgtattaaatgtgatagaatagcttctctcagaaaaaattaagagttcactttgatgcccttccaatcggtgcgcctataaagattctaaattctaatcaatgtttggtaggtctgccaaatcagagtgccatcaattgttttgatctagtagggtggatgtcgggtatctgtatatatagtgttggtttgcttaacgaggctatcaaatcagatttgagcctttgacataatgttgggacccagggtattggatgccacccaacaaacaaaagtcacataggatgtgattagcaaatgttgcttacctatgtcattatgtttctagtcatgatgtcaaagctcactagaacttagtgaacacagatcttgtccactatatgtcgtcaaaggaaagacaattgcaaaacatatagtgggaggaatattttattaaattgtttaataagaggttgaagtaaacatagtgctaaactttgctttttatttattatagtgatggcacctaatgctttaccggtttaaatttgtgatcgatcgttgacaaaaaaatcactagaacaaattttattgattggtaccgtaacttgagagttgttttcaaataagggaaaaagaaatatattcttgagactccctatcctaatgagtcaaaggagaataaaagttatgatggctgaagtgcttatgagtagcacacgaatgactccctggatgttagttgtctcatgcttacaaccatgtcctctgagcttcacaagcaatatgagtatgcgaatgcccacgtggtcacatggtatgttcatgaaccaagcaagggtggaaagatatgagatatccatgtccctattttcatgcaaggcgaaagggcctctagctgagttggttaggcggtctgagtagcacccctcagatcctaggttctactccctgtgggagcaaatttcaggatgtggttaaaaaaatcccctcgtctgtcccacgccaaagcacaggtctaaagcctggtcccgatcgtggtcgttctcacatgggctacgatgtcgttgtgtatgggtgaggcaggggttcagggtttttctcgacctgtgtgaagtcttcttcttaatagaatgtccgatggttgtcttacctccaataggttgagttttttttatttacatgcaagctaactgaaaggaagtccagtcagccctcatgtaatcgggatgatgggttacgttccttgacagcttgatttcgctcttattgatgagctagctacggatgtgatccttcggtctctcccttcacgctatataaggcattcattttgaactttcacgtgaatagcatggtgaagaccttcacgagttgcataggatgtttaagacagctgagaagagcaatagaaagaactctaatcatgtgatgatggtctagaagaatagcaagaagtggaaacacttcatgaagggcaagggcaagctcgtgccacgctatgtcagccccttccaggtgctggagcgtgttgagtgggtaacctatcacctttagcttctagagggtgcttgtctccacaacacgttacatgtgggctgctcaagccattccgcagggaacctcagatgaatccaccgcacatgtcgcccgtacaaaacgatcgactattgtatgcgccaaagcgtgtgttgcacgcccaactacgccttggcgcttgaacgtctgcgtttagtggtgtgacctgccctgcaacggcaccatttgggagtcgcttcaacaattcaaggacctttacctcgacatccaactcgagtacgagatgtttaaagaggcagggaaagatgttatgaccaacatcacctataggggtcggggttgtgctagtggctaggccacacggggagttaggggcaaaatgcctagaattttctttctttagatattttgtattgttaccataaatataaaaataggatcatgattgattcttgttaggagatttttataaaaatataagcattgttggcttcgcgattaaataagcctctcaatataaagataggagatttatcaatctaatcaagcaacgcaattatcttgtctggcctcaaagaccatctcccatatctctcttgctcgcctacttcctgtgcacgaccatggctcctatgctccaccaggggtacaaacccaaccatcaaaattctacccgtacaacctacgcagtcatggtaggatcctagatcctatcaattgtacatagttttctttgggtagtacctaagtgggtcgtttatgctatgcctgtggtgcatatgatgtattgttaatattaatgggcttagggcctgtgaactaacaaacttttttcttctatattaatgaaatggcacagctctctctgcgttcgagaaaacgatagaaagacagtcatcacctatattctcttcaacacgtagtacaaaatatctgcaagaaaaatattcaaacagcaagaatcatgtcaggctcttataatcttcgagtagttttctaatggatagtgaaaaatacaaaggcacatatataattgtaggaccagattatattttatggcagccctagatacagacctgctactgtcaattacaggttccaccggatgtggttcaccctctctgagaaatgccctagcataaagctcccctaaaacacatccactgaatcaataattcaatattgtgatgaataaaaaggaaattgaccaaaagcactaaaatggctataatacctgtttttttatcttccagtttaatgatgcattcctctcccttgctgacaaccttaagcgccccttcccatgcccatttgttgacgttccac

SEQ ID NO: 37442 - DNA, 1268 bp, Zea Mays
cttgtactaccggccgggcggcgctctcaatttgctcctctgatctcaaagactgacaattgcacattaattccctgccccggcctaactatctgttgttaatgactgagcagctgtacgtatctgtagttctgtaccatgacgcgctcctccatctccacttcatctgggtgggcaacaaaaaaaaaaaggctgcgtcctttttataaaaagggtcgagcggcgcgcgcgcacacaggccgtagacagagagacgcccttgttgcaacttttcaggtaggggccatggcgtcacacagctagctagagacgagagagagagagagagacagagcatctcagcctcatccatcatggggaaacataagctttcctttatgtctgcacagcgcaggggcagattctatctctctcggccttgggcttgcacatgcatgatctctcatctctccaagctaagcctccaagtccaaccaaccaatgcaaagaaagctgaaggcttttgcgagctctcgtgccaactacggccggccttggtgtcttgtgcttcacatcacatgtgtgactgcctgacagggcttgtgtgtttctggtagatcttatctgaaaggtgacgacctcacatcacaagacacgagagctagcagtgcctgcctgcttcacattgacaacatccctggccaatagtacaaagcggctgcgaggtaccaatgcaaaggaggtagcactatcagccgatgaacaaagcccaaacccagcgagccccacgccgtctccgtgcatgggccaccaggcaccagccacaagcccaccgggtggcccatggaaatgcatggatacatgtcagacttagtgtgacagcatgaagagaaggttggcacgagttccacgtgcaagtattgtaggaaaacgaagagcagaggcgatggtaccagcaggtaggtatgggtatggacaaacacccccttcacccctatactcaaatttgtcaaatatgtatccaacaggaatcgaggccacatatattcaaccaagtttggtgttaccatgttgggtccatatgcttctacagacgaccaagactatgtatacagaatgtgtacacaccaggatcctttcaacatgcttaactatgatgactcaaactggatatgtgagtattgtaatgtggacctatatgctgcggaagaactctaaatgaacttgtatttgagtattgtgaagaccgattgttgtttgttacataagagttggagtttgtggccgaa

SEQ ID NO: 37443 - DNA, 992 bp, Zea Mays
cacggatacgggtttgggacggtaaaacccagcgggtttgtacccgttgccatctctagcttagttagctagacacaatcacacgatgcgactagcaagggggcgatacatgtccaggtcatgcgtgcttatcaagatggcttttatttgtcccaagatatgtagtggcgtgtagagagacgaaccaattaattaagcccacgatacagattaaagcgaactcaacgccggccctggcggggtcaagcagtgtcccgaccagggcccctagattaattataccgttttagcgtttgctctagttaaatcctatttagttgagtgaatttagaaaaatcatacaactactcgtcttttgcgcgagccgctgtaattgtactgagtggggtgagagtcttgcgagaccgtgacaatcgcgtttgtgtcacggccgtcaccgtgtaccgcaggaaacgaggtccgtggtgtttttggctcgaagcggagcaccacttgcgtgtggagaaggtctgcagctctctacagagttactcgaccgtggtgcttggcgctcgcgtgagctttcctttgtgtagagacaccaaccaagattagtcggtaccttgtgtggtttcgaatacctcggtaaagatgatctggttgacggtgctccacgcgacctgcttcggatatgccagaatgtcgtcgccggaggccacacatcgatccctcgatccaaaggaggccagcctcctcttcacctcctggagggaggcctccatgttgttctcttctcttgttcatctgctcaaacagattcctctcgtcacacccatagccatagctcggatctcttgcttcggtgcctacttgctggagatggttggctgagggacgaattcagcggtggggcgagcggggctcgagccccctatcgcttcggatcccatggagcctcactacacccttctctaatctaaaatatatacaatataatgtagaatgagctttta

SEQ ID NO: 37444 - DNA, 1131 bp, Zea Mays
gccatttgcaaatcatatgctgaaagcagagcttgtattgtggatatagcttttatggctccagttcaagctactcttccttttccagcacccattgtccctgcagtggcgttaaatccggctgcaaattttctgcaaagctttgatttccatgcaactcacgtgccggttgagcctatgccaatgatctatcctcaaagacctggagaaattgtttgtgatttttacatgaagacaggatcttgcaagtatgctcagaattgcaagtttcaccacccttttgaccggtctgcacctcattccaaagaaaacgaggatacacagcagcctgtggcacttactcttgctggccttccaaggagagaggatgctgaggcctgtgccttctacatgaggtctggcacgtgcgggttcggtgcgcgctgcaagttcgaccaccctcctcgccaggacgatgtctaatacggtgtactccctccgtttcgttttagttgtcgctggatagtacaaaattgaactatccagcgacaactaaaaaaacggaggaagtatcctgtatcaggatgtggtaccatgcgaatcgcactgttaatgcttgatgctgtcactgccatggtgggagcctgacttgtaaagttcagtatcaccggaagtgtttgtcggcgcgtgctggtactaacggtgtaccttcggcggttggatggtgtcaagagtaaaaatacaccgcctgttctcaaactttgactggatgctaatctccaaaatgtgagaaccaagttaccgtaacttgagttaatccgcttgcatggttatgtgatgataaggcgttgggacgtggagtctacatgatggtagggatataggagatcgaatcgcatgttcgcctcacatgttgatgcaatgccaacgtgcaattagcttgtcaacagattaatttagcattattggcatattaaagagtttaggccttcaggtatcaggatatacattttggaattttgaaaacctggatggcaccatgagtcggttggtacatgctagagcagctttagcgagctgcgagcccaaaatcaaggccccactttttcatgggcatctcccgcgggaataaatccctgttctcatttaaat

SEQ ID NO: 37445 - DNA, 1197 bp, Zea Mays
cttggctacatctccagtggtgaagtggattgctcgttttatatgaagacaggcagctgcaaatatggttctatttgtcgcttcaatcatcctgatcggtcagttgtggatatagcttttatggctccagttcaagctactcttccttttccagcacccattgtccctgcagtggcgttaaatccggctgcaaattttctgcaaagctttgatttccatgcaactcacgtgccggttgagcctatgccaatgatctatcctcaaagacctggagaaattgtttgtgatttttacatgaagacaggatcttgcaagtatgctcagaattgcaagtttcaccacccttttgaccggtctgcacctcattccaaagaaaacgaggatacacagcagcctgtggcacttactcttgctggccttccaaggagagaggatgctgaggcctgtgccttctacatgaggtctggcacgtgcgggttcggtgcgcgctgcaagttcgaccaccctcctcgccaggacgatgtctaatacggtgtactccctccgtttcgttttagttgtcgctggatagtacaaaattgaactatccagcgacaactaaaaaaacggaggaagtatcctgtatcaggatgtggtaccatgcgaatcgcactgttaatgcttgatgctgtcactgccatggtgggagcctgacttgtaaagttcagtatcaccggaagtgtttgtcggcgcgtgctggtactaacggtgtaccttcggcggttggatggtgtcaagagtaaaaatacaccgcctgttctcaaactttgactggatgctaatctccaaaatgtgagaaccaagttaccgtaacttgagttaatccgcttgcatggttatgtgatgataaggcgttgggacgtggagtctacatgatggtagggatataggagatcgaatcgcatgttcgcctcacatgttgatgcaatgccaacgtgcaattagcttgtcaacagattaatttagcattattggcatattaaagagtttaggccttcaggtatcaggatatacattttggaattttgaaaacctggatggcaccatgagtcggttggtacatgctagagcagctttagcgagctgcgagcccaaaatcaaggccccactttttcatgggcatctcccgcgggaataaatccctgttctcatttaaat

SEQ ID NO: 37446 - DNA, 1061 bp, Zea Mays
cttggctacatctccagtggtgaagtggattgctcgttttatatgaagacaggcagctgcaaatatggttctatttgtcgcttcaatcatcctgatcggttgagcctatgccaatgatctatcctcaaagacctggagaaattgtttgtgatttttacatgaagacaggatcttgcaagtatgctcagaattgcaagtttcaccacccttttgaccggtctgcacctcattccaaagaaaacgaggatacacagcagcctgtggcacttactcttgctggccttccaaggagagaggatgctgaggcctgtgccttctacatgaggtctggcacgtgcgggttcggtgcgcgctgcaagttcgaccaccctcctcgccaggacgatgtctaatacggtgtactccctccgtttcgttttagttgtcgctggatagtacaaaattgaactatccagcgacaactaaaaaaacggaggaagtatcctgtatcaggatgtggtaccatgcgaatcgcactgttaatgcttgatgctgtcactgccatggtgggagcctgacttgtaaagttcagtatcaccggaagtgtttgtcggcgcgtgctggtactaacggtgtaccttcggcggttggatggtgtcaagagtaaaaatacaccgcctgttctcaaactttgactggatgctaatctccaaaatgtgagaaccaagttaccgtaacttgagttaatccgcttgcatggttatgtgatgataaggcgttgggacgtggagtctacatgatggtagggatataggagatcgaatcgcatgttcgcctcacatgttgatgcaatgccaacgtgcaattagcttgtcaacagattaatttagcattattggcatattaaagagtttaggccttcaggtatcaggatatacattttggaattttgaaaacctggatggcaccatgagtcggttggtacatgctagagcagctttagcgagctgcgagcccaaaatcaaggccccactttttcatgggcatctcccgcgggaataaatccctgttctcatttaaat

SEQ ID NO: 37447 - DNA, 1702 bp, Zea Mays
aaaaattaattaagggtcctaacttattgtgaagaaacatttggatcatgatccattaccacccctaatgatagggcttggattatgtcagtatatctttttcagagtaagtgtatgggttgggactgcctagaaagggtgaggctggaatagtctaagaaaattcaatctcccctctattttcttatattatttttgttctcttgagaagcgagcatgcgtacatctacttgcctcagttttttcaccctcaccgtcctgccacagacattttggctcaacatcattagcatgccatccattgccattttgccacctttggtcctgaatgatgaggattattatcctgagcgaccaggggaaccagatttatttattgagtagtagatgtaagtttaaatctaaatgcaagttcaaccatccaaaggaaatggtgaacgcattaggaacaagaacagacaatgaatcactaatcgctgataccactatcttaccagtgaggccttctgaacccgtttgttcgggtgaagtggattgctcgttttatatgaagacaggcagctgcaaatatggttctatttgtcgcttcaatcatcctgatcggtcagttgtggatatagcttttatggctccagttcaagctactcttccttttccagcacccattgtccctgcagtggcgttaaatccggctgcaaattttctgcaaagctttgatttccatgcaactcacgtgccggttgagcctatgccaatgatctatcctcaaagacctggagaaattgtttgtgatttttacatgaagacaggatcttgcaagtatgctcagaattgcaagtttcaccacccttttgaccggtctgcacctcattccaaagaaaacgaggatacacagcagcctgtggcacttactcttgctggccttccaaggagagaggatgctgaggcctgtgccttctacatgaggtctggcacgtgcgggttcggtgcgcgctgcaagttcgaccaccctcctcgccaggacgatgtctaatacggtgtactccctccgtttcgttttagttgtcgctggatagtacaaaattgaactatccagcgacaactaaaaaaacggaggaagtatcctgtatcaggatgtggtaccatgcgaatcgcactgttaatgcttgatgctgtcactgccatggtgggagcctgacttgtaaagttcagtatcaccggaagtgtttgtcggcgcgtgctggtactaacggtgtaccttcggcggttggatggtgtcaagagtaaaaatacaccgcctgttctcaaactttgactggatgctaatctccaaaatgtgagaaccaagttaccgtaacttgagttaatccgcttgcatggttatgtgatgataaggcgttgggacgtggagtctacatgatggtagggatataggagatcgaatcgcatgttcgcctcacatgttgatgcaatgccaacgtgcaattagcttgtcaacagattaatttagcattattggcatattaaagagtttaggccttcaggtatcaggatatacattttggaattttgaaaacctggatggcaccatgagtcggttggtacatgctagagcagctttagcgagctgcgagcccaaaatcaaggccccactttttcatgggcatctcccgcgggaataaatccctgttctcatttaaat

SEQ ID NO: 37448 - DNA, 1904 bp, Zea Mays
aaaaattaattaagggtcctaacttattgtgaagaaacatttggatcatgatccattaccacccctaatgatagggcttggattatgtcagtatatctttttcagagtaagtgtatgggttgggactgcctagaaagggtgaggctggaatagtctaagaaaattcaatctcccctctattttcttatattatttttgttctcttgagaagcgagcatgcgtacatctacttgcctcagttttttcaccctcaccgtcctgccacagacattttggctcaacatcattagcatgccatccattgccattttgccacctttggtcctgaatgatgaggattattatcctgagcgaccaggggaaccagattgtccttatttattgagtagtagatgtaagtttaaatctaaatgcaagttcaaccatccaaaggaaatggtgaacgcattaggaacaagaacagacaatgaatgaggccttctgaacccgtttgttcgttctatgcaaaaacaggcaaatgtaaatttggtgccgtttgcaagttcaatcacccaaagctagaagatattaagacaccatctttgattgcaaaggaaaccatatatagagcaacaactgatgcagcagcgcacattggtgggacagatgattctgttccagcaaagacacatgcaccaattgccccagccgaggcacataatgcaaaggggcttccaataagaccaggtgaagtggattgctcgttttatatgaagacaggcagctgcaaatatggttctatttgtcgcttcaatcatcctgatcggtcagttgtggatatagcttttatggctccagttcaagctactcttccttttccagcacccattgtccctgcagtggcgttaaatccggctgcaaattttctgcaaagctttgatttccatgcaactcacgtgccggttgagcctatgccaatgatctatcctcaaagacctggagaaattgtttgtgatttttacatgaagacaggatcttgcaagtatgctcagaattgcaagtttcaccacccttttgaccggtctgcacctcattccaaagaaaacgaggatacacagcagcctgtggcacttactcttgctggccttccaaggagagaggatgctgaggcctgtgccttctacatgaggtctggcacgtgcgggttcggtgcgcgctgcaagttcgaccaccctcctcgccaggacgatgtctaatacggtgtactccctccgtttcgttttagttgtcgctggatagtacaaaattgaactatccagcgacaactaaaaaaacggaggaagtatcctgtatcaggatgtggtaccatgcgaatcgcactgttaatgcttgatgctgtcactgccatggtgggagcctgacttgtaaagttcagtatcaccggaagtgtttgtcggcgcgtgctggtactaacggtgtaccttcggcggttggatggtgtcaagagtaaaaatacaccgcctgttctcaaactttgactggatgctaatctccaaaatgtgagaaccaagttaccgtaacttgagttaatccgcttgcatggttatgtgatgataaggcgttgggacgtggagtctacatgatggtagggatataggagatcgaatcgcatgttcgcctcacatgttgatgcaatgccaacgtgcaattagcttgtcaacagattaatttagcattattggcatattaaagagtttaggccttcaggtatcaggatatacattttggaattttgaaaacctggatggcaccatgagtcggttggtacatgctagagcagctttagcgagctgcgagcccaaaatcaaggccccactttttcatgggcatctcccgcgggaataaatccctgttctcatttaaat

SEQ ID NO: 37449 - DNA, 1881 bp, Zea Mays
aaaaattaattaagggtcctaacttattgtgaagaaacatttggatcatgatccattaccacccctaatgatagggcttggattatgtcagtatatctttttcagagtaagtgtatgggttgggactgcctagaaagggtgaggctggaatagtctaagaaaattcaatctcccctctattttcttatattatttttgttctcttgagaagcgagcatgcgtacatctacttgcctcagttttttcaccctcaccgtcctgccacagacattttggctcaacatcattagcatgccatccattgccattttgccacctttggtcctgaatgatgaggattattatcctgagcgaccaggggaaccagattgtccttatttattgagtagtagatgtaagtttaaatctaaatgcaagttcaaccatccaaaggaaatggtgaacgcattaggaacaagaacagacaatgaatcactaatcgctgataccactatcttaccagtgaggccttctgaacccgtttgttcgttctatgcaaaaacaggcaaatgtaaatttggtgccgtttgcaagttcaatcacccaaagctagaagatattaagacaccatctttgattgcaaaggaaaccatatatagagcaacaactgatgcagcagcgcacattggtgggacagatgattctgttccagcaaagacacatgcaccaattgccccagccgaggcacataatgcaaaggggcttccaataagaccaggtgaagtggattgctcgttttatatgaagacaggcagctgcaaatatggttctatttgtcgcttcaatcatcctgatcggtcagttgtggatatagcttttatggctccagttcaagctactcttccttttccagcacccattgtccctgcagtggcgttaaatccggctgcaaattttctgcaaagctttgatttccatgcaactcacgtgccgttttacatgaagacaggatcttgcaagtatgctcagaattgcaagtttcaccacccttttgaccggtctgcacctcattccaaagaaaacgaggatacacagcagcctgtggcacttactcttgctggccttccaaggagagaggatgctgaggcctgtgccttctacatgaggtctggcacgtgcgggttcggtgcgcgctgcaagttcgaccaccctcctcgccaggacgatgtctaatacggtgtactccctccgtttcgttttagttgtcgctggatagtacaaaattgaactatccagcgacaactaaaaaaacggaggaagtatcctgtatcaggatgtggtaccatgcgaatcgcactgttaatgcttgatgctgtcactgccatggtgggagcctgacttgtaaagttcagtatcaccggaagtgtttgtcggcgcgtgctggtactaacggtgtaccttcggcggttggatggtgtcaagagtaaaaatacaccgcctgttctcaaactttgactggatgctaatctccaaaatgtgagaaccaagttaccgtaacttgagttaatccgcttgcatggttatgtgatgataaggcgttgggacgtggagtctacatgatggtagggatataggagatcgaatcgcatgttcgcctcacatgttgatgcaatgccaacgtgcaattagcttgtcaacagattaatttagcattattggcatattaaagagtttaggccttcaggtatcaggatatacattttggaattttgaaaacctggatggcaccatgagtcggttggtacatgctagagcagctttagcgagctgcgagcccaaaatcaaggccccactttttcatgggcatctcccgcgggaataaatccctgttctcatttaaat

SEQ ID NO: 37450 - DNA, 1949 bp, Zea Mays
atttttttgaactaaaaaattaattaagggtcctaacttattgtgaagaaacatttggatcatgatccattaccacccctaatgatagggcttggattatgtcagtatatctttttcagagtaagtgtatgggttgggactgcctagaaagggtgaggctggaatagtctaagaaaattcaatctcccctctattttcttatattatttttgttctcttgagaagcgagcatgcgtacatctacttgcctcagttttttcaccctcaccgtcctgccacagacattttggctcaacatcattagcatgccatccattgccattttgccacctttggtcctgaatgatgaggattattatcctgagcgaccaggggaaccagattgtccttatttattgagtagtagatgtaagtttaaatctaaatgcaagttcaaccatccaaaggaaatggtgaacgcattaggaacaagaacagacaatgaatcactaatcgctgataccactatcttaccagtgaggccttctgaacccgtttgttcgttctatgcaaaaacaggcaaatgtaaatttggtgccgtttgcaagttcaatcacccaaagctagaagatattaagacaccatctttgattgcaaaggaaaccatatatagagcaacaactgatgcagcagcgcacattggtgggacagatgattctgttccagcaaagacacatgcaccaattgccccagccgaggcacataatgcaaaggggcttccaataagaccaggtgaagtggattgctcgttttatatgaagacaggcagctgcaaatatggttctatttgtcgcttcaatcatcctgatcggtcagttgtggatatagcttttatggctccagttcaagctactcttccttttccagcacccattgtccctgcagtggcgttaaatccggctgcaaattttctgcaaagctttgatttccatgcaactcacgtgccggttgagcctatgccaatgatctatcctcaaagacctggagaaattgtttgtgatttttacatgaagacaggatcttgcaagtatgctcagaattgcaagtttcaccacccttttgaccggtctgcacctcattccaaagaaaacgaggatacacagcagcctgtggcacttactcttgctggccttccaaggagagaggatgctgaggcctgtgccttctacatgaggtctggcacgtgcgggttcggtgcgcgctgcaagttcgaccaccctcctcgccaggacgatgtctaatacggtgtactccctccgtttcgttttagttgtcgctggatagtacaaaattgaactatccagcgacaactaaaaaaacggaggaagtatcctgtatcaggatgtggtaccatgcgaatcgcactgttaatgcttgatgctgtcactgccatggtgggagcctgacttgtaaagttcagtatcaccggaagtgtttgtcggcgcgtgctggtactaacggtgtaccttcggcggttggatggtgtcaagagtaaaaatacaccgcctgttctcaaactttgactggatgctaatctccaaaatgtgagaaccaagttaccgtaacttgagttaatccgcttgcatggttatgtgatgataaggcgttgggacgtggagtctacatgatggtagggatataggagatcgaatcgcatgttcgcctcacatgttgatgcaatgccaacgtgcaattagcttgtcaacagattaatttagcattattggcatattaaagagtttaggccttcaggtatcaggatatacattttggaattttgaaaacctggatggcaccatgagtcggttggtacatgctagagcagctttagcgagctgcgagcccaaaatcaaggccccactttttcatgggcatctcccgcgggaataaatccctgttctcatttaaat

SEQ ID NO: 37451 - DNA, 2655 bp, Zea Mays
gttcatcagcattatctctcggagaagctcacactttccattctcttgtggtcgactcagctttggtcctccatatcaggtagtcaattaacgtacctgaatgaaatgcattatgcacatgaatgcatatagacaagaatattacaaacctaaatagtgctacgcgatagcgaattaaacacctagcggtgaggcgttgtatcgtttcatacgaaaacactagttatcgacgtatgattaagtacaatgattacgcttctttagattaaccgaatctaacgcatatatcacgaaacaacaaactatacacatttaatataattagcctaaacacaacttatcagctaattaattaaattctacacttatcccttgctttataaattataccacatcactcacaaagaactattttaattttatttcacacctcatctattttacatgtcaacaattaatcaaacatttcaagtttgactaccaaaatacctcacaaaaatcaacgatgacagcattatcggataatcatttggaatactaaattaattcttcatgccactaatttggcatacttcataagtaaaaccaatttgaacacactcgacagacacgtccggtcgggtactcctacgtaactagcattttaaatctaagttttaccttgcaaaattagtacgccataatcatgtcctcacatgcgacaagatattttggcaaccatctaatataactatgacatgtttatgcttcgatcaagataatcgtcgcgattaatatatctattcaatccattaataaaaatagttaactaaagaacggttaccgattcaactagaattccaagccaacgttgacgattcttgttcaggccttctgtcgagctcctggcaagcgccctgtgagttccacttcttcactcaaacttctaaaattgcagcggtgatcgaagacgagcacgtagaggcagagttggagcgaacacgatgacagcaaggttgctgctatccgaaacacggatccggcgacgaagaaccaaagttgtcgacgatggggtccctgacgagcgttgctttcgaacttcatttttatcttgaaccatagctctattctcactcccacacacacgcaggcgaggcaaccacaaaaggaacttgacgacgatggcagacacaaatatagacatgatgccagggcgtcgagtaatgcccagcaatcacgacaaagctgactgcgagtaggataacgatgcggtactgagtggcgcgcgagcagagaggcacaagagctagcgagttcggacggctggagcagagtaaatttgagggccaggcgagacgggcagcgtgacgatgccgaccacaacgagcacgacgtccggggcacagcaggggacgacggaagggagagcgacacaggggcgagctggatatcgacggtgttggggttctgcgacaaggcaaggtcgagcacatagagcgactagctacggatctagagcaggccgagcgaagctcgtggctgcgcgcagggaaaaccaggagagcgcgcggcggggcgagcgcagggaataggaggagcggccgagccgggcagctgtggccagggtgagcaggaacacatgcgagaggtcgagaccgagcagagagagcagcctggcagcgtggcggcccgcgtccgcaacaagcgggctgggcaccaagcaggaactgagcggtcgcagaggagaaacgacggtgagcagagagcttcgcgtgtgcaggaagctgggagcttgggcaagaccgagcagagggcacatctacacgcgcaagcagggagaagggcaccgtggcaagcgcaggggagcagcgcggtcagccatggaagcaggggcaagccaggagctgggagggagatggggctgggcgcgcacgaccaccaaagcgcggtgcagggaggccgagcggcacatcatcacggccgggacaatggtgccatgtatggagtctacaggggcaccatggccagcagggagatgggcaccaagcaccggagatggaggaatgggtggggaaggggctcggctgggagatccggccaggtgcggctgtgagaagctcgaggcacgccatgggagccgcgcggtctgccgagtagggagccggcgcgcagggagctccgagcagagggacgcagtcatggtggacggatcggcgccatgggcaagagagcacagagcagaaggagctccggcaaggagagagtcgaggggaagacgaggagctgggacggtcagtttcgtcacgcgcgcctccgcagcctgcacgcgctagtctccgcggccgactgcgcccgcgcggccaacccgacggcaaaagcgagctagagcagaaggggcgcgacgaaggaggctcggtacgaaagaactccgaggaggggcaagctcgcgcggcagggaggagctggggggtcgcgacgagcagagagggtgagagcgaaggggcggctgggcagcttgaggaggagaagagggtctgggcgcgtagaagacgagcacggctgggaaaaatcaggcgaggggcggcgggatctttttccctgagcggcggccggataaagacgagggaacggcggtggctgaaaaaaaatcgagagagagaacggctgaagatattc

SEQ ID NO: 37452 - DNA, 1353 bp, Zea Mays
gtctgagtgccccaaggacctcagataaaccacttacaaccaggaccgcaggattaagtaaacacaaatcacacaccaacaattttgcagcggaaatcttattaccaaacaagttacaacaaatttacattgtacatgatcggagtgattacaaaggtgattcaaagtgataaactttgaactgttataaattatttataattttgaaatatatgctagctcaagtgaccatccttaataagaagtatagaagagttacttagacttataagaaggtcgtgcccaccggcgcttaacaccatccatagcagcacaattctagtacctgcaacaacatgggttcgaaaaccctgagtacaaagtgtactttcgcaagtcttacctgtctaaagaaaaagactctcaaggatacgctggctattgggaatcaaggtatagcttgtcaagaatcaaagactcttttgcagaaaagattactatgaatggatccttaaaaatccatttttacttgtcaggttaagtaaagttacttgcatctagagttctttctaccctagttcaagcacttggcctacactagccgtttttttatcatccctttagatcactggattgctacatgtagggcagtgaccaagtcttcatgtccgagaagtaatggcgatccgaatcgattaatacctagctggggatctccaatcacacgacatatgtagcacttaacccttgcatatgtcaactcgccaccgaggttcttaagaccagatcgggttcacgtcagccgagagcacagatacaccaccgtccagcctcttgccacggagggtacacgctactctcgccatctctccactcccattgcatgttgtcctattctggtattagtctgcccgaggcaaagcttacccatgatgaggcatgtgaccagttaaaaggtcctcaatcagcaagcctacatcgacacggtccttaattgactcagacggagacactacaccgagactcccttctcgtgcaactcaaccgcccggtctcagctttattattttcaacccaaagtttggtacctggtagaggtacatcttttccgatgttgaacccatcaaggccctgatggatccaccatcacaagtttttcttttcgaaaacattcccacccactgaagcataacttttgttttaaaacaaaacatttttgtttgctaaagcaaggctaagcatcataaaattattttcaaaaagggtatcaaggaagggtaatcaattttcaaaggaaagaaatgcatcaattgtttagcacacaactcctatcacctaatgcatcaaacaaggtgataaaagattttaaaacag

SEQ ID NO: 37453 - DNA, 368 bp, Zea Mays
gtaccgatcttaatggacgtaatgcggaagccgcacgccttgaggacgacgccgatgctgctggccgtgacgcccttgcccaggccgctcaccaccccgccggtgacaaggacgtacttcatattgccttgaccaggaatctcgggccagaaaaatccgtcgtcgtcgccgccgccgccgccgacactctcttcctcaatcccccgacccgcgcgacagttcttggcgaggaaaccgcccgctcgcacggacacacgagctgaaggtgtcgatgcgcgtgctcgtgcgcgcgggcaagggagagcaagaggggttttaggaggtgagaggggagtggggagggcaacggaggcaaggcggtttggggg

SEQ ID NO: 37454 - DNA, 2670 bp, Zea Mays
ggctccaatgcgagtcgtgaacgcaaacagatagcatcccgcgtcgccgcgatggaactctcgcccttgccgatgctcgctgcctcccgcttcctgtccctgtcgccgctgctggcgccaacatgcccccagcggaccgctccttcagtccgcgtggccacgcagacgctggaagcgccggaggcgcccaaaccgccgcggccgtcccccaggcgcagcgccgtcgctgaggtcaagggggcccttgaccccatcgccgccctcaacaggtttgaggaggtactgcagacacaagactgcaacataattctgcgccactgcggggacattaggcgttgggatgacctctctaaggtctttgagtggatgcaggagcgcgagatgaccaacgctgcatcttatagcagctacttcaagtaccttggactgagccgtgaccctgcgagggtgcttcgagtgtacggtgccatcaaagaccgaacattgagggtccatgtctccgtctgtaattcagttcttgggtgcttggtgaagaatgggaggttggacagcagcttcaagctctatgacgagatgatacgggaaggtctatctcctgatccattcacctacagcaccctgttagcagggtgtatgaagttgaagcaaggttataccaaggcaatgggattgatcaatgagatgaaatctcgtggtcttcagatggatattgtaatatatggcactcttctggcaatatgtgcatctcataactactgtgaggaggctgaagtatactttcagaaaatgaaagatgaaggccatagtcctaatctgttccattacagctccctgttgaatgcatattcagaaaattctgattatggaaaagctgagctattgatgaaagatctgaggtcctctggattaacaccaaataaggttatgttgaccactttgttaaaggtgtattctaaaggtggtctctttgagaaggctaagggactgctaactgaactggaagcctcaggttttgcacaggatgagatgccatactgcatattgattgatggccttgtcaaaggtggaaagatacaggaagcaaatattctatttaacgaaatgaaagaaaaaggagtcaaatctgatggttatgcatttagcatcatgatttcagcattgcacagaggtggtcatcaccaagaatcgaaacagcttgccaaagaattcgagtctgagaatgcatcatatgatctggttatgcttaatacatcactgcgcacttactgcagcacaaatgacatggagagcgtaatgaggatgctaaagaaaatggatgaatcaaacatatcacctgataacattacatttaataccttgataaggtacttctgcaatgcaaaggtttgtcacctagcatacaaaacagttgaagatatgcatgcaaagggtcatcaattaaatgaggagctttgttctcatgtaatggtacagctaggaaaggcaggtttcccttctgaagcattttctgtgtataatatgttgagatatagtaaaagaacagttcacaaatctcttcatgagaaggtcttaggcatcttagttccagcagaacttctcaaagctgcttatatagttgttaaggacaatgctgatctgatatctccttcttctttggagaagtttgctaaatcgttcatggtctcaggcaatataaatctaattaatgatgttatgaaagccctaaaccgctccgggtggcgtatcagccaggacatctttgggagagcaattaagagatacatccaaaagcctgataagaaacagttgctgctgtgcctcttggactggatgattggacaaggctattctgtagactcgtcatcaaggaacttacttttgaagaatgcacaactttttggcgaaaaacaagttatagcagaaatcctttctaagcagcagatagcatcaaggactattggcctaagacacaaaaaatgataaaggaaagattttgtatatgtaaattgttcatatacatccaggatatgcctaggctgattgtttgaggatcaatttattgtgctctgaggggaattttccaatgaggcatgcttgttccagtagcggtacagctgggagtggagtatgaccatgcttgctatgatatgtgtgttagattgtgttgtctgaaggcttacacccagataaaattgtagccatgctgaggcatccaatgtttatctgttatctctattgaaaggcttgaagttatttgtcttcatcgctaaattggtgccaatgttgaggtgaacttggagaaagaatcgtgctttagtctgacaatttatttgctggtggttacataagatgtcctttttagagatgcgtctatggcacgaactggtaaacagtgacatgaacagatagctactgtactatattttagctttgaggcagagcccgattatttttcttatgctaggcgtcaattttgcctttgagatatttcagtttgagcttagctgaacggtggggactctatgattgaacttaaccaccacaagccgcatgatcttttcaataaatattgtcctgagtctacatgttactaggacagcgagaatattcgaacacagaagatcccttcttgtacagtttttgaagaatcttgttgcatgtctaaccttc

SEQ ID NO: 37455 - DNA, 2757 bp, Zea Mays
ggctccaatgcgagtcgtgaacgcaaacagatagcatcccgcgtcgccgcgatggaactctcgcccttgccgatgctcgctgcctcccgcttcctgtccctgtcgccgctgctggcgccaacatgcccccagcggaccgctccttcagtccgcgtggccacgcagacgctggaagcgccggaggcgcccaaaccgccgcggccgtcccccaggcgcagcgccgtcgctgaggtcaagggggcccttgaccccatcgccgccctcaacaggtttgaggaggtactgcagacacaagactgcaacataattctgcgccactgcggggacattaggcgttgggatgacctctctaaggtctttgagtggatgcaggagcgcgagatgaccaacgctgcatcttatagcagctacttcaagtaccttggactgagccgtgaccctgcgagggtgcttcgagtgtacggtgccatcaaagaccgaacattgagggtccatgtctccgtctgtaattcagttcttgggtgcttggtgaagaatgggaggttggacagcagcttcaagctctatgacgagatgatacgggaaggtctatctcctgatccattcacctacagcaccctgttagcagggtgtatgaagttgaagcaaggttataccaaggcaatgggattgatcaatgagatgaaatctcgtggtcttcagatggatattgtaatatatggcactcttctggcaatatgtgcatctcataactactgtgaggaggctgaagtatactttcagaaaatgaaagatgaaggccatagtcctaatctgttccattacagctccctgttgaatgcatattcagaaaattctgattatggaaaagctgagctattgatgaaagatctgaggtcctctggattaacaccaaataaggttatgttgaccactttgttaaaggtgtattctaaaggtggtctctttgagaaggctaagggactgctaactgaactggaagcctcaggttttgcacaggatgagatgccatactgcatattgattgatggccttgtcaaaggtggaaagatacaggaagcaaatattctatttaacgaaatgaaagaaaaaggagtcaaatctgatggttatgcatttagcatcatgatttcagcattgcacagaggtggtcatcaccaagaatcgaaacagcttgccaaagaattcgagtctgagaatgcatcatatgatctggttatgcttaatacatcactgcgcacttactgcagcacaaatgacatggagagcgtaatgaggatgctaaagaaaatggatgaatcaaacatatcacctgataacattacatttaataccttgataaggtacttctgcaatgcaaaggtttgtcacctagcatacaaaacagttgaagatatgcatgcaaagggtcatcaattaaatgaggagctttgttctcatgtaatggtacagctaggaaaggcaggtttcccttctgaagcattttctgtgtataatatgttgagatatagtaaaagaacagttcacaaatctcttcatgagaaggtcttaggcatcttagttccagcagaacttctcaaagctgcttatatagttgttaaggacaatgctgatctgatatctccttcttctttggagaagtttgctaaatcgttcatggtctcaggcaatataaatctaattaatgatgttatgaaagccctaaaccgctccgggtggcgtatcagccaggacatctttgggagagcaattaagagatacatccaaaagcctgataagaaacagttgctgctgtgcctcttggactggatgattggacaaggctattctgtagactcgtcatcaaggaacttacttttgaagaatgcacaactttttggcgaaaaacaagttatagcagaaatcctttctaagcagcagatagcatcaaggactattggcctaagacacaaaaaatgataaaggaaagattttgtatatgtaaattgttcatatacatccaggatatgcctaggctgattgtttgaggatcaatttattgtgctctgaggggtaagttagagacaagatatcagttatcatcctcaagtgcggatatgcctaggctgcaaacaaactttattaggatttcagattatggaattttccaatgaggcatgcttgttccagtagcggtacagctgggagtggagtatgaccatgcttgctatgatatgtgtgttagattgtgttgtctgaaggcttacacccagataaaattgtagccatgctgaggcatccaatgtttatctgttatctctattgaaaggcttgaagttatttgtcttcatcgctaaattggtgccaatgttgaggtgaacttggagaaagaatcgtgctttagtctgacaatttatttgctggtggttacataagatgtcctttttagagatgcgtctatggcacgaactggtaaacagtgacatgaacagatagctactgtactatattttagctttgaggcagagcccgattatttttcttatgctaggcgtcaattttgcctttgagatatttcagtttgagcttagctgaacggtggggactctatgattgaacttaaccaccacaagccgcatgatcttttcaataaatattgtcctgagtctacatgttactaggacagcgagaatattcgaacacagaagatcccttcttgtacagtttttgaagaatcttgttgcatgtctaaccttc

SEQ ID NO: 37456 - DNA, 2578 bp, Zea Mays
ggctccaatgcgagtcgtgaacgcaaacagatagcatcccgcgtcgccgcgatggaactctcgcccttgccgatgctcgctgcctcccgcttcctgtccctgtcgccgctgctggcgccaacatgcccccagcggaccgctccttcagtccgcgtggccacgcagacgctggaagcgccggaggcgcccaaaccgccgcggccgtcccccaggcgcagcgccgtcgctgaggtcaagggggcccttgaccccatcgccgccctcaacaggtttgaggaggtactgcagacacaagactgcaacataattctgcgccactgcggggacattaggcgttgggatgacctctctaaggtctttgagtggatgcaggagcgcgagatgaccaacgctgcatcttatagcagctacttcaagtaccttggactgagccgtgaccctgcgagggtgcttcgagtgtacggtgccatcaaagaccgaacattgagggtccatgtctccgtctgtaattcagttcttgggtgcttggtgaagaatgggaggttggacagcagcttcaagctctatgacgagatgatacgggaaggtctatctcctgatccattcacctacagcaccctgttagcagggtgtatgaagttgaagcaaggttataccaaggcaatgggattgatcaatgagatgaaatctcgtggtcttcagatggatattgtaatatatggcactcttctggcaatatgtgcatctcataactactgtgaggaggctgaagtatactttcagaaaatgaaagatgaaggccatagtcctaatctgttccattacagctccctgttgaatgcatattcagaaaattctgattatggaaaagctgagctattgatgaaagatctgaggtcctctggattaacaccaaataaggttatgttgaccactttgttaaaggtgtattctaaaggtggtctctttgagaaggctaagggactgctaactgaactggaagcctcaggttttgcacaggatgagatgccatactgcatattgattgatggccttgtcaaaggtggaaagatacaggaagcaaatattctatttaacgaaatgaaagaaaaaggagtcaaatctgatggttatgcatttagcatcatgatttcagcattgcacagaggtggtcatcaccaagaatcgaaacagcttgccaaagaattcgagtctgagaatgcatcatatgatctggttatgcttaatacatcactgcgcacttactgcagcacaaatgacatggagagcgtaatgaggatgctaaagaaaatggatgaatcaaacatatcacctgataacattacatttaataccttgataaggtacttctgcaatgcaaaggtttgtcacctagcatacaaaacagttgaagatatgcatgcaaagggtcatcaattaaatgaggagctttgttctcatgtaatggtacagctaggaaaggcaggtttcccttctgaagcattttctgtgtataatatgttgagatatagtaaaagaacagttcacaaatctcttcatgagaaggtcttaggcatcttagttccagcagaacttctcaaagctgcttatatagttgttaaggacaatgctgatctgatatctccttcttctttggagaagtttgctaaatcgttcatggtctcaggcaatataaatctaattaatgatgttatgaaagccctaaaccgctccgggtggcgtatcagccaggacatctttgggagagcaattaagagatacatccaaaagcctgataagaaacagttgctgctgtgcctcttggactggatgattggacaaggctattctgtagactcgtcatcaaggaacttacttttgaagaatgcacaactttttggcgaaaaacaagttatagcagaaatcctttctaagcagcagatagcatcaaggactattggcctaagacacaaaaaatgataaaggaaagattttgtatatgtaaattgttcatatacatccaggatatgcctaggctgattgtttgaggatcaatttattgtgctctgaggggaattttccaatgaggcatgcttgttccagtagcggtacagctgggagtggagtatgaccatgcttgctatgatatgtgtgttagattgtgttgtctgaaggcttacaataaaattgtagccatgctgaggcatccaatgtttatctgttatctctattgaaaggcttgaagttatttgtcttcatcgctaaattggtgccaatgttgaggtgaacttggagaaagaatcgtgctttagtctgacaatttatttgctggtggttacataagatgtcctttttagagatgcgtctatggcacgaactggtaaacagtgacatgaacagatagctactgtactatattttagctttgaggcagagcccgattatttttcttatgctaggcgtcaattttgcctttgagatatttcagtttgagcttagctgaacggtggggactctatgattgaacttaaccaccacaagccgcatgatcttttcaataaatattgtcctgagtcta

SEQ ID NO: 37457 - DNA, 2607 bp, Zea Mays
ggctccaatgcgagtcgtgaacgcaaacagatagcatcccgcgtcgccgcgatggaactctcgcccttgccgatgctcgctgcctcccgcttcctgtccctgtcgccgctgctggcgccaacatgcccccagcggaccgctccttcagtccgcgtggccacgcagacgctggaagcgccggaggcgcccaaaccgccgcggccgtcccccaggcgcagcgccgtcgctgaggtcaagggggcccttgaccccatcgccgccctcaacaggtttgaggaggtactgcagacacaagactgcaacataattctgcgccactgcggggacattaggcgttgggatgacctctctaaggtctttgagtggatgcaggagcgcgagatgaccaacgctgcatcttatagcagctacttcaagtaccttggactgagccgtgaccctgcgagggtgcttcgagtgtacggtgccatcaaagaccgaacattgagggtccatgtctccgtctgtaattcagttcttgggtgcttggtgaagaatgggaggttggacagcagcttcaagctctatgacgagatgatacgggaaggtctatctcctgatccattcacctacagcaccctgttagcagggtgtatgaagttgaagcaaggttataccaaggcaatgggattgatcaatgagatgaaatctcgtggtcttcagatggatattgtaatatatggcactcttctggcaatatgtgcatctcataactactgtgaggaggctgaagtatactttcagaaaatgaaagatgaaggccatagtcctaatctgttccattacagctccctgttgaatgcatattcagaaaattctgattatggaaaagctgagctattgatgaaagatctgaggtcctctggattaacaccaaataaggttatgttgaccactttgttaaaggtgtattctaaaggtggtctctttgagaaggctaagggactgctaactgaactggaagcctcaggttttgcacaggatgagatgccatactgcatattgattgatggccttgtcaaaggtggaaagatacaggaagcaaatattctatttaacgaaatgaaagaaaaaggagtcaaatctgatggttatgcatttagcatcatgatttcagcattgcacagaggtggtcatcaccaagaatcgaaacagcttgccaaagaattcgagtctgagaatgcatcatatgatctggttatgcttaatacatcactgcgcacttactgcagcacaaatgacatggagagcgtaatgaggatgctaaagaaaatggatgaatcaaacatatcacctgataacattacatttaataccttgataaggtacttctgcaatgcaaaggagctttgttctcatgtaatggtacagctaggaaaggcaggtttcccttctgaagcattttctgtgtataatatgttgagatatagtaaaagaacagttcacaaatctcttcatgagaaggtcttaggcatcttagttccagcagaacttctcaaagctgcttatatagttgttaaggacaatgctgatctgatatctccttcttctttggagaagtttgctaaatcgttcatggtctcaggcaatataaatctaattaatgatgttatgaaagccctaaaccgctccgggtggcgtatcagccaggacatctttgggagagcaattaagagatacatccaaaagcctgataagaaacagttgctgctgtgcctcttggactggatgattggacaaggctattctgtagactcgtcatcaaggaacttacttttgaagaatgcacaactttttggcgaaaaacaagttatagcagaaatcctttctaagcagcagatagcatcaaggactattggcctaagacacaaaaaatgataaaggaaagattttgtatatgtaaattgttcatatacatccaggatatgcctaggctgattgtttgaggatcaatttattgtgctctgaggggtaagttagagacaagatatcagttatcatcctcaagtgcggatatgcctaggctgcaaacaaactttattaggatttcagattatggaattttccaatgaggcatgcttgttccagtagcggtacagctgggagtggagtatgaccatgcttgctatgatatgtgtgttagattgtgttgtctgaaggcttacacccagataaaattgtagccatgctgaggcatccaatgtttatctgttatctctattgaaaggcttgaagttatttgtcttcatcgctaaattggtgccaatgttgaggtgaacttggagaaagaatcgtgctttagtctgacaatttatttgctggtggttacataagatgtcctttttagagatgcgtctatggcacgaactggtaaacagtgacatgaacagatagctactgtactatattttagctttgaggcagagcccgattatttttcttatgctaggcgtcaattttgcctttgagatatttcagtttgagcttagctgaacggtggggactctatgattgaacttaaccaccacaagccgcatgatcttttcaataaatattgtcctgagtcta

SEQ ID NO: 37458 - DNA, 2735 bp, Zea Mays
ggctccaatgcgagtcgtgaacgcaaacagatagcatcccgcgtcgccgcgatggaactctcgcccttgccgatgctcgctgcctcccgcttcctgtccctgtcgccgctgctggcgccaacatgcccccagcggaccgctccttcagtccgcgtggccacgcagacgctggaagcgccggaggcgcccaaaccgccgcggccgtcccccaggcgcagcgccgtcgctgaggtcaagggggcccttgaccccatcgccgccctcaacaggtttgaggaggtactgcagacacaagactgcaacataattctgcgccactgcggggacattaggcgttgggatgacctctctaaggtctttgagtggatgcaggagcgcgagatgaccaacgctgcatcttatagcagctacttcaagtaccttggactgagccgtgaccctgcgagggtgcttcgagtgtacggtgccatcaaagaccgaacattgagggtccatgtctccgtctgtaattcagttcttgggtgcttggtgaagaatgggaggttggacagcagcttcaagctctatgacgagatgatacgggaaggtctatctcctgatccattcacctacagcaccctgttagcagggtgtatgaagttgaagcaaggttataccaaggcaatgggattgatcaatgagatgaaatctcgtggtcttcagatggatattgtaatatatggcactcttctggcaatatgtgcatctcataactactgtgaggaggctgaagtatactttcagaaaatgaaagatgaaggccatagtcctaatctgttccattacagctccctgttgaatgcatattcagaaaattctgattatggaaaagctgagctattgatgaaagatctgaggtcctctggattaacaccaaataaggttatgttgaccactttgttaaaggtgtattctaaaggtggtctctttgagaaggctaagggactgctaactgaactggaagcctcaggttttgcacaggatgagatgccatactgcatattgattgatggccttgtcaaaggtggaaagatacaggaagcaaatattctatttaacgaaatgaaagaaaaaggagtcaaatctgatggttatgcatttagcatcatgatttcagcattgcacagaggtggtcatcaccaagaatcgaaacagcttgccaaagaattcgagtctgagaatgcatcatatgatctggttatgcttaatacatcactgcgcacttactgcagcacaaatgacatggagagcgtaatgaggatgctaaagaaaatggatgaatcaaacatatcacctgataacattacatttaataccttgataaggtacttctgcaatgcaaaggtttgtcacctagcatacaaaacagttgaagatatgcatgcaaagggtcatcaattaaatgaggagctttgttctcatgtaatggtacagctaggaaaggcaggtttcccttctgaagcattttctgtgtataatatgttgagatatagtaaaagaacagttcacaaatctcttcatgagaaggtcttaggcatcttagttccagcagaacttctcaaagctgcttatatagttgttaaggacaatgctgatctgatatctccttcttctttggagaagtttgctaaatcgttcatggtctcaggcaatataaatctaattaatgatgttatgaaagccctaaaccgctccgggtggcgtatcagccaggacatctttgggagagcaattaagagatacatccaaaagcctgataagaaacagttgctgctgtgcctcttggactggatgattggacaaggctattctgtagactcgtcatcaaggaacttacttttgaagaatgcacaactttttggcgaaaaacaagttatagcagaaatcctttctaagcagcagatagcatcaaggactattggcctaagacacaaaaaatgataaaggaaagattttgtatatgtaaattgttcatatacatccaggatatgcctaggctgattgtttgaggatcaatttattgtgctctgaggggaattttccaatgaggcatgcttgttccagtagcggtacagctgggagtggagtatgaccatgcttgctatgatatgtgtgttagattgtgttgtctgaaggcttacagtaagtttttgatacatatggacatacccatacagctaaagcaaagacaatttgatttgattttagaggattttgcatgtaattcaacatggttgaggtcactgtacctagaaagcagcatacagatctaattttgttgacaatcgtacaagcccagataaaattgtagccatgctgaggcatccaatgtttatctgttatctctattgaaaggcttgaagttatttgtcttcatcgctaaattggtgccaatgttgaggtgaacttggagaaagaatcgtgctttagtctgacaatttatttgctggtggttacataagatgtcctttttagagatgcgtctatggcacgaactggtaaacagtgacatgaacagatagctactgtactatattttagctttgaggcagagcccgattatttttcttatgctaggcgtcaattttgcctttgagatatttcagtttgagcttagctgaacggtggggactctatgattgaacttaaccaccacaagccgcatgatcttttcaataaatattgtcctgagtcta

SEQ ID NO: 37459 - DNA, 2544 bp, Zea Mays
ggctccaatgcgagtcgtgaacgcaaacagatagcatcccgcgtcgccgcgatggaactctcgcccttgccgatgctcgctgcctcccgcttcctgtccctgtcgccgctgctggcgccaacatgcccccagcggaccgctccttcagtccgcgtggccacgcagacgctggaagcgccggaggcgcccaaaccgccgcggccgtcccccaggcgcagcgccgtcgctgaggtcaagggggcccttgaccccatcgccgccctcaacaggtttgaggaggtactgcagacacaagactgcaacataattctgcgccactgcggggacattaggcgttgggatgacctctctaaggtctttgagtggatgcaggagcgcgagatgaccaacgctgcatcttatagcagctacttcaagtaccttggactgagccgtgaccctgcgagggtgcttcgagtgtacggtgccatcaaagaccgaacattgagggtccatgtctccgtctgtaattcagttcttgggtgcttggtgaagaatgggaggttggacagcagcttcaagctctatgacgagatgatacgggaaggtctatctcctgatccattcacctacagcaccctgttagcagggtgtatgaagttgaagcaaggttataccaaggcaatgggattgatcaatgagatgaaatctcgtggtcttcagatggatattgtaatatatggcactcttctggcaatatgtgcatctcataactactgtgaggaggctgaagtatactttcagaaaatgaaagatgaaggccatagtcctaatctgttccattacagctccctgttgaatgcatattcagaaaattctgattatggaaaagctgagctattgatgaaagatctgaggtcctctggattaacaccaaataaggttatgttgaccactttgttaaaggtgtattctaaaggtggtctctttgagaaggctaagggactgctaactgaactggaagcctcaggttttgcacaggatgagatgccatactgcatattgattgatggccttgtcaaaggtggaaagatacaggaagcaaatattctatttaacgaaatgaaagaaaaaggagtcaaatctgatggttatgcatttagcatcatgatttcagcattgcacagaggtggtcatcaccaagaatcgaaacagcttgccaaagaattcgagtctgagaatgcatcatatgatctggttatgcttaatacatcactgcgcacttactgcagcacaaatgacatggagagcgtaatgaggatgctaaagaaaatggatgaatcaaacatatcacctgataacattacatttaataccttgataaggtacttctgcaatgcaaaggtttgtcacctagcatacaaaacagttgaagatatgcatgcaaagggtcatcaattaaatgaggagctttgttctcatgtaatggtacagctaggaaaggcaggtttcccttctgaagcattttctgtgtataatatgttgagatatagtaaaagaacagttcacaaatctcttcatgagaaggtcttaggcatcttagttccagcagaacttctcaaagctgcttatatagttgttaagtttgctaaatcgttcatggtctcaggcaatataaatctaattaatgatgttatgaaagccctaaaccgctccgggtggcgtatcagccaggacatctttgggagagcaattaagagatacatccaaaagcctgataagaaacagttgctgctgtgcctcttggactggatgattggacaaggctattctgtagactcgtcatcaaggaacttacttttgaagaatgcacaactttttggcgaaaaacaagttatagcagaaatcctttctaagcagcagatagcatcaaggactattggcctaagacacaaaaaatgataaaggaaagattttgtatatgtaaattgttcatatacatccaggatatgcctaggctgattgtttgaggatcaatttattgtgctctgaggggaattttccaatgaggcatgcttgttccagtagcggtacagctgggagtggagtatgaccatgcttgctatgatatgtgtgttagattgtgttgtctgaaggcttacacccagataaaattgtagccatgctgaggcatccaatgtttatctgttatctctattgaaaggcttgaagttatttgtcttcatcgctaaattggtgccaatgttgaggtgaacttggagaaagaatcgtgctttagtctgacaatttatttgctggtggttacataagatgtcctttttagagatgcgtctatggcacgaactggtaaacagtgacatgaacagatagctactgtactatattttagctttgaggcagagcccgattatttttcttatgctaggcgtcaattttgcctttgagatatttcagtttgagcttagctgaacggtggggactctatgattgaacttaaccaccacaagccgcatgatcttttcaataaatattgtcctgagtcta

SEQ ID NO: 37460 - DNA, 2966 bp, Zea Mays
ggctccaatgcgagtcgtgaacgcaaacagatagcatcccgcgtcgccgcgatggaactctcgcccttgccgatgctcgctgcctcccgcttcctgtccctgtcgccgctgctggcgccaacatgcccccagcggaccgctccttcagtccgcgtggccacgcagacgctggaagcgccggaggcgcccaaaccgccgcggccgtcccccaggcgcagcgccgtcgctgaggtcaagggggcccttgaccccatcgccgccctcaacaggtttgaggaggtactgcagacacaagactgcaacataattctgcgccactgcggggacattaggcgttgggatgacctctctaaggtctttgagtggatgcaggagcgcgagatgaccaacgctgcatcttatagcagctacttcaagtaccttggactgagccgtgaccctgcgagggtgcttcgagtgtacggtgccatcaaagaccgaacattgagggtccatgtctccgtctgtaattcagttcttgggtgcttggtgaagaatgggaggttggacagcagcttcaagctctatgacgagatgatacgggaaggtctatctcctgatccattcacctacagcaccctgttagcagggtgtatgaagttgaagcaaggttataccaaggcaatgggattgatcaatgagatgaaatctcgtggtcttcagatggatattgtaatatatggcactcttctggcaatatgtgcatctcataactactgtgaggaggctgaagtatactttcagaaaatgaaagatgaaggccatagtcctaatctgttccattacagctccctgttgaatgcatattcagaaaattctgattatggaaaagctgagctattgatgaaagatctgaggtcctctggattaacaccaaataaggttatgttgaccactttgttaaaggtgtattctaaaggtggtctctttgagaaggctaagggactgctaactgaactggaagcctcaggttttgcacaggatgagatgccatactgcatattgattgatggccttgtcaaaggtggaaagatacaggaagcaaatattctatttaacgaaatgaaagaaaaaggagtcaaatctgatggttatgcatttagcatcatgatttcagcattgcacagaggtggtcatcaccaagaatcgaaacagcttgccaaagaattcgagtctgagaatgcatcatatgatctggttatgcttaatacatcactgcgcacttactgcagcacaaatgacatggagagcgtaatgaggatgctaaagaaaatggatgaatcaaacatatcacctgataacattacatttaataccttgataaggtacttctgcaatgcaaaggtttgtcacctagcatacaaaacagttgaagatatgcatgcaaagggtcatcaattaaatgaggagctttgttctcatgtaatggtacagctaggaaaggcaggtttcccttctgaagcattttctgtgtataatatgttgagatatagtaaaagaacagttcacaaatctcttcatgagaaggtcttaggcatcttagttccagcagaacttctcaaagctgcttatatagttgttaaggacaatgctgatctgatatctccttcttctttggagaagtttgctaaatcgttcatggtctcaggcaatataaatctaattaatgatgttatgaaagccctaaaccgctccgggtggcgtatcagccaggacatctttgggagagcaattaagagatacatccaaaagcctgataagaaacagttgctgctgtgcctcttggactggatgattggacaaggctattctgtagactcgtcatcaaggaacttacttttgaagaatgcacaactttttggcgaaaaacaagttatagcagaaatcctttctaagcagcagatagcatcaaggactattggcctaagacacaaaaaatgataaaggaaagattttgtatatgtaaattgttcatatacatccaggatatgcctaggctgattgtttgaggatcaatttattgtgctctgaggggaattttccaatgaggcatgcttgttccagtagcggtacagctgggagtggagtatgaccatgcttgctatgatatgtgtgttagattgtgttgtctgaaggcttacagtaagtttttgatacatatggacatacccatacagctaaagcaaagacaatttgatttgattttagaggattttgcatgtaattcaacatggttgaggtcactgtacctagaaagcagcatacagatctaattttgttgacaatcgtacaaggtattattacttaattactttggtgaaaagaggttgctttgaagatttgacttcacgttgtacatacaggcagagtatcagacaggtggatttttcctaaaaagtggggaatatgtttctaacctgttttgttctttaggaaactggattgcacactattgtgcctttatgcaaaccaagttatgtatcatttttaggtgatgaattgtatctttttttagaagatgaacacccagataaaattgtagccatgctgaggcatccaatgtttatctgttatctctattgaaaggcttgaagttatttgtcttcatcgctaaattggtgccaatgttgaggtgaacttggagaaagaatcgtgctttagtctgacaatttatttgctggtggttacataagatgtcctttttagagatgcgtctatggcacgaactggtaaacagtgacatgaacagatagctactgtactatattttagctttgaggcagagcccgattatttttcttatgctaggcgtcaattttgcctttgagatatttcagtttgagcttagctgaacggtggggactctatgattgaacttaaccaccacaagccgcatgatcttttcaataaatattgtcctgagtcta

SEQ ID NO: 37461 - DNA, 3158 bp, Zea Mays
ggctccaatgcgagtcgtgaacgcaaacagatagcatcccgcgtcgccgcgatggaactctcgcccttgccgatgctcgctgcctcccgcttcctgtccctgtcgccgctgctggcgccaacatgcccccagcggaccgctccttcagtccgcgtggccacgcagacgctggaagcgccggaggcgcccaaaccgccgcggccgtcccccaggcgcagcgccgtcgctgaggtcaagggggcccttgaccccatcgccgccctcaacaggtttgaggaggtactgcagacacaagactgcaacataattctgcgccactgcggggacattaggcgttgggatgacctctctaaggtctttgagtggatgcaggagcgcgagatgaccaacgctgcatcttatagcagctacttcaagtaccttggactgagccgtgaccctgcgagggtgcttcgagtgtacggtgccatcaaagaccgaacattgagggtccatgtctccgtctgtaattcagttcttgggtgcttggtgaagaatgggaggttggacagcagcttcaagctctatgacgagatgatacgggaaggtctatctcctgatccattcacctacagcaccctgttagcagggtgtatgaagttgaagcaaggttataccaaggcaatgggattgatcaatgagatgaaatctcgtggtcttcagatggatattgtaatatatggcactcttctggcaatatgtgcatctcataactactgtgaggaggctgaagtatactttcagaaaatgaaagatgaaggccatagtcctaatctgttccattacagctccctgttgaatgcatattcagaaaattctgattatggaaaagctgagctattgatgaaagatctgaggtcctctggattaacaccaaataaggttatgttgaccactttgttaaaggtgtattctaaaggtggtctctttgagaaggctaagggactgctaactgaactggaagcctcaggttttgcacaggatgagatgccatactgcatattgattgatggccttgtcaaaggtggaaagatacaggaagcaaatattctatttaacgaaatgaaagaaaaaggagtcaaatctgatggttatgcatttagcatcatgatttcagcattgcacagaggtggtcatcaccaagaatcgaaacagcttgccaaagaattcgagtctgagaatgcatcatatgatctggttatgcttaatacatcactgcgcacttactgcagcacaaatgacatggagagcgtaatgaggatgctaaagaaaatggatgaatcaaacatatcacctgataacattacatttaataccttgataaggtacttctgcaatgcaaaggtttgtcacctagcatacaaaacagttgaagatatgcatgcaaagggtcatcaattaaatgaggagctttgttctcatgtaatggtacagctaggaaaggcaggtttcccttctgaagcattttctgtgtataatatgttgagatatagtaaaagaacagttcacaaatctcttcatgagaaggtcttaggcatcttagttccagcagaacttctcaaagctgcttatatagttgttaaggacaatgctgatctgatatctccttcttctttggagaagtttgctaaatcgttcatggtctcaggcaatataaatctaattaatgatgttatgaaagccctaaaccgctccgggtggcgtatcagccaggacatctttgggagagcaattaagagatacatccaaaagcctgataagaaacagttgctgctgtgcctcttggactggatgattggacaaggctattctgtagactcgtcatcaaggaacttacttttgaagaatgcacaactttttggcgaaaaacaagttatagcagaaatcctttctaagcagcagatagcatcaaggactattggcctaagacacaaaaaatgataaaggaaagattttgtatatgtaaattgttcatatacatccaggatatgcctaggctgattgtttgaggatcaatttattgtgctctgaggggtaagttagagacaagatatcagttatcatcctcaagtgcggatatgcctaggctgcaaacaaactttattaggatttcagattatggaattttccaatgaggcatgcttgttccagtagcggtacagctgggagtggagtatgaccatgcttgctatgatatgtgtgttagattgtgttgtctgaaggcttacagtaagtttttgatacatatggacatacccatacagctaaagcaaagacaatttgatttgattttagaggattttgcatgtaattcaacatggttgaggtcactgtacctagaaagcagcatacagatctaattttgttgacaatcgtacaaggtattattacttaattactttggtgaaaagaggttgctttgaagatttgacttcacgttgtacatacaggcagagtatcagacaggtggatttttcctaaaaagtggggaatatgtttctaacctgttttgttctttaggaaactggattgcacactattgtgcctttatgcaaaccaagttatgtatcatttttaggtgatgaattgtatctttttttagaagatgaacagttatgtatcctttttagtggatggattgttattatatccctgttattgtaggattgtgatttgaaactaggaacttatacctctgaaatccttttgttttgcagcccagataaaattgtagccatgctgaggcatccaatgtttatctgttatctctattgaaaggcttgaagttatttgtcttcatcgctaaattggtgccaatgttgaggtgaacttggagaaagaatcgtgctttagtctgacaatttatttgctggtggttacataagatgtcctttttagagatgcgtctatggcacgaactggtaaacagtgacatgaacagatagctactgtactatattttagctttgaggcagagcccgattatttttcttatgctaggcgtcaattttgcctttgagatatttcagtttgagcttagctgaacggtggggactctatgattgaacttaaccaccacaagccgcatgatcttttcaataaatattgtcctgagtcta

SEQ ID NO: 37462 - DNA, 2780 bp, Zea Mays
ggctccaatgcgagtcgtgaacgcaaacagatagcatcccgcgtcgccgcgatggaactctcgcccttgccgatgctcgctgcctcccgcttcctgtccctgtcgccgctgctggcgccaacatgcccccagcggaccgctccttcagtccgcgtggccacgcagacgctggaagcgccggaggcgcccaaaccgccgcggccgtcccccaggcgcagcgccgtcgctgaggtcaagggggcccttgaccccatcgccgccctcaacaggtttgaggaggtactgcagacacaagactgcaacataattctgcgccactgcggggacattaggcgttgggatgacctctctaaggtctttgagtggatgcaggagcgcgagatgaccaacgctgcatcttatagcagctacttcaagtaccttggactgagccgtgaccctgcgagggtgcttcgagtgtacggtgccatcaaagaccgaacattgagggtccatgtctccgtctgtaattcagttcttgggtgcttggtgaagaatgggaggttggacagcagcttcaagctctatgacgagatgatacgggaaggtctatctcctgatccattcacctacagcaccctgttagcagggtgtatgaagttgaagcaaggttataccaaggcaatgggattgatcaatgagatgaaatctcgtggtcttcagatggatattgtaatatatggcactcttctggcaatatgtgcatctcataactactgtgaggaggctgaagtatactttcagaaaatgaaagatgaaggccatagtcctaatctgttccattacagctccctgttgaatgcatattcagaaaattctgattatggaaaagctgagctattgatgaaagatctgaggtcctctggattaacaccaaataaggttatgttgaccactttgttaaaggtgtattctaaaggtggtctctttgagaaggctaagggactgctaactgaactggaagcctcaggttttgcacaggatgagatgccatactgcatattgattgatggccttgtcaaaggtggaaagatacaggaagcaaatattctatttaacgaaatgaaagaaaaaggagtcaaatctgatggttatgcatttagcatcatgatttcagcattgcacagaggtggtcatcaccaagaatcgaaacagcttgccaaagaattcgagtctgagaatgcatcatatgatctggttatgcttaatacatcactgcgcacttactgcagcacaaatgacatggagagcgtaatgaggatgctaaagaaaatggatgaatcaaacatatcacctgataacattacatttaataccttgataaggtacttctgcaatgcaaaggtttgtcacctagcatacaaaacagttgaagatatgcatgcaaagggtcatcaattaaatgaggagctttgttctcatgtaatggtacagctaggaaaggcaggtttcccttctgaagcattttctgtgtataatatgttgagatatagtaaaagaacagttcacaaatctcttcatgagaaggtcttaggcatcttagttccagcagaacttctcaaagctgcttatatagttgttaaggacaatgctgatctgatatctccttcttctttggagaagtttgctaaatcgttcatggtctcaggcaatataaatctaattaatgatgttatgaaagccctaaaccgctccgggtggcgtatcagccaggacatctttgggagagcaattaagagatacatccaaaagcctgataagaaacagttgctgctgtgcctcttggactggatgattggacaaggctattctgtagactcgtcatcaaggaacttacttttgaagaatgcacaactttttggcgaaaaacaagttatagcagaaatcctttctaagcagcagatagcatcaaggactattggcctaagacacaaaaaatgataaaggaaagattttgtatatgtaaattgttcatatacatccaggatatgcctaggctgattgtttgaggatcaatttattgtgctctgaggggaattttccaatgaggcatgcttgttccagtagcggtacagctgggagtggagtatgaccatgcttgctatgatatgtgtgttagattgtgttgtctgaaggcttacagaaactggattgcacactattgtgcctttatgcaaaccaagttatgtatcatttttaggtgatgaattgtatctttttttagaagatgaacagttatgtatcctttttagtggatggattgttattatatccctgttattgtaggattgtgatttgaaactaggaacttatacctctgaaatccttttgttttgcagcccagataaaattgtagccatgctgaggcatccaatgtttatctgttatctctattgaaaggcttgaagttatttgtcttcatcgctaaattggtgccaatgttgaggtgaacttggagaaagaatcgtgctttagtctgacaatttatttgctggtggttacataagatgtcctttttagagatgcgtctatggcacgaactggtaaacagtgacatgaacagatagctactgtactatattttagctttgaggcagagcccgattatttttcttatgctaggcgtcaattttgcctttgagatatttcagtttgagcttagctgaacggtggggactctatgattgaacttaaccaccacaagccgcatgatcttttcaataaatattgtcctgagtcta

SEQ ID NO: 37463 - DNA, 2570 bp, Zea Mays
ggctccaatgcgagtcgtgaacgcaaacagatagcatcccgcgtcgccgcgatggaactctcgcccttgccgatgctcgctgcctcccgcttcctgtccctgtcgccgctgctggcgccaacatgcccccagcggaccgctccttcagtccgcgtggccacgcagacgctggaagcgccggaggcgcccaaaccgccgcggccgtcccccaggcgcagcgccgtcgctgaggtcaagggggcccttgaccccatcgccgccctcaacaggtttgaggaggtactgcagacacaagactgcaacataattctgcgccactgcggggacattaggcgttgggatgacctctctaaggtctttgagtggatgcaggagcgcgagatgaccaacgctgcatcttatagcagctacttcaagtaccttggactgagccgtgaccctgcgagggtgcttcgagtgtacggtgccatcaaagaccgaacattgagggtccatgtctccgtctgtaattcagttcttgggtgcttggtgaagaatgggaggttggacagcagcttcaagctctatgacgagatgatacgggaaggtctatctcctgatccattcacctacagcaccctgttagcagggtgtatgaagttgaagcaaggttataccaaggcaatgggattgatcaatgagatgaaatctcgtggtcttcagatggatattgtaatatatggcactcttctggcaatatgtgcatctcataactactgtgaggaggctgaagtatactttcagaaaatgaaagatgaaggccatagtcctaatctgttccattacagctccctgttgaatgcatattcagaaaattctgattatggaaaagctgagctattgatgaaagatctgaggtcctctggattaacaccaaataaggttatgttgaccactttgttaaaggtgtattctaaaggtggtctctttgagaaggctaagggactgctaactgaactggaagcctcaggttttgcacaggatgagatggttatgcatttagcatcatgatttcagcattgcacagaggtggtcatcaccaagaatcgaaacagcttgccaaagaattcgagtctgagaatgcatcatatgatctggttatgcttaatacatcactgcgcacttactgcagcacaaatgacatggagagcgtaatgaggatgctaaagaaaatggatgaatcaaacatatcacctgataacattacatttaataccttgataaggtacttctgcaatgcaaaggtttgtcacctagcatacaaaacagttgaagatatgcatgcaaagggtcatcaattaaatgaggagctttgttctcatgtaatggtacagctaggaaaggcaggtttcccttctgaagcattttctgtgtataatatgttgagatatagtaaaagaacagttcacaaatctcttcatgagaaggtcttaggcatcttagttccagcagaacttctcaaagctgcttatatagttgttaaggacaatgctgatctgatatctccttcttctttggagaagtttgctaaatcgttcatggtctcaggcaatataaatctaattaatgatgttatgaaagccctaaaccgctccgggtggcgtatcagccaggacatctttgggagagcaattaagagatacatccaaaagcctgataagaaacagttgctgctgtgcctcttggactggatgattggacaaggctattctgtagactcgtcatcaaggaacttacttttgaagaatgcacaactttttggcgaaaaacaagttatagcagaaatcctttctaagcagcagatagcatcaaggactattggcctaagacacaaaaaatgataaaggaaagattttgtatatgtaaattgttcatatacatccaggatatgcctaggctgattgtttgaggatcaatttattgtgctctgaggggtaagttagagacaagatatcagttatcatcctcaagtgcggatatgcctaggctgcaaacaaactttattaggatttcagattatggaattttccaatgaggcatgcttgttccagtagcggtacagctgggagtggagtatgaccatgcttgctatgatatgtgtgttagattgtgttgtctgaaggcttacacccagataaaattgtagccatgctgaggcatccaatgtttatctgttatctctattgaaaggcttgaagttatttgtcttcatcgctaaattggtgccaatgttgaggtgaacttggagaaagaatcgtgctttagtctgacaatttatttgctggtggttacataagatgtcctttttagagatgcgtctatggcacgaactggtaaacagtgacatgaacagatagctactgtactatattttagctttgaggcagagcccgattatttttcttatgctaggcgtcaattttgcctttgagatatttcagtttgagcttagctgaacggtggggactctatgattgaacttaaccaccacaagccgcatgatcttttcaataaatattgtcctgagtcta

SEQ ID NO: 37464 - DNA, 3013 bp, Zea Mays
ggctccaatgcgagtcgtgaacgcaaacagatagcatcccgcgtcgccgcgatggaactctcgcccttgccgatgctcgctgcctcccgcttcctgtccctgtcgccgctgctggcgccaacatgcccccagcggaccgctccttcagtccgcgtggccacgcagacgctggaagcgccggaggcgcccaaaccgccgcggccgtcccccaggcgcagcgccgtcgctgaggtcaagggggcccttgaccccatcgccgccctcaacaggtttgaggaggtactgcagacacaagactgcaacataattctgcgccactgcggggacattaggcgttgggatgacctctctaaggtctttgagtggatgcaggagcgcgagatgaccaacgctgcatcttatagcagctacttcaagtaccttggactgagccgtgaccctgcgagggtgcttcgagtgtacggtgccatcaaagaccgaacattgagggtccatgtctccgtctgtaattcagttcttgggtgcttggtgaagaatgggaggttggacagcagcttcaagctctatgacgagatgatacgggaaggtctatctcctgatccattcacctacagcaccctgttagcagggtgtatgaagttgaagcaaggttataccaaggcaatgggattgatcaatgagatgaaatctcgtggtcttcagatggatattgtaatatatggcactcttctggcaatatgtgcatctcataactactgtgaggaggctgaagtatactttcagaaaatgaaagatgaaggccatagtcctaatctgttccattacagctccctgttgaatgcatattcagaaaattctgattatggaaaagctgagctattgatgaaagatctgaggtcctctggattaacaccaaataaggttatgttgaccactttgttaaaggtgtattctaaaggtggtctctttgagaaggctaagggactgctaactgaactggaagcctcaggttttgcacaggatgagatgccatactgcatattgattgatggccttgtcaaaggtggaaagatacaggaagcaaatattctatttaacgaaatgaaagaaaaaggagtcaaatctgcacaaatgacatggagagcgtaatgaggatgctaaagaaaatggatgaatcaaacatatcacctgataacattacatttaataccttgataaggtacttctgcaatgcaaaggtttgtcacctagcatacaaaacagttgaagatatgcatgcaaagggtcatcaattaaatgaggagctttgttctcatgtaatggtacagctaggaaaggcaggtttcccttctgaagcattttctgtgtataatatgttgagatatagtaaaagaacagttcacaaatctcttcatgagaaggtcttaggcatcttagttccagcagaacttctcaaagctgcttatatagttgttaaggacaatgctgatctgatatctccttcttctttggagaagtttgctaaatcgttcatggtctcaggcaatataaatctaattaatgatgttatgaaagccctaaaccgctccgggtggcgtatcagccaggacatctttgggagagcaattaagagatacatccaaaagcctgataagaaacagttgctgctgtgcctcttggactggatgattggacaaggctattctgtagactcgtcatcaaggaacttacttttgaagaatgcacaactttttggcgaaaaacaagttatagcagaaatcctttctaagcagcagatagcatcaaggactattggcctaagacacaaaaaatgataaaggaaagattttgtatatgtaaattgttcatatacatccaggatatgcctaggctgattgtttgaggatcaatttattgtgctctgaggggtaagttagagacaagatatcagttatcatcctcaagtgcggatatgcctaggctgcaaacaaactttattaggatttcagattatggaattttccaatgaggcatgcttgttccagtagcggtacagctgggagtggagtatgaccatgcttgctatgatatgtgtgttagattgtgttgtctgaaggcttacagtaagtttttgatacatatggacatacccatacagctaaagcaaagacaatttgatttgattttagaggattttgcatgtaattcaacatggttgaggtcactgtacctagaaagcagcatacagatctaattttgttgacaatcgtacaaggtattattacttaattactttggtgaaaagaggttgctttgaagatttgacttcacgttgtacatacaggcagagtatcagacaggtggatttttcctaaaaagtggggaatatgtttctaacctgttttgttctttaggaaactggattgcacactattgtgcctttatgcaaaccaagttatgtatcatttttaggtgatgaattgtatctttttttagaagatgaacagttatgtatcctttttagtggatggattgttattatatccctgttattgtaggattgtgatttgaaactaggaacttatacctctgaaatccttttgttttgcagcccagataaaattgtagccatgctgaggcatccaatgtttatctgttatctctattgaaaggcttgaagttatttgtcttcatcgctaaattggtgccaatgttgaggtgaacttggagaaagaatcgtgctttagtctgacaatttatttgctggtggttacataagatgtcctttttagagatgcgtctatggcacgaactggtaaacagtgacatgaacagatagctactgtactatattttagctttgaggcagagcccgattatttttcttatgctaggcgtcaattttgcctttgagatatttcagtttgagcttagctgaacggtggggactctatgattgaacttaaccaccacaagccgcatgatcttttcaataaatattgtcctgagtcta

SEQ ID NO: 37465 - DNA, 2932 bp, Zea Mays
ggctccaatgcgagtcgtgaacgcaaacagatagcatcccgcgtcgccgcgatggaactctcgcccttgccgatgctcgctgcctcccgcttcctgtccctgtcgccgctgctggcgccaacatgcccccagcggaccgctccttcagtccgcgtggccacgcagacgctggaagcgccggaggcgcccaaaccgccgcggccgtcccccaggcgcagcgccgtcgctgaggtcaagggggcccttgaccccatcgccgccctcaacaggtttgaggaggtactgcagacacaagactgcaacataattctgcgccactgcggggacattaggcgttgggatgacctctctaaggtctttgagtggatgcaggagcgcgagatgaccaacgctgcatcttatagcagctacttcaagtaccttggactgagccgtgaccctgcgagggtgcttcgagtgtacggtgccatcaaagaccgaacattgagggtccatgtctccgtctgtaattcagttcttgggtgcttggtgaagaatgggaggttggacagcagcttcaagctctatgacgagatgatacgggaaggtctatctcctgatccattcacctacagcaccctgttagcagggtgtatgaagttgaagcaaggttataccaaggcaatgggattgatcaatgagatgaaatctcgtggtcttcagatggatattgtaatatatggcactcttctggcaatatgtgcatctcataactactgtgaggaggctgaagtatactttcagaaaatgaaagatgaaggccatagtcctaatctgttccattacagctccctgttgaatgcatattcagaaaattctgattatggaaaagctgagctattgatgaaagatctgaggtcctctggattaacaccaaataaggttatgttgaccactttgttaaaggtgtattctaaaggtggtctctttgagaaggctaagggactgctaactgaactggaagcctcaggttttgcacaggatgagatgccatactgcatattgattgatggccttgtcaaaggtggaaagatacaggaagcaaatattctatttaacgaaatgaaagaaaaaggagtcaaatctgatggttatgcatttagcatcatgatttcagcattgcacagaggtggtcatcaccaagaatcgaaacagcttgccaaagaattcgagtctgagaatgcatcatatgatctggttatgcttaatacatcactgcgcacttactgcagcacaaatgacatggagagcgtaatgaggatgctaaagaaaatggatgaatcaaacatatcacctgataacattacatttaataccttgataaggtacttctgcaatgcaaaggtttgtcacctagcatacaaaacagttgaagatatgcatgcaaagggtcatcaattaaatgaggagctttgttctcatgtaatggtacagctaggaaaggcaggtttcccttctgaagcattttctgtgtataatatgttgagatatagtaaaagaacagttcacaaatctcttcatgagaaggtcttaggcatcttagttccagcagaacttctcaaagctgcttatatagttgttaaggacaatgctgatctgatatctccttcttctttggagaagtttgctaaatcgttcatggtctcaggcaatataaatctaattaatgatgttatgaaagccctaaaccgctccgggtggcgtatcagccaggacatctttgggagagcaattaagagatacatccaaaagcctgataagaaacagttgctgctgtgcctcttggactggatgattggacaaggctattctgtagactcgtcatcaaggaacttacttttgaagaatgcacaactttttggcgaaaaacaagttatagcagaaatcctttctaagcagcagatagcatcaaggactattggcctaagacacaaaaaatgataaaggaaagattttgtatatgtaaattgttcatatacatccaggatatgcctaggctgattgtttgaggatcaatttattgtgctctgaggggaattttccaatgaggcatgcttgttccagtagcggtacagctgggagtggagtatgaccatgcttgctatgatatgtgtgttagattgtgttgtctgaaggcttacagtaagtttttgatacatatggacatacccatacagctaaagcaaagacaatttgatttgattttagaggattttgcatgtaattcaacatggttgaggtcactgtacctagaaagcagcatacagatctaattttgttgacaatcgtacaaggtattattacttaattactttggtgaaaagaggttgctttgaagatttgacttcacgttgtacatacaggcagagtatcagacaggtggatttttcctaaaaagtggggaatatgtttctaacctgttttgttctttaggaaactggattgcacactattgtgcctttatgcaaaccaagttatgtatcatttttagcccagataaaattgtagccatgctgaggcatccaatgtttatctgttatctctattgaaaggcttgaagttatttgtcttcatcgctaaattggtgccaatgttgaggtgaacttggagaaagaatcgtgctttagtctgacaatttatttgctggtggttacataagatgtcctttttagagatgcgtctatggcacgaactggtaaacagtgacatgaacagatagctactgtactatattttagctttgaggcagagcccgattatttttcttatgctaggcgtcaattttgcctttgagatatttcagtttgagcttagctgaacggtggggactctatgattgaacttaaccaccacaagccgcatgatcttttcaataaatattgtcctgagtcta

SEQ ID NO: 37466 - DNA, 3053 bp, Zea Mays
ggctccaatgcgagtcgtgaacgcaaacagatagcatcccgcgtcgccgcgatggaactctcgcccttgccgatgctcgctgcctcccgcttcctgtccctgtcgccgctgctggcgccaacatgcccccagcggaccgctccttcagtccgcgtggccacgcagacgctggaagcgccggaggcgcccaaaccgccgcggccgtcccccaggcgcagcgccgtcgctgaggtcaagggggcccttgaccccatcgccgccctcaacaggtttgaggaggtactgcagacacaagactgcaacataattctgcgccactgcggggacattaggcgttgggatgacctctctaaggagcgcgagatgaccaacgctgcatcttatagcagctacttcaagtaccttggactgagccgtgaccctgcgagggtgcttcgagtgtacggtgccatcaaagaccgaacattgagggtccatgtctccgtctgtaattcagttcttgggtgcttggtgaagaatgggaggttggacagcagcttcaagctctatgacgagatgatacgggaaggtctatctcctgatccattcacctacagcaccctgttagcagggtgtatgaagttgaagcaaggttataccaaggcaatgggattgatcaatgagatgaaatctcgtggtcttcagatggatattgtaatatatggcactcttctggcaatatgtgcatctcataactactgtgaggaggctgaagtatactttcagaaaatgaaagatgaaggccatagtcctaatctgttccattacagctccctgttgaatgcatattcagaaaattctgattatggaaaagctgagctattgatgaaagatctgaggtcctctggattaacaccaaataaggttatgttgaccactttgttaaaggtgtattctaaaggtggtctctttgagaaggctaagggactgctaactgaactggaagcctcaggttttgcacaggatgagatgccatactgcatattgattgatggccttgtcaaaggtggaaagatacaggaagcaaatattctatttaacgaaatgaaagaaaaaggagtcaaatctgatggttatgcatttagcatcatgatttcagcattgcacagaggtggtcatcaccaagaatcgaaacagcttgccaaagaattcgagtctgagaatgcatcatatgatctggttatgcttaatacatcactgcgcacttactgcagcacaaatgacatggagagcgtaatgaggatgctaaagaaaatggatgaatcaaacatatcacctgataacattacatttaataccttgataaggtacttctgcaatgcaaaggtttgtcacctagcatacaaaacagttgaagatatgcatgcaaagggtcatcaattaaatgaggagctttgttctcatgtaatggtacagctaggaaaggcaggtttcccttctgaagcattttctgtgtataatatgttgagatatagtaaaagaacagttcacaaatctcttcatgagaaggtcttaggcatcttagttccagcagaacttctcaaagctgcttatatagttgttaaggacaatgctgatctgatatctccttcttctttggagaagtttgctaaatcgttcatggtctcaggcaatataaatctaattaatgatgttatgaaagccctaaaccgctccgggtggcgtatcagccaggacatctttgggagagcaattaagagatacatccaaaagcctgataagaaacagttgctgctgtgcctcttggactggatgattggacaaggctattctgtagactcgtcatcaaggaacttacttttgaagaatgcacaactttttggcgaaaaacaagttatagcagaaatcctttctaagcagcagatagcatcaaggactattggcctaagacacaaaaaatgataaaggaaagattttgtatatgtaaattgttcatatacatccaggatatgcctaggctgattgtttgaggatcaatttattgtgctctgaggggaattttccaatgaggcatgcttgttccagtagcggtacagctgggagtggagtatgaccatgcttgctatgatatgtgtgttagattgtgttgtctgaaggcttacagtaagtttttgatacatatggacatacccatacagctaaagcaaagacaatttgatttgattttagaggattttgcatgtaattcaacatggttgaggtcactgtacctagaaagcagcatacagatctaattttgttgacaatcgtacaaggtattattacttaattactttggtgaaaagaggttgctttgaagatttgacttcacgttgtacatacaggcagagtatcagacaggtggatttttcctaaaaagtggggaatatgtttctaacctgttttgttctttaggaaactggattgcacactattgtgcctttatgcaaaccaagttatgtatcatttttaggtgatgaattgtatctttttttagaagatgaacagttatgtatcctttttagtggatggattgttattatatccctgttattgtaggattgtgatttgaaactaggaacttatacctctgaaatccttttgttttgcagcccagataaaattgtagccatgctgaggcatccaatgtttatctgttatctctattgaaaggcttgaagttatttgtcttcatcgctaaattggtgccaatgttgaggtgaacttggagaaagaatcgtgctttagtctgacaatttatttgctggtggttacataagatgtcctttttagagatgcgtctatggcacgaactggtaaacagtgacatgaacagatagctactgtactatattttagctttgaggcagagcccgattatttttcttatgctaggcgtcaattttgcctttgagatatttcagtttgagcttagctgaacggtggggactctatgattgaacttaaccaccacaagccgcatgatcttttcaataaatattgtcctgagtcta

SEQ ID NO: 37467 - DNA, 895 bp, Zea Mays
gctgccccacctccctccttattgtgcctttgttttcgacggcttcgtggtggctctcaacgaatcggtgcccgggagcgtcaagtccgtcttcaagccctgggagcagcgccttgacacctcggggggttttctggagagtaatgagggtgaccctgagctacttattttcatcccgttcacatcagatgttaagatcaagagcatttctgttgttggtggtgctgatggaacaagcccgtcaagaatgagagcgtttatcaatagagaaggtattgacttttctgatgctcaaaacatgcagccagtgcaggaatgggaattagcagagaacctgcaaggagctcttgagtaccaaacaagatattcaaggttccaaggtgtggctaacctaactctgcatttctctgacaactttggtggtgatacaactaaaatttattacattggactacgtggtgaagccactcagaacaaaagggatgtagttgcaacaattgtatatgaagtcatgcccaatccttctgatcacaaaacaaaatctgagactggaggaggtttctcgcatgtggagtagacatcatacaagagctagagaagcggaagctgggtactgcgttgcctgaaagcaaatttgaacctcgcttcgtcgatcaataagataaatagataattcccagctgctagacttttagcttgacttttgagcacataactctgtacccgtggacgctgtgactggtttgctaatgctctatcatcagagttggtctcttgtgttatcttgtgtctgtcagctttattccattttcctgaagcgctcatcgtagatatttctccagtgtgatcatgcaaactcttgcggacgccagaaggtactgaaatccaattcaag

SEQ ID NO: 37468 - DNA, 3002 bp, Zea Mays
cagtatgcagagcgcctgccaattggtactgagaaggtgatacgaactgttacacatgagaccgtgaagcggttttatcagaagtggtaccatctaagcaatatggcggtatttgcagtgggtgatttcccagatacacaggctgtcgtggagttgataaatgagcattttgggcacaaagctccagctccccaccctcctccagttataccagaattttcagttccatcgcatgaggaaccacgcttttcatgttttgtggaatctgaagctgcagggtcggctgttgttatcagctgcaagatgcctgctggtggaattaaaacagtaaaggactacaaagattcactggcagagtccatgtttcattgtgcgctaaaccagaggctcttcaaaatatctcgtagaaaggatcctccttatttttcttgctcctcagctgcagatgctctcgtctgtccagttaaggcttacattatgacatctagttgtcgggaaaggggaacagttgaagctctcgagtccatgcttcttgaggttgctagggtacggcttcatggattttctgaccgtgagatatccattgtacgcgccctaatgatgtcagagatggaatctgcatatttggagcgtgatcaaatgcaatctaccagcttacgggatgagtttttgcagcattttcttcgtgaggaacctgttgttgggattgaatatgaagcacagttacaaaagactcttcttccccatatttcttctgcggaagtggcaaaatttgcagaaaacttttcaacggccagcagctgtgttatcaagatagttgaacctcgagctcatgcttctttggaggatctgaaagcagttgtgctgaaagtcaacagtatggaagaagataaatctatttttccatgggatgaagaacaaattccagaagaaattgttgcccaagctccagagccagggactataattgctaaagtggagcacccaggcataggtgctactgagatgatactttcaaatggcatgcggatttgttacaagtatactgattttcttgatgaccaggttgtttttactggctttgcctatggtggtctgtcagaattatctgaagctgagtatacttcatgctcaatgggttcgaccatagcaggagaaattggcacttttggctacagaccttctgtcttgatggacatgcttgctggcaagagagccgaagttggtacaaaagtgggggcctacatgagaacattttctggcgattgctcaccttcagatcttgagacagctttgcagcttgtttatcaactatttacaacaaatgtggagccaagggaggaagaagtaaaaatagtgatgcaaatggcagaggaagcaatctatgctcaagagcgcgatccatacacagcatttgcgaatcgtgttcgtgaaataaattatgggaactcatacttttttaagccaattagaataagtgacttgaagaaagtggatccaatcagagcgtgtgaatatttcaacaattgtttcaaggatccatcagcttttacggtggtaatagttggaaaaatagacccagccatctcacttccactggttctgcagtacttgggtggaatacctagggtacaggatgctactcaaccacttagtcgtgatgatctaagaggattgccatttaagtttcctgcaaccatcattagagaagttgtccgcagccctatggttgaagcacagtgctttgtacaactagcatttcctgttgttcttaagaacacaatgatgactgaagatattcactatgttgggtttcttagtaaacttctggaaacaaaaatcatgcaagtacttcgcttcaaatatgggcagatctattcagttaatgtagctgtcttcttggggggcaacaaaccctcaagaactggagatgttcgtggagatataagcgtgaatttctcatgtgatccagacatatcatctaaactggagaattacttctggttggatcgtattctacggagctatcaatcaaggcttttttctggagatattggatccacctttgcgttccaagaggaggggcgtataaaggttagggatgctttgacaccacagagcatgcaatcagccttgcaacgagttatacctttcccttgcagaaagcagtacactgtggttattcttatgccaaagtcatcctgttgggcgtcagtgaagtcaatgcttagctggagttctaatggggtcagcagagatgctaagatcctcgctggcatggctggtgcactggtgttggcagtgagtttgtggaggtactctcgtagttcgttaaaatcttagtgtttgatacaactgaccgctttttggggacttccagtcagatctgaaaatggatcaggttaggaactgatacgagctgtcggtagatagatatttgttctacctgagcaccgacccggtgttcggagatctggtaacaaaagaggccatactatgacaaatttggtagctaacagattcgttgccgcatgtgtgcgtgcagtcctgtaatctcattcgttgtaccgcggcacatgtgcattagtcgtcggtgtatagtaatgactatcctcccatttgatttcataggcaggactgaagtagtggtcactgaccaccgtggcgggacggtcgaaactggaaacccaacattgtgatagctttactggtccaatttctgtggacggctttgtacctgtacgtttttccgtttcctatgacccagaacgaggaaaaatctataatgagcaggaaatgtgatattcctttatgctgctccgttggttttcatatattggctaggacagcgtccaagggtagcgttgggaaccgcgacgtccaagaaaggatagtgttgaaacttgtgacgtttaaggaggtgtttgtttgagattataatccggctagattatataatcctataaaattttgaactaagtgttagtttaattttttgtgag

SEQ ID NO: 37469 - DNA, 3042 bp, Zea Mays
cagtatgcagagcgcctgccaattggtactgagaaggtgatacgaactgttacacatgagaccgtgaagcggttttatcagaagtggtaccatctaagcaatatggcggtatttgcagtgggtgatttcccagatacacaggctgtcgtggagttgataaatgagcattttgggcacaaagctccagctccccaccctcctccagttataccagaattttcagttccatcgcatgaggaaccacgcttttcatgttttgtggaatctgaagctgcagggtcggctgttgttatcagctgcaagatgcctgctggtggaattaaaacagtaaaggactacaaagattcactggcagagtccatgtttcattgtgcgctaaaccagaggctcttcaaaatatctcgtagaaaggatcctccttatttttcttgctcctcagctgcagatgctctcgtctgtccagttaaggcttacattatgacatctagttgtcgggaaaggggaacagttgaagctctcgagtccatgcttcttgaggttgctagggtacggcttcatggattttctgaccgtgagatatccattgtacgcgccctaatgatgtcagagatggaatctgcatatttggagcgtgatcaaatgcaatctaccagcttacgggatgagtttttgcagcattttcttcgtgaggaacctgttgttgggattgaatatgaagcacagttacaaaagactcttcttccccatatttcttctgcggaagtggcaaaatttgcagaaaacttttcaacggccagcagctgtgttatcaagatagttgaacctcgagctcatgcttctttggaggatctgaaagcagttgtgctgaaagtcaacagtatggaagaagataaatctatttttccatgggatgaagaacaaattccagaagaaattgttgcccaagctccagagccagggactataattgctaaagtggagcacccaggcataggttgtttttactggctttgcctatggtggtctgtcagaattatctgaagctgagtatacttcatgctcaatgggttcgaccatagcaggagaaattggcacttttggctacagaccttctgtcttgatggacatgcttgctggcaagagagccgaagttggtacaaaagtgggggcctacatgagaacattttctggcgattgctcaccttcagatcttgagacagctttgcagcttgtttatcaactatttacaacaaatgtggagccaagggaggaagaagtaaaaatagtgatgcaaatggcagaggaagcaatctatgctcaagagcgcgatccatacacagcatttgcgaatcgtgttcgtgaaataaattatgggaactcatacttttttaagccaattagaataagtgacttgaagaaagtggatccaatcagagcgtgtgaatatttcaacaattgtttcaaggatccatcagcttttacggtggtaatagttggaaaaatagacccagccatctcacttccactggttctgcagtacttgggtggaatacctagggtacaggatgctactcaaccacttagtcgtgatgatctaagaggattgccatttaagtttcctgcaaccatcattagagaagttgtccgcagccctatggttgaagcacagtgctttgtacaactagcatttcctgttgttcttaagaacacaatgatgactgaagatattcactatgttgggtttcttagtaaacttctggaaacaaaaatcatgcaagtacttcgcttcaaatatgggcagatctattcagttaatgtagctgtcttcttggggggcaacaaaccctcaagaactggagatgttcgtggagatataagcgtgaatttctcatgtgatccagacatatcatctaaactggttgattttgttctggaggagatatcatgcctacaaacagaaggtccttctgaagaagatgtattgtccatcctcgaaattgaacaaagagctcatgaaaatggattacaggagaattacttctggttggatcgtattctacggagctatcaatcaaggcttttttctggagatattggatccacctttgcgttccaagaggaggggcgtataaaggttagggatgctttgacaccacagagcatgcaatcagccttgcaacgagttatacctttcccttgcagaaagcagtacactgtggttattcttatgccaaagtcatcctgttgggcgtcagtgaagtcaatgcttagctggagttctaatggggtcagcagagatgctaagatcctcgctggcatggctggtgcactggtgttggcagtgagtttgtggaggtactctcgtagttcgttaaaatcttagtgtttgatacaactgaccgctttttggggacttccagtcagatctgaaaatggatcaggttaggaactgatacgagctgtcggtagatagatatttgttctacctgagcaccgacccggtgttcggagatctggtaacaaaagaggccatactatgacaaatttggtagctaacagattcgttgccgcatgtgtgcgtgcagtcctgtaatctcattcgttgtaccgcggcacatgtgcattagtcgtcggtgtatagtaatgactatcctcccatttgatttcataggcaggactgaagtagtggtcactgaccaccgtggcgggacggtcgaaactggaaacccaacattgtgatagctttactggtccaatttctgtggacggctttgtacctgtacgtttttccgtttcctatgacccagaacgaggaaaaatctataatgagcaggaaatgtgatattcctttatgctgctccgttggttttcatatattggctaggacagcgtccaagggtagcgttgggaaccgcgacgtccaagaaaggatagtgttgaaacttgtgacgtttaaggaggtgtttgtttgagattataatccggctagattatataatcctataaaattttgaactaagtgttagtttaattttttgtgag

SEQ ID NO: 37470 - DNA, 3263 bp, Zea Mays
atggatctgctcccgccgccgacggacgcgccggatgccggcggccccagcgccggcgggtcaggccgggggctgcgccgcgggatcgggttccggtcgctgaagctggtcagcgttgccatggacgagaccctgcccgtcgaccccgtcggcgccacctacggccgcctcgccaacggcctcacctactacgtccgctcaaacccaaagccacgcatgcgcgccgcgctctcgcttgccgtcaaggtcggtggtagaggaggaggacgagcgcggtgtggcgcacatcgttgagcacctcgccttcagcgccaccgcgcgatataccaaccacgacatcgtcaagttcctcgagagcataggggccgagttcggtgcctgccagaacgcgctcacctcatcggatgagactatttacgagctgctcgtacccgtcgacaagccaggcctgctctcccaggctatatctgtcctcgcagagttcagctcagaggttagggtgtcagcagaggatctggagaaagagaggggtgctgtgctggaggagtacaggggtggacgcaatgcagcaggccggatgcaggactcccactgggcactgttgtttgatggttctaagtatgcagagcgcctgccaattggtactgagaaggtgatacgaactgttacacatgagaccgtgaagcggttttatcagaagtggtaccatctaagcaatatggcggtatttgcagtgggtgatttcccagatacacaggctgtcgtggagttgataaatgagcattttgggcacaaagctccagctccccaccctcctccagttataccagaattttcagttccatcgcatgaggaaccacgcttttcatgttttgtggaatctgaagctgcagggtcggctgttgttatcagctgcaagatgcctgctggtggaattaaaacagtaaaggactacaaagattcactggcagagtccatgtttcattgtgcgctaaaccagaggctcttcaaaatatctcgtagaaaggatcctccttatttttcttgctcctcagctgcagatgctctcgtctgtccagttaaggcttacattatgacatctagttgtcgggaaaggggaacagttgaagctctcgagtccatgcttcttgaggttgctagggtacggcttcatggattttctgaccgtgagatatccattgtacgcgccctaatgatgtcagagatggaatctgcatatttggagcgtgatcaaatgcaatctaccagcttacgggatgagtttttgcagcattttcttcgtgaggaacctgttgttgggattgaatatgaagcacagttacaaaagactcttcttccccatatttcttctgcggaagtggcaaaatttgcagaaaacttttcaacggccagcagctgtgttatcaagatagttgaacctcgagctcatgcttctttggaggatctgaaagcagttgtgctgaaagtcaacagtatggaagaagataaatctatttttccatgggatgaagaacaaattccagaagaaattgttgcccaagctccagagccagggactataattgctaaagtggagcacccaggcataggtgctactgagatgatactttcaaatggcatgcggatttgttacaagtatactgattttcttgatgaccaggttgtttttactggctttgcctatggtggtctgtcagaattatctgaagctgagtatacttcatgctcaatgggttcgaccatagcaggagaaattggcacttttggctacagaccttctgtcttgatggacatgcttgctggcaagagagccgaagttggtacaaaagtgggggcctacatgagaacattttctggcgattgctcaccttcagatcttgagacagctttgcagcttgtttatcaactatttacaacaaatgtggagccaagggaggaagaagtaaaaatagtgatgcaaatggcagaggaagcaatctatgctcaagagcgcgatccatacacagcatttgcgaatcgtgttcgtgaaataaattatgggaactcatacttttttaagccaattagaataagtgacttgaagaaagtggatccaatcagagcgtgtgaatatttcaacaattgtttcaaggatccatcagcttttacggtggtaatagttggaaaaatagacccagccatctcacttccactggttctgcagtacttgggtggaatacctagggtacaggatgctactcaaccacttagtcgtgatgatctaagaggattgccatttaagtttcctgcaaccatcattagagaagttgtccgcagccctatggttgaagcacagtgctttgtacaactagcatttcctgttgttcttaagaacacaatgatgactgaagatattcactatgttgggtttcttagtaaacttctggaaacaaaaatcatgcaagtacttcgcttcaaatatgggcagatctattcagttaatgtagctgtcttcttggggggcaacaaaccctcaagaactggagatgttcgtggagatataagcgtgaatttctcatgtgatccagacatatcatctaaactggttgattttgttctggaggagatatcatgcctacaaacagaaggtccttctgaagaagatgtattgtccatcctcgaaattgaacaaagagctcatgaaaatggattacaggagaattacttctggttggatcgtattctacggagctatcaatcaaggcttttttctggagatattggatccacctttgcgttccaagaggaggggcgtataaaggttagggatgctttgacaccacagagcatgcaatcagccttgcaacgagttatacctttcccttgcagaaagcagtacactgtggttattcttatgccaaagtcatcctgttgggcgtcagtgaagtcaatgcttagctggagttctaatggggtcagcagagatgctaagatcctcgctggcatggctggtgcactggtgttggcaaacgaggaaaaatctataatgagcaggaaatgtgatattcctttatgctgctccgttggttttcatatattggctaggacagcgtccaagggtagcgttgggaaccgcgacgtccaagaaaggatagtgttgaaacttgtgacgtttaaggaggtgtttgtttgagattataatccggctagattatataatcctataaaattttgaactaagtgttagtttaattttttgtgag

SEQ ID NO: 37471 - DNA, 3728 bp, Zea Mays
atggatctgctcccgccgccgacggacgcgccggatgccggcggccccagcgccggcgggtcaggccgggggctgcgccgcgggatcgggttccggtcgctgaagctggtcagcgttgccatggacgagaccctgcccgtcgaccccgtcggcgccacctacggccgcctcgccaacggcctcacctactacgtccgctcaaacccaaagccacgcatgcgcgccgcgctctcgcttgccgtcaaggtcgggtcggtggtagaggaggaggacgagcgcggtgtggcgcacatcgttgagcacctcgccttcagcgccaccgcgcgatataccaaccacgacatcgtcaagttcctcgagagcataggggccgagttcggtgcctgccagaacgcgctcacctcatcggatgagactatttacgagctgctcgtacccgtcgacaagccaggcctgctctcccaggctatatctgtcctcgcagagttcagctcagaggttagggtgtcagcagaggatctggagaaagagaggggtgctgtgctggaggagtacaggggtggacgcaatgcagcaggccggatgcaggactcccactgggcactgttgtttgatggttctaagtatgcagagcgcctgccaattggtactgagaaggtgatacgaactgttacacatgagaccgtgaagcggttttatcagaagtggtaccatctaagcaatatggcggtatttgcagtgggtgatttcccagatacacaggctgtcgtggagttgataaatgagcattttgggcacaaagctccagctccccaccctcctccagttataccagaattttcagttccatcgcatgaggaaccacgcttttcatgttttgtggaatctgaagcttcggctgttgttatcagctgcaagatgcctgctggtggaattaaaacagtaaaggactacaaagattcactggcagagtccatgtttcattgtgcgctaaaccagaggctcttcaaaatatctcgtagaaaggatcctccttatttttcttgctcctcagctgcagatgctctcgtctgtccagttaaggcttacattatgacatctagttgtcgggaaaggggaacagttgaagctctcgagtccatgcttcttgaggttgctagggtacggcttcatggattttctgaccgtgagatatccattgtacgcgccctaatgatgtcagagatggaatctgcatatttggagcgtgatcaaatgcaatctaccagcttacgggatgagtttttgcagcattttcttcgtgaggaacctgttgttgggattgaatatgaagcacagttacaaaagactcttcttccccatatttcttctgcggaagtggcaaaatttgcagaaaacttttcaacggccagcagctgtgttatcaagatagttgaacctcgagctcatgcttctttggaggatctgaaagcagttgtgctgaaagtcaacagtatggaagaagataaatctatttttccatgggatgaagaacaaattccagaagaaattgttgcccaagctccagagccagggactataattgctaaagtggagcacccaggcataggtgctactgagatgatactttcaaatggcatgcggatttgttacaagtatactgattttcttgatgaccaggttgtttttactggctttgcctatggtggtctgtcagaattatctgaagctgagtatacttcatgctcaatgggttcgaccatagcaggagaaattggcacttttggctacagaccttctgtcttgatggacatgcttgctggcaagagagccgaagttggtacaaaagtgggggcctacatgagaacattttctggcgattgctcaccttcagatcttgagacagctttgcagcttgtttatcaactatttacaacaaatgtggagccaagggaggaagaagtaaaaatagtgatgcaaatggcagaggaagcaatctatgctcaagagcgcgatccatacacagcatttgcgaatcgtgttcgtgaaataaattatgggaactcatacttttttaagccaattagaataagtgacttgaagaaagtggatccaatcagagcgtgtgaatatttcaacaattgtttcaaggatccatcagcttttacggtggtaatagttggaaaaatagacccagccatctcacttccactggttctgcagtacttgggtggaatacctagggtacaggatgctactcaaccacttagtcgtgatgatctaagaggattgccatttaagtttcctgcaaccatcattagagaagttgtccgcagccctatggttgaagcacagtgctttgtacaactagcatttcctgttgttcttaagaacacaatgatgactgaagatattcactatgttgggtttcttagtaaacttctggaaacaaaaatcatgcaagtacttcgcttcaaatatgggcagatctattcagttaatgtagctgtcttcttggggggcaacaaaccctcaagaactggagatgttcgtggagatataagcgtgaatttctcatgtgatccagacatatcatctaaactggttgattttgttctggaggagatatcatgcctacaaacagaaggtccttctgaagaagatgtattgtccatcctcgaaattgaacaaagagctcatgaaaatggattacaggagaattacttctggttggatcgtattctacggagctatcaatcaaggcttttttctggagatattggatccacctttgcgttccaagaggaggggcgtataaaggttagggatgctttgacaccacagagcatgcaatcagccttgcaacgagttatacctttcccttgcagaaagcagtacactgtggttattcttatgccaaagtcatcctgttgggcgtcagtgaagtcaatgcttagctggagttctaatggggtcagcagagatgctaagatcctcgctggcatggctggtgcactggtgttggcagtgagtttgtggaggtactctcgtagttcgttaaaatcttagtgtttgatacaactgaccgctttttggggacttccagtcagatctgaaaatggatcaggttaggaactgatacgagctgtcggtagatagatatttgttctacctgagcaccgacccggtgttcggagatctggtaacaaaagaggccatactatgacaaatttggtagctaacagattcgttgccgcatgtgtgcgtgcagtcctgtaatctcattcgttgtaccgcggcacatgtgcattagtcgtcggtgtatagtaatgactatcctcccatttgatttcataggcaggactgaagtagtggtcactgaccaccgtggcgggacggtcgaaactggaaacccaacattgtgatagctttactggtccaatttctgtggacggctttgtacctgtacgtttttccgtttcctatgacccagaacgaggaaaaatctataatgagcaggaaatgtgatattcctttatgctgctccgttggttttcatatattggctaggacagcgtccaagggtagcgttgggaaccgcgacgtccaagaaaggatagtgttgaaacttgtgacgtttaaggaggtgtttgtttgagattataatccggctagattatataatcctataaaattttgaactaagtgttagtttaattttttgtgag

SEQ ID NO: 37472 - DNA, 3315 bp, Zea Mays
cctcttcccgcaccgcagcgcggcaccggcacctgccaccagcggccatggatctgctcccgccgccgacggacgcgccggatgccggcggccccagcgccggcgggtcaggccgggggctgcgccgcgggatcgggttccggtcgctgaagctggtcagcgttgccatggacgagaccctgcccgtcgaccccgtcggcgccacctacggccgcctcgccaacggcctcacctactacgtccgctcaaacccaaagccacgcatgcgcgccgcgctctcgcttgccgtcaaggtcgggtcggtggtagaggaggaggacgagcgcggtgtggcgcacatcgttgagcacctcgccttcagcgccaccgcgcgatataccaaccacgacatcgtcaagttcctcgagagcataggggccgagttcggtgcctgccagaacgcgctcacctcatcggatgagactatttacgagctgctcgtacccgtcgacaagccaggcctgctctcccaggctatatctgtcctcgcagagttcagctcagaggttagggtgtcagcagaggatctggagaaagagaggggtgctgtgctggaggagtacaggggtggacgcaatgcagcaggccggatgcaggactcccactgggcactgttgtttgatggttctaagtatgcagagcgcctgccaattggtactgagaaggtgatacgaactgttacacatgagaccgtgaagcggttttatcagaagtggtaccatctaagcaatatggcggtatttgcagtgggtgatttcccagatacacaggctgtcgtggagttgataaatgagcattttgggcacaaagctccagctccccaccctcctccagttataccagaattttcagttccatcgcatgaggaaccacgcttttcatgttttgtggaatctgaagctgcagggtcggctgttgttatcagctgcaagatgcctgctggtggaattaaaacagtaaaggactacaaagattcactggcagagtccatgtttcattgtgcgctaaaccagaggctcttcaaaatatctcgtagaaaggatcctccttatttttcttgctcctcagctgcagatgctctcgtctgtccagttaaggcttacattatgacatctagttgtcgggaaaggggaacagttgaagctctcgagtccatgcttcttgaggttgctagggtacggcttcatggattttctgaccgtgagatatccattgtacgcgccctaatgatgtcagagatggaatctgcatatttggagcgtgatcaaatgcaatctaccagcttacgggatgagtttttgcagcattttcttcgtgaggaacctgttgttgggattgaatatgaagcacagttacaaaagactcttcttccccatatttcttctgcggaagtggcaaaatttgcagaaaacttttcaacggccagcagctgtgttatcaagatagttgaacctcgagctcatgcttctttggaggatctgaaagcagttgtgctgaaagtcaacagtatggaagaagataaatctatttttccatgggatgaagaacaaattccagaagaaattgttgcccaagctccagagccagggactataattgctaaagtggagcacccaggcataggtgctactgagatgatactttcaaatggcatgcggatttgttacaagtatactgattttcttgatgaccaggttgtttttactggctttgcctatggtggtctgtcagaattatctgaagctgagtatacttcatgctcaatgggttcgaccatagcaggagaaattggcacttttggctacagaccttctgtcttgatggacatgcttgctggcaagagagccgaagttggtacaaaagtgggggcctacatgagaacattttctggcgattgctcaccttcagatcttgagacagctttgcagcttgtttatcaactatttacaacaaatgtggagccaagggaggaagaagtaaaaatagtgatgcaaatggcagaggaagcaatctatgctcaagagcgcgatccatacacagcatttgcgaatcgtgttcgtgaaataaattatgggaactcatacttttttaagccaattagaataagtgacttgaagaaagtggatccaatcagagcgtgtgaatatttcaacaattgtttcaaggatccatcagcttttacggtggtaatagttggaaaaatagacccagccatctcacttccactggttctgcagtacttgggtggaatacctagggtacaggatgctactcaaccacttagtcgtgatgatctaagaggattgccatttaagtttcctgcaaccatcattagagaagttgtccgcagccctatggttgaagcacagtgctttgtacaactagcatttcctgttgttcttaagaacacaatgatgactgaagatattcactatgttgggtttcttagtaaacttctggaaacaaaaatcatgcaagtacttcgcttcaaatatgggcagatctattcagttaatgtagctgtcttcttggggggcaacaaaccctcaagaactggagatgttcgtggagatataagcgtgaatttctcatgtgatccagacatatcatctaaactggttgattttgttctggaggagatatcatgcctacaaacagaaggtccttctgaagaagatgtattgtccatcctcgaaattgaacaaagagctcatgaaaatggattacaggagaattacttctggttggatcgtattctacggagctatcaatcaaggcttttttctggagatattggatccacctttgcgttccaagaggaggggcgtataaaggttagggatgctttgacaccacagagcatgcaatcagccttgcaacgagttatacctttcccttgcagaaagcagtacactgtggttattcttatgccaaagtcatcctgttgggcgtcagtgaagtcaatgcttagctggagttctaatggggtcagcagagatgctaagatcctcgctggcatggctggtgcactggtgttggcaaacgaggaaaaatctataatgagcaggaaatgtgatattcctttatgctgctccgttggttttcatatattggctaggacagcgtccaagggtagcgttgggaaccgcgacgtccaagaaaggatagtgttgaaacttgtgacgtttaaggaggtgtttgtttgagattataatccggctagattatataatcctataaaattttgaactaagtgttagtttaattttttgtgag

SEQ ID NO: 37473 - DNA, 3787 bp, Zea Mays
ctctcccctcttcccgcaccgcagcgcggcaccggcacctgccaccagcggccatggatctgctcccgccgccgacggacgcgccggatgccggcggccccagcgccggcgggtcaggccgggggctgcgccgcgggatcgggttccggtcgctgaagctggtcagcgttgccatggacgagaccctgcccgtcgaccccgtcggcgccacctacggccgcctcgccaacggcctcacctactacgtccgctcaaacccaaagccacgcatgcgcgccgcgctctcgcttgccgtcaaggtcgggtcggtggtagaggaggaggacgagcgcggtgtggcgcacatcgttgagcacctcgccttcagcgccaccgcgcgatataccaaccacgacatcgtcaagttcctcgagagcataggggccgagttcggtgcctgccagaacgcgctcacctcatcggatgagactatttacgagctgctcgtacccgtcgacaagccaggcctgctctcccaggctatatctgtcctcgcagagttcagctcagaggttagggtgtcagcagaggatctggagaaagagaggggtgctgtgctggaggagtacaggggtggacgcaatgcagcaggccggatgcaggactcccactgggcactgttgtttgatggttctaagtatgcagagcgcctgccaattggtactgagaaggtgatacgaactgttacacatgagaccgtgaagcggttttatcagaagtggtaccatctaagcaatatggcggtatttgcagtgggtgatttcccagatacacaggctgtcgtggagttgataaatgagcattttgggcacaaagctccagctccccaccctcctccagttataccagaattttcagttccatcgcatgaggaaccacgcttttcatgttttgtggaatctgaagctgcagggtcggctgttgttatcagctgcaagatgcctgctggtggaattaaaacagtaaaggactacaaagattcactggcagagtccatgtttcattgtgcgctaaaccagaggctcttcaaaatatctcgtagaaaggatcctccttatttttcttgctcctcagctgcagatgctctcgtctgtccagttaaggcttacattatgacatctagttgtcgggaaaggggaacagttgaagctctcgagtccatgcttcttgaggttgctagggtacggcttcatggattttctgaccgtgagatatccattgtacgcgccctaatgatgtcagagatggaatctgcatatttggagcgtgatcaaatgcaatctaccagcttacgggatgagtttttgcagcattttcttcgtgaggaacctgttgttgggattgaatatgaagcacagttacaaaagactcttcttccccatatttcttctgcggaagtggcaaaatttgcagaaaacttttcaacggccagcagctgtgttatcaagatagttgaacctcgagctcatgcttctttggaggatctgaaagcagttgtgctgaaagtcaacagtatggaagaagataaatctatttttccatgggatgaagaacaaattccagaagaaattgttgcccaagctccagagccagggactataattgctaaagtggagcacccaggcataggtgctactgagatgatactttcaaatggcatgcggatttgttacaagtatactgattttcttgatgaccaggttgtttttactggctttgcctatggtggtctgtcagaattatctgaagctgagtatacttcatgctcaatgggttcgaccatagcaggagaaattggcacttttggctacagaccttctgtcttgatggacatgcttgctggcaagagagccgaagttggtacaaaagtgggggcctacatgagaacattttctggcgattgctcaccttcagatcttgagacagctttgcagcttgtttatcaactatttacaacaaatgtggagccaagggaggaagaagtaaaaatagtgatgcaaatggcagaggaagcaatctatgctcaagagcgcgatccatacacagcatttgcgaatcgtgttcgtgaaataaattatgggaactcatacttttttaagccaattagaataagtgacttgaagaaagtggatccaatcagagcgtgtgaatatttcaacaattgtttcaaggatccatcagcttttacggtggtaatagttggaaaaatagacccagccatctcacttccactggttctgcagtacttgggtggaatacctagggtacaggatgctactcaaccacttagtcgtgatgatctaagaggattgccatttaagtttcctgcaaccatcattagagaagttgtccgcagccctatggttgaagcacagtgctttgtacaactagcatttcctgttgttcttaagaacacaatgatgactgaagatattcactatgttgggtttcttagtaaacttctggaaacaaaaatcatgcaagtacttcgcttcaaatatgggcagatctattcagttaatgtagctgtcttcttggggggcaacaaaccctcaagaactggagatgttcgtggagatataagcgtgaatttctcatgtgatccagacatatcatctaaactggttgattttgttctggaggagatatcatgcctacaaacagaaggtccttctgaagaagatgtattgtccatcctcgaaattgaacaaagagctcatgaaaatggattacaggagaattacttctggttggatcgtattctacggagctatcaatcaaggcttttttctggagatattggatccacctttgcgttccaagaggaggggcgtataaaggttagggatgctttgacaccacagagcatgcaatcagccttgcaacgagttatacctttcccttgcagaaagcagtacactgtggttattcttatgccaaagtcatcctgttgggcgtcagtgaagtcaatgcttagctggagttctaatggggtcagcagagatgctaagatcctcgctggcatggctggtgcactggtgttggcagtgagtttgtggaggtactctcgtagttcgttaaaatcttagtgtttgatacaactgaccgctttttggggacttccagtcagatctgaaaatggatcaggttaggaactgatacgagctgtcggtagatagatatttgttctacctgagcaccgacccggtgttcggagatctggtaacaaaagaggccatactatgacaaatttggtagctaacagattcgttgccgcatgtgtgcgtgcagtcctgtaatctcattcgttgtaccgcggcacatgtgcattagtcgtcggtgtatagtaatgactatcctcccatttgatttcataggcaggactgaagtagtggtcactgaccaccgtggcgggacggtcgaaactggaaacccaacattgtgatagctttactggtccaatttctgtggacggctttgtacctgtacgtttttccgtttcctatgacccagaacgaggaaaaatctataatgagcaggaaatgtgatattcctttatgctgctccgttggttttcatatattggctaggacagcgtccaagggtagcgttgggaaccgcgacgtccaagaaaggatagtgttgaaacttgtgacgtttaaggaggtgtttgtttgagattataatccggctagattatataatcctataaaattttgaactaagtgttagtttaattttttgtgag

SEQ ID NO: 37474 - DNA, 3782 bp, Zea Mays
ctctcccctcttcccgcaccgcagcgcggcaccggcacctgccaccagcggccatggatctgctcccgccgccgacggacgcgccggatgccggcggccccagcgccggcgggtcaggccgggggctgcgccgcgggatcgggttccggtcgctgaagctggtcagcgttgccatggacgagaccctgcccgtcgaccccgtcggcgccacctacggccgcctcgccaacggcctcacctactacgtccgctcaaacccaaagccacgcatgcgcgccgcgctctcgcttgccgtcaaggtcggtggtagaggaggaggacgagcgcggtgtggcgcacatcgttgagcacctcgccttcagcgccaccgcgcgatataccaaccacgacatcgtcaagttcctcgagagcataggggccgagttcggtgcctgccagaacgcgctcacctcatcggatgagactatttacgagctgctcgtacccgtcgacaagccaggcctgctctcccaggctatatctgtcctcgcagagttcagctcagaggttagggtgtcagcagaggatctggagaaagagaggggtgctgtgctggaggagtacaggggtggacgcaatgcagcaggccggatgcaggactcccactgggcactgttgtttgatggttctaagtatgcagagcgcctgccaattggtactgagaaggtgatacgaactgttacacatgagaccgtgaagcggttttatcagaagtggtaccatctaagcaatatggcggtatttgcagtgggtgatttcccagatacacaggctgtcgtggagttgataaatgagcattttgggcacaaagctccagctccccaccctcctccagttataccagaattttcagttccatcgcatgaggaaccacgcttttcatgttttgtggaatctgaagctgcagggtcggctgttgttatcagctgcaagatgcctgctggtggaattaaaacagtaaaggactacaaagattcactggcagagtccatgtttcattgtgcgctaaaccagaggctcttcaaaatatctcgtagaaaggatcctccttatttttcttgctcctcagctgcagatgctctcgtctgtccagttaaggcttacattatgacatctagttgtcgggaaaggggaacagttgaagctctcgagtccatgcttcttgaggttgctagggtacggcttcatggattttctgaccgtgagatatccattgtacgcgccctaatgatgtcagagatggaatctgcatatttggagcgtgatcaaatgcaatctaccagcttacgggatgagtttttgcagcattttcttcgtgaggaacctgttgttgggattgaatatgaagcacagttacaaaagactcttcttccccatatttcttctgcggaagtggcaaaatttgcagaaaacttttcaacggccagcagctgtgttatcaagatagttgaacctcgagctcatgcttctttggaggatctgaaagcagttgtgctgaaagtcaacagtatggaagaagataaatctatttttccatgggatgaagaacaaattccagaagaaattgttgcccaagctccagagccagggactataattgctaaagtggagcacccaggcataggtgctactgagatgatactttcaaatggcatgcggatttgttacaagtatactgattttcttgatgaccaggttgtttttactggctttgcctatggtggtctgtcagaattatctgaagctgagtatacttcatgctcaatgggttcgaccatagcaggagaaattggcacttttggctacagaccttctgtcttgatggacatgcttgctggcaagagagccgaagttggtacaaaagtgggggcctacatgagaacattttctggcgattgctcaccttcagatcttgagacagctttgcagcttgtttatcaactatttacaacaaatgtggagccaagggaggaagaagtaaaaatagtgatgcaaatggcagaggaagcaatctatgctcaagagcgcgatccatacacagcatttgcgaatcgtgttcgtgaaataaattatgggaactcatacttttttaagccaattagaataagtgacttgaagaaagtggatccaatcagagcgtgtgaatatttcaacaattgtttcaaggatccatcagcttttacggtggtaatagttggaaaaatagacccagccatctcacttccactggttctgcagtacttgggtggaatacctagggtacaggatgctactcaaccacttagtcgtgatgatctaagaggattgccatttaagtttcctgcaaccatcattagagaagttgtccgcagccctatggttgaagcacagtgctttgtacaactagcatttcctgttgttcttaagaacacaatgatgactgaagatattcactatgttgggtttcttagtaaacttctggaaacaaaaatcatgcaagtacttcgcttcaaatatgggcagatctattcagttaatgtagctgtcttcttggggggcaacaaaccctcaagaactggagatgttcgtggagatataagcgtgaatttctcatgtgatccagacatatcatctaaactggttgattttgttctggaggagatatcatgcctacaaacagaaggtccttctgaagaagatgtattgtccatcctcgaaattgaacaaagagctcatgaaaatggattacaggagaattacttctggttggatcgtattctacggagctatcaatcaaggcttttttctggagatattggatccacctttgcgttccaagaggaggggcgtataaaggttagggatgctttgacaccacagagcatgcaatcagccttgcaacgagttatacctttcccttgcagaaagcagtacactgtggttattcttatgccaaagtcatcctgttgggcgtcagtgaagtcaatgcttagctggagttctaatggggtcagcagagatgctaagatcctcgctggcatggctggtgcactggtgttggcagtgagtttgtggaggtactctcgtagttcgttaaaatcttagtgtttgatacaactgaccgctttttggggacttccagtcagatctgaaaatggatcaggttaggaactgatacgagctgtcggtagatagatatttgttctacctgagcaccgacccggtgttcggagatctggtaacaaaagaggccatactatgacaaatttggtagctaacagattcgttgccgcatgtgtgcgtgcagtcctgtaatctcattcgttgtaccgcggcacatgtgcattagtcgtcggtgtatagtaatgactatcctcccatttgatttcataggcaggactgaagtagtggtcactgaccaccgtggcgggacggtcgaaactggaaacccaacattgtgatagctttactggtccaatttctgtggacggctttgtacctgtacgtttttccgtttcctatgacccagaacgaggaaaaatctataatgagcaggaaatgtgatattcctttatgctgctccgttggttttcatatattggctaggacagcgtccaagggtagcgttgggaaccgcgacgtccaagaaaggatagtgttgaaacttgtgacgtttaaggaggtgtttgtttgagattataatccggctagattatataatcctataaaattttgaactaagtgttagtttaattttttgtgag

SEQ ID NO: 37475 - DNA, 3050 bp, Zea Mays
ctgtaatcactctgttatgctccttgttcatgcgttgattccgctggctcccgatgatctgttgctactactgtttgtacttggtctaatggtcattggatcactcatgttgtgttcactttcaagtcgggcaaataataattttttgggtgggacttttggtttaagtacaatgggaacttcgaaagggagggtactgtgtatgttggattgatcttagggcctccacgaagtgtatagctacctcaaacaaattattatttctgaaatgtatttttatggatgtttgcatacatatctagataggggtgcttacggcttaccattatgccttagctctagatgttgttcttgttacccatggtggcagcatcaactgaacgcatctctcacccccctgttgctgaacccagagagtgtgactggtataatcttgagaaatctaaacgtgtgaagtcatttcggtgtggagaatatgatgaatgtatagaaaaagccaaggctctagctcgccagcaaaagaggacacatgctgaagggagatatgttcgcagagaggatgccattttgcatgcccttgaaattgaaaggtcccatttttcaaataactgtgatgattttgaagaggagaccggcaatgatttgtgtgcatcccagaatatgtgttctgcaaaatctataaatataaatgggctcagcaaaaaatctcgtggtgcaaggagtttgtatgatacagaagaaaattcagctcaagagtcatgtcaaacattgacactttataaaaagccacaaaatttatcctcttcgagcactaggtatgcatcgtcaaaaaggaagaagcggaagggacataaaaatcatgaggatgatacagttcaaggattccagcgtatgagagatcttagggagattggaacaaacaatgttcccaagcagaagtctggtgcaggaattgtttcagatgtacctcttcttgaaagtggaccaagctttgactatgatttgtccagtgccaatgggataaaaaagggtaagcagtctcagacatccataaaaaagaaacggtccaatatcgggcaatcctgtgatagtttgagtaagaaagataggcatcaccctctatcaatgttatgtgaagattcagaagtgtctggaacttattatcattgggaccgttcaggccagtcttctagtgagtacctaggaggacagatacccaatttgtttgaatcaagtagggcaaaaactagtctttcaactgatgtaaataattgttcgtatagctcaggcacttcaagtttggagatattattagatacatcacacatcaaacataaaggttcggtaaatgctgttactctcaaggttgctgacccatgcacgactagaattctcaatgatgactgccctgattgtgatgagtttcttgctgccgatactttggagggtgatgttctggaggaaggtaaaggtgccatttggatacttatggatcttgtgcatccataaaggatcaaatttcaaaactgggtaatcaaagtactggctgtgccataggtggcacaccctcaacttggcataatagaaattccgagaagaaaagcataacgtctgtcaacttgattcctaaagagagccacaagagggataaaaattcactgttgcaatgtgaagggattataaaatcggaaggtactatccttcggcctgctgaacttgaggataatacaaaacataccactcctgagcatgacgagtcctctgaaactataagcaaccattcaaactctgagaagggcacaaaatcattacccaattactttccacttcaagtactaccaccacctggacagcaacctgatctgaaacttccaagatgccctgtaacgagtccaaccaagagaacgagtccgaccaagagagcacacgcaggttatagattatatgatgttgagctgactgtccaaagaagctacaagggtcatcatgtgccccttgtttccctcatcagtaaatggacaggtaaaccaattgtggggtatcctgtcactgtggaggttttggaggatagtcgtcccacaacaagtagaaatgagcatcgcccgccgatgggtagtctcggctccttaccaaagagcagagttgcagaaccaaggcaagcaagatcttcacccgcatcacgatcaaaatcaaaacccagtggacgtaaaaaggcctcagaacatgatttggacaagtcttggcggccccatatcaagaaaccagcatcttcgccgaggaaaatgcggaggctgtcatctttcgccggcagccggagagagagtgcagaccagaagcctgtagttgtgaaggctggcggaccagcagtcgcgtgtgtcccgcttcgacttgttttgagtaggatcaatgaagcactaagcttcccgttgagacaagaaaaccccacctgaggctgtggcagttttgcattgctgagatagaatgtgggcaggcatatacatttgctaggttttctttgtacattagttaccatattatctgaaagcgtattgcctggcatatttatatcagtatattatgatgtaatctgtagccacactaggcaattacgacttacccaccgtgagatatgggccgaacatccaatggtgggaggaaataaaggggcatcagttgctgtgggctgtggcttcatctgacagtggaagcaaaaatggcagcagacctgttcaccataccatacatcatacaaaattttccccgtatttgctggcaacttttagttgatccaggcaagttgctgtatgtaatcagtgattgcaaggattgcagggcttcgtgcaactacttgcagctttgagtgagttgtagattcttttatgtgccaattctctagtgttgatgctggtcactaccaggcatctctagtgttgatgctggtctctacggtgtagatgcttatatatatatgctaattctgtgacatcaccggtgcagtttttttgtcacatcgcataaggtcgaggtatccaaactttggcatgggagag

SEQ ID NO: 37476 - DNA, 3521 bp, Zea Mays
ctgtaatcactctgttatgctccttgttcatgcgttgattccgctggctcccgatgatctgttgctactactgtttgtacttggtctaatggtcattggatcactcatgttgtgttcactttcaagtcgggcaaataataattttttgggtgggacttttggtttaagtacaatgggaacttcgaaagggagggtactgtgtatgttggattgatcttagggcctccacgaagtgtatagctacctcaaacaaattattatttctgaaatgtatttttatggatgtttgcatacatatctagataggggtgcttacggcttaccattatgccttagctctagatgttgttcttgttacccatggtggcagcatcaactgaacgcatctctcacccccctgttgctgaacccagagagtggtattaggtaacttaagtatccgttaggtgacaaggataaggttacctttctatgtatgtcttgggcggcaaaaaaaatccatgcatttcttgaaattaatacatatacattaaaattgtgtgcacagtgattgatatattttcttggtttatatttagtctatgaacatactcttcaaatctttgtgtattttaaacattgttctgatattaagaaaatattaccctatatgaagttggttttgaattttttattcattctggtgagctgatgtttcgaagttgtatacatgttttaggcttcaatatttacttttaacttcccaaacaactgcataaattaatgtttatcactcttccattgcatcctcaaatgttttctgtttgtagcactgaacatcatcagtttactaaagtattgacctgcactctaaagtttgaaatatctatcttacttgctatgttggactttgccacagtgactggtataatcttgagaaatctaaacgtgtgaagtcatttcggtgtggagaatatgatgaatgtatagaaaaagccaaggctctagctcgccagcaaaagaggacacatgctgaagggagatatgttcgcagagaggatgccattttgcatgcccttgaaattgaaaggtcccatttttcaaataactgtgatgattttgaagaggagaccggcaatgatttgtgtgcatcccagaatatgtgttctgcaaaatctataaatataaatgggctcagcaaaaaatctcgtggtgcaaggagtttgtatgatacagaagaaaattcagctcaagagtcatgtcaaacattgacactttataaaaagccacaaaatttatcctcttcgagcactaggtatgcatcgtcaaaaaggaagaagcggaagggacataaaaatcatgaggatgatacagttcaaggattccagcgtatgagagatcttagggagattggaacaaacaatgttcccaagcagaagtctggtgcaggaattgtttcagatgtacctcttcttgaaagtggaccaagctttgactatgatttgtccagtgccaatgggataaaaaagggtaagcagtctcagacatccataaaaaagaaacggtccaatatcgggcaatcctgtgatagtttgagtaagaaagataggcatcaccctctatcaatgttatgtgaagattcagaagtgtctggaacttattatcattgggaccgttcaggccagtcttctagtgagtacctaggaggacagatacccaatttgtttgaatcaagtagggcaaaaactagtctttcaactgatgtaaataattgttcgtatagctcaggcacttcaagtttggagatattattagatacatcacacatcaaacataaaggttcggtaaatgctgttactctcaaggttgctgacccatgcacgactagaattctcaatgatgactgccctgattgtgatgagtttcttgctgccgatactttggagggtgatgttctggaggaaggccatttggatacttatggatcttgtgcatccataaaggatcaaatttcaaaactgggtaatcaaagtactggctgtgccataggtggcacaccctcaacttggcataatagaaattccgagaagaaaagcataacgtctgtcaacttgattcctaaagagagccacaagagggataaaaattcactgttgcaatgtgaagggattataaaatcggaaggtactatccttcggcctgctgaacttgaggataatacaaaacataccactcctgagcatgacgagtcctctgaaactataagcaaccattcaaactctgagaagggcacaaaatcattacccaattactttccacttcaagtactaccaccacctggacagcaacctgatctgaaacttccaagatgccctgtaacgagtccaaccaagagaacgagtccgaccaagagagcacacgcaggttatagattatatgatgttgagctgactgtccaaagaagctacaagggtcatcatgtgccccttgtttccctcatcagtaaatggacaggtaaaccaattgtggggtatcctgtcactgtggaggttttggaggatagtcgtcccacaacaagtagaaatgagcatcgcccgccgatgggtagtctcggctccttaccaaagagcagagttgcagaaccaaggcaagcaagatcttcacccgcatcacgatcaaaatcaaaacccagtggacgtaaaaaggcctcagaacatgatttggacaagtcttggcggccccatatcaagaaaccagcatcttcgccgaggaaaatgcggaggctgtcatctttcgccggcagccggagagagagtgcagaccagaagcctgtagttgtgaaggctggcggaccagcagtcgcgtgtgtcccgcttcgacttgttttgagtaggatcaatgaagcactaagcttcccgttgagacaagaaaaccccacctgaggctgtggcagttttgcattgctgagatagaatgtgggcaggcatatacatttgctaggttttctttgtacattagttaccatattatctgaaagcgtattgcctggcatatttatatcagtatattatgatgtaatctgtagccacactaggcaattacgacttacccaccgtgagatatgggccgaacatccaatggtgggaggaaataaaggggcatcagttgctgtgggctgtggcttcatctgacagtggaagcaaaaatggcagcagacctgttcaccataccatacatcatacaaaattttccccgtatttgctggcaacttttagttgatccaggcaagttgctgtatgtaatcagtgattgcaaggattgcagggcttcgtgcaactacttgcagctttgagtgagttgtagattcttttatgtgccaattctctagtgttgatgctggtcactaccaggcatctctagtgttgatgctggtctctacggtgtagatgcttatatatatatgctaattctgtgacatcaccggtgcagtttttttgtcacatcgcataaggtcgaggtatccaaactttggcatgggagag

SEQ ID NO: 37477 - DNA, 2951 bp, Zea Mays
ctgtaatcactctgttatgctccttgttcatgcgttgattccgctggctcccgatgatctgttgctactactgtttgtacttggtctaatggtcattggatcactcatgttgtgttcactttcaagtcgggcaaataataattttttgggtgggacttttggtttaagtacaatgggaacttcgaaagggagggtactgtgtatgttggattgatcttagggcctccacgaagtgtatagctacctcaaacaaattattatttctgaaatgtatttttatggatgtttgcatacatatctagataggggtgcttacggcttaccattatgccttagctctagatgttgttcttgttacccatggtggcagcatcaactgaacgcatctctcacccccctgttgctgaacccagagagtgtgactggtataatcttgagaaatctaaacgtgtgaagtcatttcggtgtggagaatatgatgaatgtatagaaaaagccaaggctctagctcgccagcaaaagaggacacatgctgaagggagatatgttcgcagagaggatgccattttgcatgcccttgaaattgaaaggtcccatttttcaaataactgtgatgattttgaagaggagaccggcaatgatttgtgtgcatcccagaatatgtgttctgcaaaatctataaatataaatgggctcagcaaaaaatctcgtggtgcaaggagtttgtatgatacagaagaaaattcagctcaagagtcatgtcaaacattgacactttataaaaagccacaaaatttatcctcttcgagcactaggtatgcatcgtcaaaaaggaagaagcggaagggacataaaaatcatgaggatgatacagttcaaggattccagcgtatgagagatcttagggagattggaacaaacaatgttcccaagcagaagtctggtgcaggaattgtttcagatgtacctcttcttgaaagtggaccaagctttgactatgatttgtccagtgccaatgggataaaaaagggtaagcagtctcagacatccataaaaaagaaacggtccaatatcgggcaatcctgtgatagtttgagtaagaaagataggcatcaccctctatcaatgttatgtgaagattcagaagtgtctggaacttattatcattgggaccgttcaggccagtcttctactcaggcacttcaagtttggagatattattagatacatcacacatcaaacataaaggttcggtaaatgctgttactctcaaggttgctgacccatgcacgactagaattctcaatgatgactgccctgattgtgatgagtttcttgctgccgatactttggagggtgatgttctggaggaaggccatttggatacttatggatcttgtgcatccataaaggatcaaatttcaaaactgggtaatcaaagtactggctgtgccataggtggcacaccctcaacttggcataatagaaattccgagaagaaaagcataacgtctgtcaacttgattcctaaagagagccacaagagggataaaaattcactgttgcaatgtgaagggattataaaatcggaaggtactatccttcggcctgctgaacttgaggataatacaaaacataccactcctgagcatgacgagtcctctgaaactataagcaaccattcaaactctgagaagggcacaaaatcattacccaattactttccacttcaagtactaccaccacctggacagcaacctgatctgaaacttccaagatgccctgtaacgagtccaaccaagagaacgagtccgaccaagagagcacacgcaggttatagattatatgatgttgagctgactgtccaaagaagctacaagggtcatcatgtgccccttgtttccctcatcagtaaatggacaggtaaaccaattgtggggtatcctgtcactgtggaggttttggaggatagtcgtcccacaacaagtagaaatgagcatcgcccgccgatgggtagtctcggctccttaccaaagagcagagttgcagaaccaaggcaagcaagatcttcacccgcatcacgatcaaaatcaaaacccagtggacgtaaaaaggcctcagaacatgatttggacaagtcttggcggccccatatcaagaaaccagcatcttcgccgaggaaaatgcggaggctgtcatctttcgccggcagccggagagagagtgcagaccagaagcctgtagttgtgaaggctggcggaccagcagtcgcgtgtgtcccgcttcgacttgttttgagtaggatcaatgaagcactaagcttcccgttgagacaagaaaaccccacctgaggctgtggcagttttgcattgctgagatagaatgtgggcaggcatatacatttgctaggttttctttgtacattagttaccatattatctgaaagcgtattgcctggcatatttatatcagtatattatgatgtaatctgtagccacactaggcaattacgacttacccaccgtgagatatgggccgaacatccaatggtgggaggaaataaaggggcatcagttgctgtgggctgtggcttcatctgacagtggaagcaaaaatggcagcagacctgttcaccataccatacatcatacaaaattttccccgtatttgctggcaacttttagttgatccaggcaagttgctgtatgtaatcagtgattgcaaggattgcagggcttcgtgcaactacttgcagctttgagtgagttgtagattcttttatgtgccaattctctagtgttgatgctggtcactaccaggcatctctagtgttgatgctggtctctacggtgtagatgcttatatatatatgctaattctgtgacatcaccggtgcagtttttttgtcacatcgcataaggtcgaggtatccaaactttggcatgggagag

SEQ ID NO: 37478 - DNA, 2969 bp, Zea Mays
tcctattgccctctgtaatcactctgttatgctccttgttcatgcgttgattccgctggctcccgatgatctgttgctactactgtttgtacttggtctaatggtcattggatcactcatgttgtgttcactttcaagtcgggcaaataataattttttgggtgggacttttggtttaagtacaatgggaacttcgaaagggagggtactgtgtatgttggattgatcttagggcctccacgaagtgtatagctacctcaaacaaattattatttctgaaatgtatttttatggatgtttgcatacatatctagataggggtgcttacggcttaccattatgccttagctctagatgttgttcttgttacccatggtggcagcatcaactgaacgcatctctcacccccctgttgctgaacccagagagtgtgactggtataatcttgagaaatctaaacgtgtgaagtcatttcggtgtggagaatatgatgaatgtatagaaaaagccaaggctctagctcgccagcaaaagaggacacatgctgaagggagatatgttcgcagagaggatgccattttgcatgcccttgaaattgaaaggtcccatttttcaaataactgtgatgattttgaagaggagaccggcaatgatttgtgtgcatcccagaatatgtgttctgcaaaatctataaatataaatgggctcagcaaaaaatctcgtggtgcaaggagtttgtatgatacagaagaaaattcagctcaagagtcatgtcaaacattgacactttataaaaagccacaaaatttatcctcttcgagcactaggtatgcatcgtcaaaaaggaagaagcggaagggacataaaaatcatgaggatgatacagttcaaggattccagcgtatgagagatcttagggagattggaacaaacaatgttcccaagcagaagtctggtgcaggaattgtttcagatgtacctcttcttgaaagtggaccaagctttgactatgatttgtccagtgccaatgggataaaaaagggtaagcagtctcagacatccataaaaaagaaacggtccaatatcgggcaatcctgtgatagtttgagtaagaaagataggcatcaccctctatcaatgttatgtgaagattcagaagtgtctggaacttattatcattgggaccgttcaggccagtcttctactcaggcacttcaagtttggagatattattagatacatcacacatcaaacataaaggttcggtaaatgctgttactctcaaggttgctgacccatgcacgactagaattctcaatgatgactgccctgattgtgatgagtttcttgctgccgatactttggagggtgatgttctggaggaaggtaaaggccatttggatacttatggatcttgtgcatccataaaggatcaaatttcaaaactgggtaatcaaagtactggctgtgccataggtggcacaccctcaacttggcataatagaaattccgagaagaaaagcataacgtctgtcaacttgattcctaaagagagccacaagagggataaaaattcactgttgcaatgtgaagggattataaaatcggaaggtactatccttcggcctgctgaacttgaggataatacaaaacataccactcctgagcatgacgagtcctctgaaactataagcaaccattcaaactctgagaagggcacaaaatcattacccaattactttccacttcaagtactaccaccacctggacagcaacctgatctgaaacttccaagatgccctgtaacgagtccaaccaagagaacgagtccgaccaagagagcacacgcaggttatagattatatgatgttgagctgactgtccaaagaagctacaagggtcatcatgtgccccttgtttccctcatcagtaaatggacaggtaaaccaattgtggggtatcctgtcactgtggaggttttggaggatagtcgtcccacaacaagtagaaatgagcatcgcccgccgatgggtagtctcggctccttaccaaagagcagagttgcagaaccaaggcaagcaagatcttcacccgcatcacgatcaaaatcaaaacccagtggacgtaaaaaggcctcagaacatgatttggacaagtcttggcggccccatatcaagaaaccagcatcttcgccgaggaaaatgcggaggctgtcatctttcgccggcagccggagagagagtgcagaccagaagcctgtagttgtgaaggctggcggaccagcagtcgcgtgtgtcccgcttcgacttgttttgagtaggatcaatgaagcactaagcttcccgttgagacaagaaaaccccacctgaggctgtggcagttttgcattgctgagatagaatgtgggcaggcatatacatttgctaggttttctttgtacattagttaccatattatctgaaagcgtattgcctggcatatttatatcagtatattatgatgtaatctgtagccacactaggcaattacgacttacccaccgtgagatatgggccgaacatccaatggtgggaggaaataaaggggcatcagttgctgtgggctgtggcttcatctgacagtggaagcaaaaatggcagcagacctgttcaccataccatacatcatacaaaattttccccgtatttgctggcaacttttagttgatccaggcaagttgctgtatgtaatcagtgattgcaaggattgcagggcttcgtgcaactacttgcagctttgagtgagttgtagattcttttatgtgccaattctctagtgttgatgctggtcactaccaggcatctctagtgttgatgctggtctctacggtgtagatgcttatatatatatgctaattctgtgacatcaccggtgcagtttttttgtcacatcgcataaggtcgaggtatccaaactttggcatgggagag

SEQ ID NO: 37479 - DNA, 1356 bp, Zea Mays
attatgggaaatcgtggatacatcctcagtgacctaaaattttctggtcagggtcaagttttcgaacagaagctactggatatggtctggtaaagtgctaccttaattttcgtttggctggagatagtgtgttctgtgggtgctatagttgtttcacaagtaatatttctgttgcatgtgttgactggaccattgtccttgttcaaagtgaaacactatatgaaatcattctatctatgcaggtgttttttgcacgtcttttacttgctgaaatgaataaagagcttaaaggattaagatgtgtgatcagcggttctgggaagatagcaatgcatgttttggaaaagcttttgccttgtggagccattcctattactgtctcagattcaaagggatatttgttagatgaagatgggtttgattatatgaaatattcacttctaagggatattaaggctcagcaaaagagcctcaaggagtacttgaaatcatatccacatgctaagtatattgatgatgcaaaaccatggagccagcggtgtgatgttgcatttccttgtgcatcacataatgagattgaccaaggggaggctgttgcaatcagcaactctggttgtcgtgttcttgtcgaatgttcaaatatgtcgtgcactgttcaagctgttgatatcctaagaaaggcaaaagttattgttgctccagcaaaggcaactgctgctggtggggtagcacttggggagattgaattgaatccagagtttaatttgatgcaattgtcagtggaggattttgagaatagaattcaagatgcaataaagcaaacatatgaaaggtcggtcaaagctgctcaagattacgggatcatgaaagaaagccccgagtttttggtccatggcgcgaacatttgtgctttccttaatatcgcgcaagccatgactgaccagggatgtgtttagttaggcctggattctgtcaagaagcttcaactggagctttctgcaaccgcgagggaaaaaactttctgacaactagaggtgctttgatgcttaaactttgagtagttctgcacaaatcttgaagccctacaaaacagggagtaactaggatccatttacccctgtttatgctagaaatgtgtacagctaaggtgtaggaaaggcaactaggatccatttatgctagaaatgtgtacagctaaatgtaaatggaaagttctacattgtatgcaaagcctatatccgcaccatctgttacaccaatttgatttcattgttatgaacgacatattattctagtgcaaccacgctaattggtgcaacagtgcaatcaagataagacacgacaatggagttgaga

SEQ ID NO: 37480 - DNA, 1240 bp, Zea Mays
ctgaagtccatatccagaatttagattatgggaaatcgtggatacatcctcagtggaaattttacaggacctaaaattttctggtcagggtcaagttttcgaacagaagctactggatatggtctggtgttttttgcacgtcttttacttgctgaaatgaataaagagcttaaaggattaagatgtgtgatcagcggttctgggaagatagcaatgcatgttttggaaaagcttttgccttgtggagccattcctattactgtctcagattcaaagggatatttgttagatgaagatgggtttgattatatgaaatattcacttctaagggatattaaggctcagcaaaagagcctcaaggagtacttgaaatcatatccacatgctaagtatattgatgatgcaaaaccatggagccagcggtgtgatgttgcatttccttgtgcatcacataatgagattgaccaaggggaggctgttgcaatcagcaactctggttgtcgtgttcttgtcgaatgttcaaatatgtcgtgcactgttcaagctgttgatatcctaagaaaggcaaaagttattgttgctccagcaaaggcaactgctgctggtggggtagcacttggggagattgaattgaatccagagtttaatttgatgcaattgtcagtggaggattttgagaatagaattcaagatgcaataaagcaaacatatgaaaggtcggtcaaagctgctcaagattacgggatcatgaaagaaagccccgagtttttggtccatggcgcgaacatttgtgctttccttaatatcgcgcaagccatgactgaccagggatgtgtttagttaggcctggattctgtcaagaagcttcaactggagctttctgcaaccgcgagggaaaaaactttctgacaactagaggtgctttgatgcttaaactttgagtagttctgcacaaatcttgaagccctacaaaacagggagtaactaggatccatttacccctgtttatgctagaaatgtgtacagctaaggtgtaggaaaggcaactaggatccatttatgctagaaatgtgtacagctaaatgtaaatggaaagttctacattgtatgcaaagcctatatccgcaccatctgttacaccaatttgatttcattgttatgaacgacatattattctagtgcaaccacgctaattggtgcaacagtgcaatcaagataagacacgacaatggagttgaga

SEQ ID NO: 37481 - DNA, 2580 bp, Zea Mays
gcttgctgtcgccggccgcagtctccgccgcggctcacggatgccctgcatcctccttcccgcggccgcgcttaatcgaagccttcttctgcaccaaccttatcctgtcagctggaaacgccaaattctccaaaccctagcgccaaaatccccattctgatcgctgcaaccggagccggattctcttggtttacgcctggcgctcgtatcgtgtctccgcatgatgcaacgagcacgcgcatgaactcgatggatgaaatcaacctgctgcggcaggcgcagcggcagcatcagcatcatctcatggtgcgcggcatcggcgaggagatcgacctcgagatcggccctgtcgacgatccctctttttccggagcttccttagtggccgttacgtccacgcacgacactgtcgttcacgccgacgaccacaagagcctcctcatcccgtgttcgcagcccggcgcggcggacgggctggcgccgcagcagcacctgtcgcagggggaagagcatgacgggatgctcaggtcgccgtcggggcacaccaagaagaagaagaaggtggtcaagaaatggcgggaggagtgggcggacacctacaagtgggcctacgtcgccgtgcacgacaccaccaccaggatcttctgctcggtgtgcaaggagtacggccggaagcaccgccggaatccatatggtaacgagggaagcaggaatatgcagatgagtgcgcttgaggagcacaacaatagcttgttgcataaggaggcgctccggttacagatggcctccaaggagaagttgcagcctcccgagattgaggggccggtctatgtcaaagctttatcgaaaacagcagcatcaatacttgaatgtgtcctaaggagggatccccatgaagctgaatatatacagtcgatccaggaggtggttcattccttagaacctgttttggtgaagaatgcccaatatattcaaattttggagcgtttgttggaacctgagagatgctttatcttcagagtgccatggattgatgacagaggtgaagcacacgtcaatagaggtttccgtgtgcaattcagtcaggcgttaggtccatgcaggggtggtcttcggtttcacccatccatgagcttaagtgtggcaaagtttctggcctttgaacatactttaaagaatgctttgtcactatataaacttggaggtgctgctggaggaagtgattttgatccaaagggaaaaagtgataatgagataatgcgcttttgccaaagtttcatggatgagctgtatagatatttgggccctgatcaggattttcccgctgaagatattggtgttggtccaagggaaatgggttacctttttgggcagtatagacgtctttctggtcattttcagggaaattttacaggacctaaaattttctggtcagggtcaagttttcgaacagaagctactggatatggtctggtgttttttgcacgtcttttacttgctgaaatgaataaagagcttaaaggattaagatgtgtgatcagcggttctgggaagatagcaatgcatgttttggaaaagcttttgccttgtggagccattcctattactgtctcagattcaaagggatatttgttagatgaagatgggtttgattatatgaaatattcacttctaagggatattaaggctcagcaaaagagcctcaaggagtacttgaaatcatatccacatgctaagtatattgatgatgcaaaaccatggagccagcggtgtgatgttgcatttccttgtgcatcacataatgagattgaccaaggggaggctgttgcaatcagcaactctggttgtcgtgttcttgtcgaatgttcaaatatgtcgtgcactgttcaagctgttgatatcctaagaaaggcaaaagttattgttgctccagcaaaggcaactgctgctggtggggtagcacttggggagattgaattgaatccagagtttaatttgatgcaattgtcagtggaggattttgagaatagaattcaagtaaactctgctgctcctgaccacctggcagtcatttttcgcttctgcttcccaattgtgattccttgtttttggtccatggcgcgaacatttgtgctttccttaatatcgcgcaagccatgactgaccagggatgtgtttagttaggcctggattctgtcaagaagcttcaactggagctttctgcaaccgcgagggaaaaaactttctgacaactagaggtgctttgatgcttaaactttgagtagttctgcacaaatcttgaagccctacaaaacagggagtaactaggatccatttacccctgtttatgctagaaatgtgtacagctaaggtgtaggaaaggcaactaggatccatttatgctagaaatgtgtacagctaaatgtaaatggaaagttctacattgtatgcaaagcctatatccgcaccatctgttacaccaatttgatttcattgttatgaacgacatattattctagtgcaaccacgctaattggtgcaacagtgcaatcaagataagacacgacaatggagttgaga

SEQ ID NO: 37482 - DNA, 2695 bp, Zea Mays
gtttctgcttgctgtcgccggccgcagtctccgccgcggctcacggatgccctgcatcctccttcccgcggccgcgcttaatcgaagccttcttctgcaccaaccttatcctgtcagctggaaacgccaaattctccaaaccctagcgccaaaatccccattctgatcgctgcaaccggagccggattctcttggtttacgcctggcgctcgtatcgtgtctccgcatgatgcaacgagcacgcgcatgaactcgatggatgaaatcaacctgctgcggcaggcgcagcggcagcatcagcatcatctcatggtgcgcggcatcggcgaggagatcgacctcgagatcggccctgtcgacgatccctctttttccggagcttccttagtggccgttacgtccacgcacgacactgtcgttcacgccgacgaccacaagagcctcctcatcccgtgttcgcagcccggcgcggcggacgggctggcgccgcagcagcacctgtcgcagggggaagagcatgacgggatgctcaggtcgccgtcggggcacaccaagaagaagaagaaggtggtcaagaaatggcgggaggagtgggcggacacctacaagtgggcctacgtcgccgtgcacgacaccaccaccaggatcttctgctcggtgtgcaaggagtacggccggaagcaccgccggaatccatatggtaacgagggaagcaggaatatgcagatgagtgcgcttgaggagcacaacaatagcttgttgcataaggaggcgctccggttacagatggcctccaaggagaagttgcagcctcccgagattgaggggccggtctatgtcaaagctttatcgaaaacagcagcatcaatacttgaatgtgtcctaaggagggatccccatgaagctgaatatatacagtcgatccaggaggtggttcattccttagaacctgttttggtgaagaatgcccaatatattcaaattttggagcgtttgttggaacctgagagatgctttatcttcagagtgccatggattgatgacagaggtgaagcacacgtcaatagaggtttccgtgtgcaattcagtcaggcgttaggtccatgcaggggtggtcttcggtttcacccatccatgagcttaagtgtggcaaagtttctggcctttgaacatactttaaagaatgctttgtcactatataaacttggaggtgctgctggaggaagtgattttgatccaaagggaaaaagtgataatgagataatgcgcttttgccaaagtttcatggatgagctgtatagatatttgggccctgatcagactttgatcttttggtccaggattttcccgctgaagatattggtgttggtccaagggaaatgggttacctttttgggcagtatagacgtctttctggtcattttcagggaaattttacaggacctaaaattttctggtcagggtcaagttttcgaacagaagctactggatatggtctggtgttttttgcacgtcttttacttgctgaaatgaataaagagcttaaaggattaaggtttcttacattgatccactaaatgtttctttgttataatttagccttttgttactttaatactatgcaaagttttctgcagatgtgtgatcagcggttctgggaagatagcaatgcatgttttggaaaagcttttgccttgtggagccattcctattactgtctcagattcaaagggatatttgttagatgaagatgggtttgattatatgaaatattcacttctaagggatattaaggctcagcaaaagagcctcaaggagtacttgaaatcatatccacatgctaagtatattgatgatgcaaaaccatggagccagcggtgtgatgttgcatttccttgtgcatcacataatgagattgaccaaggggaggctgttgcaatcagcaactctggttgtcgtgttcttgtcgaatgttcaaatatgtcgtgcactgttcaagctgttgatatcctaagaaaggcaaaagttattgttgctccagcaaaggcaactgctgctggtggggtagcacttggggagattgaattgaatccagagtttaatttgatgcaattgtcagtggaggattttgagaatagaattcaagatgcaataaagcaaacatatgaaaggtcggtcaaagctgctcaagattacgggatcatgaaagaaagccccgagtttttggtccatggcgcgaacatttgtgctttccttaatatcgcgcaagccatgactgaccagggatgtgtttagttaggcctggattctgtcaagaagcttcaactggagctttctgcaaccgcgagggaaaaaactttctgacaactagaggtgctttgatgcttaaactttgagtagttctgcacaaatcttgaagccctacaaaacagggagtaactaggatccatttacccctgtttatgctagaaatgtgtacagctaaggtgtaggaaaggcaactaggatccatttatgctagaaatgtgtacagctaaatgtaaatggaaagttctacattgtatgcaaagcctatatccgcaccatctgttacaccaatttgatttcattgttatgaacgacatattattctagtgcaaccacgctaattggtgcaacagtgcaatcaagataagacacgacaatggagttgaga

SEQ ID NO: 37483 - DNA, 2664 bp, Zea Mays
gctgtttctgcttgctgtcgccggccgcagtctccgccgcggctcacggatgccctgcatcctccttcccgcggccgcgcttaatcgaagccttcttctgcaccaaccttatcctgtcagctggaaacgccaaattctccaaaccctagcgccaaaatccccattctgatcgctgcaaccggagccggattctcttggtttacgcctggcgctcgtatcgtgtctccgcatgatgcaacgagcacgcgcatgaactcgatggatgaaatcaacctgctgcggcaggcgcagcggcagcatcagcatcatctcatggtgcgcggcatcggcgaggagatcgacctcgagatcggccctgtcgacgatccctctttttccggagcttccttagtggccgttacgtccacgcacgacactgtcgttcacgccgacgaccacaagagcctcctcatcccgtgttcgcagcccggcgcggcggacgggctggcgccgcagcagcacctgtcgcagggggaagagcatgacgggatgctcaggtcgccgtcggggcacaccaagaagaagaagaaggtggtcaagaaatggcgggaggagtgggcggacacctacaagtgggcctacgtcgccgtgcacgacaccaccaccaggatcttctgctcggtgtgcaaggagtacggccggaagcaccgccggaatccatatggtaacgagggaagcaggaatatgcagatgagtgcgcttgaggagcacaacaatagcttgttgcataaggaggcgctccggttacagatggcctccaaggagaagttgcagcctcccgagattgaggggccggtctatgtcaaagctttatcgaaaacagcagcatcaatacttgaatgtgtcctaaggagggatccccatgaagctgaatatatacagtcgatccaggaggtggttcattccttagaacctgttttggtgaagaatgcccaatatattcaaattttggagcgtttgttggaacctgagagatgctttatcttcagagtgccatggattgatgacagaggtgaagcacacgtcaatagaggtttccgtgtgcaattcagtcaggcgttaggtccatgcaggggtggtcttcggtttcacccatccatgagcttaagtgtggcaaagtttctggcctttgaacatactttaaagaatgctttgtcactatataaacttggaggtgctgctggaggaagtgattttgatccaaagggaaaaagtgataatgagataatgcgcttttgccaaagtttcatggatgagctgtatagatatttgggccctgatcaggattttcccgctgaagatattggtgttggtccaagggaaatgggttacctttttgggcagtatagacgtctttctggtcattttcagggtcaagttttcgaacagaagctactggatatggtctggtgttttttgcacgtcttttacttgctgaaatgaataaagagcttaaaggattaagatgtgtgatcagcggttctgggaagatagcaatgcatgttttggaaaagcttttgccttgtggagccattcctattactgtctcagattcaaagggatatttgttagatgaagatgggtttgattatatgaaatattcacttctaagggatattaaggctcagcaaaagagcctcaaggagtacttgaaatcatatccacatgctaagtatattgatgatgcaaaaccatggagccagcggtgtgatgttgcatttccttgtgcatcacataatgagattgaccaaggggaggctgttgcaatcagcaactctggttgtcgtgttcttgtcgaatgttcaaatatgtcgtgcactgttcaagctgttgatatcctaagaaaggcaaaagttattgttgctccagcaaaggcaactgctgctggtggggtagcacttggggagattgaattgaatccagagtttaatttgatgcaattgtcagtggaggattttgagaatagaattcaagtaaactctgctgctcctgaccacctggcagtcatttttcgcttctgcttcccaattgtgattccttgtgagttctctcttttctctgttggatttaagcaggatgcaataaagcaaacatatgaaaggtcggtcaaagctgctcaagattacgggatcatgaaagaaagccccgagtttttggtccatggcgcgaacatttgtgctttccttaatatcgcgcaagccatgactgaccagggatgtgtttagttaggcctggattctgtcaagaagcttcaactggagctttctgcaaccgcgagggaaaaaactttctgacaactagaggtgctttgatgcttaaactttgagtagttctgcacaaatcttgaagccctacaaaacagggagtaactaggatccatttacccctgtttatgctagaaatgtgtacagctaaggtgtaggaaaggcaactaggatccatttatgctagaaatgtgtacagctaaatgtaaatggaaagttctacattgtatgcaaagcctatatccgcaccatctgttacaccaatttgatttcattgttatgaacgacatattattctagtgcaaccacgctaattggtgcaacagtgcaatcaagataagacacgacaatggagttgaga

SEQ ID NO: 37484 - DNA, 2768 bp, Zea Mays
gctgtttctgcttgctgtcgccggccgcagtctccgccgcggctcacggatgccctgcatcctccttcccgcggccgcgcttaatcgaagccttcttctgcaccaaccttatcctgtcagctggaaacgccaaattctccaaaccctagcgccaaaatccccattctgatcgctgcaaccggagccggattctcttggtttacgcctggcgctcgtatcgtgtctccgcatgatgcaacgagcacgcgcatgaactcgatggatgaaatcaacctgctgcggcaggcgcagcggcagcatcagcatcatctcatggtgcgcggcatcggcgaggagatcgacctcgagatcggccctgtcgacgatccctctttttccggagcttccttagtggccgttacgtccacgcacgacactgtcgttcacgccgacgaccacaagagcctcctcatcccgtgttcgcagcccggcgcggcggacgggctggcgccgcagcagcacctgtcgcagggggaagagcatgacgggatgctcaggtcgccgtcggggcacaccaagaagaagaagaaggtggtcaagaaatggcgggaggagtgggcggacacctacaagtgggcctacgtcgccgtgcacgacaccaccaccaggatcttctgctcggtgtgcaaggagtacggccggaagcaccgccggaatccatatggtaacgagggaagcaggaatatgcagatgagtgcgcttgaggagcacaacaatagcttgttgcataaggaggcgctccggttacagatggcctccaaggagaagttgcagcctcccgagattgaggggccggtctatgtcaaagctttatcgaaaacagcagcatcaatacttgaatgtgtcctaaggagggatccccatgaagctgaatatatacagtcgatccaggaggtggttcattccttagaacctgttttggtgaagaatgcccaatatattcaaattttggagcgtttgttggaacctgagagatgctttatcttcagagtgccatggattgatgacagaggtgaagcacacgtcaatagaggtttccgtgtgcaattcagtcaggcgttaggtccatgcaggggtggtcttcggtttcacccatccatgagcttaagtgtggcaaagtttctggcctttgaacatactttaaagaatgctttgtcactatataaacttggaggtgctgctggaggaagtgattttgatccaaagggaaaaagtgataatgagataatgcgcttttgccaaagtttcatggatgagctgtatagatatttgggccctgatcaggattttcccgctgaagatattggtgttggtccaagggaaatgggttacctttttgggcagtatagacgtctttctggtcattttcagggaaattttacaggacctaaaattttctggtcagggtcaagttttcgaacagaagctactggatatggtctggtaaagtgctaccttaattttcgtttggctggagatagtgtgttctgtgggtgctatagttgtttcacaagtgttttttgcacgtcttttacttgctgaaatgaataaagagcttaaaggattaagatgtgtgatcagcggttctgggaagatagcaatgcatgttttggaaaagcttttgccttgtggagccattcctattactgtctcagattcaaagggatatttgttagatgaagatgggtttgattatatgaaatattcacttctaagggatattaaggctcagcaaaagagcctcaaggagtacttgaaatcatatccacatgctaagtatattgatgatgcaaaaccatggagccagcggtgtgatgttgcatttccttgtgcatcacataatgagattgaccaaggggaggctgttgcaatcagcaactctggttgtcgtgttcttgtcgaatgttcaaatatgtcgtgcactgttcaagctgttgatatcctaagaaaggcaaaagttattgttgctccagcaaaggcaactgctgctggtggggtagcacttggggagattgaattgaatccagagtttaatttgatgcaattgtcagtggaggattttgagaatagaattcaagtaaactctgctgctcctgaccacctggcagtcatttttcgcttctgcttcccaattgtgattccttgtgagttctctcttttctctgttggatttaagcaggatgcaataaagcaaacatatgaaaggtcggtcaaagctgctcaagattacgggatcatgaaagaaagccccgagtttttggtccatggcgcgaacatttgtgctttccttaatatcgcgcaagccatgactgaccagggatgtgtttagttaggcctggattctgtcaagaagcttcaactggagctttctgcaaccgcgagggaaaaaactttctgacaactagaggtgctttgatgcttaaactttgagtagttctgcacaaatcttgaagccctacaaaacagggagtaactaggatccatttacccctgtttatgctagaaatgtgtacagctaaggtgtaggaaaggcaactaggatccatttatgctagaaatgtgtacagctaaatgtaaatggaaagttctacattgtatgcaaagcctatatccgcaccatctgttacaccaatttgatttcattgttatgaacgacatattattctagtgcaaccacgctaattggtgcaacagtgcaatcaagataagacacgacaatggagttgaga

SEQ ID NO: 37485 - DNA, 2618 bp, Zea Mays
cggttgccgcggctgtttctgcttgctgtcgccggccgcagtctccgccgcggctcacggatgccctgcatcctccttcccgcggccgcgcttaatcgaagccttcttctgcaccaaccttatcctgtcagctggaaacgccaaattctccaaaccctagcgccaaaatccccattctgatcgctgcaaccggagccggattctcttggtttacgcctggcgctcgtatcgtgtctccgcatgatgcaacgagcacgcgcatgaactcgatggatgaaatcaacctgctgcggcaggcgcagcggcagcatcagcatcatctcatggtgcgcggcatcggcgaggagatcgacctcgagatcggccctgtcgacgatccctctttttccggagcttccttagtggccgttacgtccacgcacgacactgtcgttcacgccgacgaccacaagagcctcctcatcccgtgttcgcagcccggcgcggcggacgggctggcgccgcagcagcacctgtcgcagggggaagagcatgacgggatgctcaggtcgccgtcggggcacaccaagaagaagaagaaggtggtcaagaaatggcgggaggagtgggcggacacctacaagtgggcctacgtcgccgtgcacgacaccaccaccaggatcttctgctcggtgtgcaaggagtacggccggaagcaccgccggaatccatatggtaacgagggaagcaggaatatgcagatgagtgcgcttgaggagcacaacaatagcttgttgcataaggaggcgctccggttacagatggcctccaaggagaagttgcagcctcccgagattgaggggccggtctatgtcaaagctttatcgaaaacagcagcatcaatacttgaatgtgtcctaaggagggatccccatgaagctgaatatatacagtcgatccaggaggtggttcattccttagaacctgttttggtgaagaatgcccaatatattcaaattttggagcgtttgttggaacctgagagatgctttatcttcagagtgccatggattgatgacagaggtgaagcacacgtcaatagaggtttccgtgtgcaattcagtcaggcgttaggtccatgcaggggtggtcttcggtttcacccatccatgagcttaagtgtggcaaagtttctggcctttgaacatactttaaagaatgctttgtcactatataaacttggaggtgctgctggaggaagtgattttgatccaaagggaaaaagtgataatgagataatgcgcttttgccaaagtttcatggatgagctgtatagatatttgggccctgatcagactttgatcttttggtccaggattttcccgctgaagatattggtgttggtccaagggaaatgggttacctttttgggcagtatagacgtctttctggtcattttcaggacctaaaattttctggtcagggtcaagttttcgaacagaagctactggatatggtctggtgttttttgcacgtcttttacttgctgaaatgaataaagagcttaaaggattaagatgtgtgatcagcggttctgggaagatagcaatgcatgttttggaaaagcttttgccttgtggagccattcctattactgtctcagattcaaagggatatttgttagatgaagatgggtttgattatatgaaatattcacttctaagggatattaaggctcagcaaaagagcctcaagtggggagtacttgaaatcatatccacatgctaagtatattgatgatgcaaaaccatggagccagcggtgtgatgttgcatttccttgtgcatcacataatgagattgaccaaggggaggctgttgcaatcagcaactctggttgtcgtgttcttgtcgaatgttcaaatatgtcgtgcactgttcaagctgttgatatcctaagaaaggcaaaagttattgttgctccagcaaaggcaactgctgctggtggggtagcacttggggagattgaattgaatccagagtttaatttgatgcaattgtcagtggaggattttgagaatagaattcaagatgcaataaagcaaacatatgaaaggtcggtcaaagctgctcaagattacgggatcatgaaagaaagccccgagtttttggtccatggcgcgaacatttgtgctttccttaatatcgcgcaagccatgactgaccagggatgtgtttagttaggcctggattctgtcaagaagcttcaactggagctttctgcaaccgcgagggaaaaaactttctgacaactagaggtgctttgatgcttaaactttgagtagttctgcacaaatcttgaagccctacaaaacagggagtaactaggatccatttacccctgtttatgctagaaatgtgtacagctaaggtgtaggaaaggcaactaggatccatttatgctagaaatgtgtacagctaaatgtaaatggaaagttctacattgtatgcaaagcctatatccgcaccatctgttacaccaatttgatttcattgttatgaacgacatattattctagtgcaaccacgctaattggtgcaacagtgcaatcaagataagacacgacaatggagttgaga

SEQ ID NO: 37486 - DNA, 2359 bp, Zea Mays
gcggttgccgcggctgtttctgcttgctgtcgccggccgcagtctccgccgcggctcacggatgccctgcatcctccttcccgcggccgcgcttaatcgaagccttcttctgcaccaaccttatcctgtcagctggaaacgccaaattctccaaaccctagcgccaaaatccccattctgatcgctgcaaccggagccggattctcttggtttacgcctggcgctcgtatcgtgtctccgcatgatgcaacgagcacgcgcatgaactcgatggatgaaatcaacctgctgcggcaggcgcagcggcagcatcagcatcatctcatggtgcgcggcatcggcgaggagatcgacctcgagatcggccctgtcgacgatccctctttttccggagcttccttagtggccgttacgtccacgcacgacactgtcgttcacgccgacgaccacaagagcctcctcatcccgtgttcgcagcccggcgcggcggacgggctggcgccgcagcagcacctgtcgcagggggaagagcatgacgggatgctcaggtcgccgtcggggcacaccaagaagaagaagaaggtggtcaagaaatggcgggaggagtgggcggacacctacaagtgggcctacgtcgccgtgcacgacaccaccaccaggatcttctgctcggtgtgcaaggagtacggccggaagcaccgccggaatccatatggtaacgagggaagcaggaatatgcagatgagtgcgcttgaggagcacaacaatagcttgttgcataaggaggcgctccggttacagatggcctccaaggagaagttgcagcctcccgagattgaggggccggtctatgtcaaagctttatcgaaaacagcagcatcaatacttgaatgtgtcctaaggagggatccccatgaagctgaatatatacagtcgatccaggaggtggttcattccttagaacctgttttggtgaagaatgcccaatatattcaaattttggagcgtttgttggaacctgagagatgctttatcttcagagtgccatggattgatgacagaggtgaagcacacgtcaatagaggtttccgtgtgcaattcagtcaggcgttaggtccatgcaggggtggtcttcggtttcacccatccatgagcttaagtgtggcaaagtttctggcctttgaacatactttaaagaatgctttgtcactatataaacttggaggtgctgctggaggaagtgattttgatccaaagggaaaaagtgataatgagataatgcgcttttgccaaagtttcatggatgagctgtatagatatttgggccctgatcaggattttcccgctgaagatattggtgttggtccaagggaaatgggttacctttttgggcagtatagacgtctttctggtcattttcagggaaattttacaggacctaaaattttctggtcagggtcaagttttcgaacagaagctactggatatggtctggtgttttttgcacgtcttttacttgctgaaatgaataaagagcttaaaggattaagatgtgtgatcagcggttctgggaagatagcaatgcatgttttggaaaagcttttgccttgtggagccattcctattactgtctcaggttcaaatatgtcgtgcactgttcaagctgttgatatcctaagaaaggcaaaagttattgttgctccagcaaaggcaactgctgctggtggggtagcacttggggagattgaattgaatccagagtttaatttgatgcaattgtcagtggaggattttgagaatagaattcaagatgcaataaagcaaacatatgaaaggtcggtcaaagctgctcaagattacgggatcatgaaagaaagccccgagtttttggtccatggcgcgaacatttgtgctttccttaatatcgcgcaagccatgactgaccagggatgtgtttagttaggcctggattctgtcaagaagcttcaactggagctttctgcaaccgcgagggaaaaaactttctgacaactagaggtgctttgatgcttaaactttgagtagttctgcacaaatcttgaagccctacaaaacagggagtaactaggatccatttacccctgtttatgctagaaatgtgtacagctaaggtgtaggaaaggcaactaggatccatttatgctagaaatgtgtacagctaaatgtaaatggaaagttctacattgtatgcaaagcctatatccgcaccatctgttacaccaatttgatttcattgttatgaacgacatattattctagtgcaaccacgctaattggtgcaacagtgcaatcaagataagacacgacaatggagttgaga

SEQ ID NO: 37487 - DNA, 2647 bp, Zea Mays
cagcgcagcggttgccgcggctgtttctgcttgctgtcgccggccgcagtctccgccgcggctcacggatgccctgcatcctccttcccgcggccgcgcttaatcgaagccttcttctgcaccaaccttatcctgtcagctggaaacgccaaattctccaaaccctagcgccaaaatccccattctgatcgctgcaaccggagccggattctcttggtttacgcctggcgctcgtatcgtgtctccgcatgatgcaacgagcacgcgcatgaactcgatggatgaaatcaacctgctgcggcaggcgcagcggcagcatcagcatcatctcatggtgcgcggcatcggcgaggagatcgacctcgagatcggccctgtcgacgatccctctttttccggagcttccttagtggccgttacgtccacgcacgacactgtcgttcacgccgacgaccacaagagcctcctcatcccgtgttcgcagcccggcgcggcggacgggctggcgccgcagcagcacctgtcgcagggggaagagcatgacgggatgctcaggtcgccgtcggggcacaccaagaagaagaagaaggtggtcaagaaatggcgggaggagtgggcggacacctacaagtgggcctacgtcgccgtgcacgacaccaccaccaggatcttctgctcggtgtgcaaggagtacggccggaagcaccgccggaatccatatggtaacgagggaagcaggaatatgcagatgagtgcgcttgaggagcacaacaatagcttgttgcataaggaggcgctccggttacagatggcctccaaggagaagttgcagcctcccgagattgaggggccggtctatgtcaaagctttatcgaaaacagcagcatcaatacttgaatgtgtcctaaggagggatccccatgaagctgaatatatacagtcgatccaggaggtggttcattccttagaacctgttttggtgaagaatgcccaatatattcaaattttggagcgtttgttggaacctgagagatgctttatcttcagagtgccatggattgatgacagagactttaaagaatgctttgtcactatataaacttggaggtgctgctggaggaagtgattttgatccaaagggaaaaagtgataatgagataatgcgcttttgccaaagtttcatggatgagctgtatagatatttgggccctgatcaggattttcccgctgaagatattggtgttggtccaagggaaatgggttacctttttgggcagtatagacgtctttctggtcattttcagggaaattttacaggacctaaaattttctggtcagggtcaagttttcgaacagaagctactggatatggtctggtaaagtgctaccttaattttcgtttggctggagatagtgtgttctgtgggtgctatagttgtttcacaagtaatatttctgttgcatgtgttgactggaccattgtccttgttcaaagtgaaacactatatgaaatcattctatctatgcaggtgttttttgcacgtcttttacttgctgaaatgaataaagagcttaaaggattaagatgtgtgatcagcggttctgggaagatagcaatgcatgttttggaaaagcttttgccttgtggagccattcctattactgtctcagattcaaagggatatttgttagatgaagatgggtttgattatatgaaatattcacttctaagggatattaaggctcagcaaaagagcctcaagtggggagtacttgaaatcatatccacatgctaagtatattgatgatgcaaaaccatggagccagcggtgtgatgttgcatttccttgtgcatcacataatgagattgaccaaggggaggctgttgcaatcagcaactctggttgtcgtgttcttgtcgaatgttcaaatatgtcgtgcactgttcaagctgttgatatcctaagaaaggcaaaagttattgttgctccagcaaaggcaactgctgctggtggggtagcacttggggagattgaattgaatccagagtttaatttgatgcaattgtcagtggaggattttgagaatagaattcaagatgcaataaagcaaacatatgaaaggtcggtcaaagctgctcaagattacgggatcatgaaagaaagccccgagtttttggtccatggcgcgaacatttgtgctttccttaatatcgcgcaagccatgactgaccagggatgtgtttagttaggcctggattctgtcaagaagcttcaactggagctttctgcaaccgcgagggaaaaaactttctgacaactagaggtgctttgatgcttaaactttgagtagttctgcacaaatcttgaagccctacaaaacagggagtaactaggatccatttacccctgtttatgctagaaatgtgtacagctaaggtgtaggaaaggcaactaggatccatttatgctagaaatgtgtacagctaaatgtaaatggaaagttctacattgtatgcaaagcctatatccgcaccatctgttacaccaatttgatttcattgttatgaacgacatattattctagtgcaaccacgctaattggtgcaacagtgcaatcaagataagacacgacaatggagttgaga

SEQ ID NO: 37488 - DNA, 2631 bp, Zea Mays
ctcagcgcagcggttgccgcggctgtttctgcttgctgtcgccggccgcagtctccgccgcggctcacggatgccctgcatcctccttcccgcggccgcgcttaatcgaagccttcttctgcaccaaccttatcctgtcagctggaaacgccaaattctccaaaccctagcgccaaaatccccattctgatcgctgcaaccggagccggattctcttggtttacgcctggcgctcgtatcgtgtctccgcatgatgcaacgagcacgcgcatgaactcgatggatgaaatcaacctgctgcggcaggcgcagcggcagcatcagcatcatctcatggtgcgcggcatcggcgaggagatcgacctcgagatcggccctgtcgacgatccctctttttccggagcttccttagtggccgttacgtccacgcacgacactgtcgttcacgccgacgaccacaagagcctcctcatcccgtgttcgcagcccggcgcggcggacgggctggcgccgcagcagcacctgtcgcagggggaagagcatgacgggatgctcaggtcgccgtcggggcacaccaagaagaagaagaaggtggtcaagaaatggcgggaggagtgggcggacacctacaagtgggcctacgtcgccgtgcacgacaccaccaccaggatcttctgctcggtgtgcaaggagtacggccggaagcaccgccggaatccatatggtaacgagggaagcaggaatatgcagatgagtgcgcttgaggagcacaacaatagcttgttgcataaggaggcgctccggttacagatggcctccaaggagaagttgcagcctcccgagattgaggggccggtctatgtcaaagctttatcgaaaacagcagcatcaatacttgaatgtgtcctaaggagggatccccatgaagctgaatatatacagtcgatccaggaggtggttcattccttagaacctgttttggtgaagaatgcccaatatattcaaattttggagcgtttgttggaacctgagagatgctttatcttcagagtgccatggattgatgacagagactttaaagaatgctttgtcactatataaacttggaggtgctgctggaggaagtgattttgatccaaagggaaaaagtgataatgagataatgcgcttttgccaaagtttcatggatgagctgtatagatatttgggccctgatcaggattttcccgctgaagatattggtgttggtccaagggaaatgggttacctttttgggcagtatagacgtctttctggtcattttcaggacctaaaattttctggtcagggtcaagttttcgaacagaagctactggatatggtctggtaaagtgctaccttaattttcgtttggctggagatagtgtgttctgtgggtgctatagttgtttcacaagtaatatttctgttgcatgtgttgactggaccattgtccttgttcaaagtgaaacactatatgaaatcattctatctatgcaggtgttttttgcacgtcttttacttgctgaaatgaataaagagcttaaaggattaagatgtgtgatcagcggttctgggaagatagcaatgcatgttttggaaaagcttttgccttgtggagccattcctattactgtctcagattcaaagggatatttgttagatgaagatgggtttgattatatgaaatattcacttctaagggatattaaggctcagcaaaagagcctcaagtggggagtacttgaaatcatatccacatgctaagtatattgatgatgcaaaaccatggagccagcggtgtgatgttgcatttccttgtgcatcacataatgagattgaccaaggggaggctgttgcaatcagcaactctggttgtcgtgttcttgtcgaatgttcaaatatgtcgtgcactgttcaagctgttgatatcctaagaaaggcaaaagttattgttgctccagcaaaggcaactgctgctggtagcacttggggagattgaattgaatccagagtttaatttgatgcaattgtcagtggaggattttgagaatagaattcaagatgcaataaagcaaacatatgaaaggtcggtcaaagctgctcaagattacgggatcatgaaagaaagccccgagtttttggtccatggcgcgaacatttgtgctttccttaatatcgcgcaagccatgactgaccagggatgtgtttagttaggcctggattctgtcaagaagcttcaactggagctttctgcaaccgcgagggaaaaaactttctgacaactagaggtgctttgatgcttaaactttgagtagttctgcacaaatcttgaagccctacaaaacagggagtaactaggatccatttacccctgtttatgctagaaatgtgtacagctaaggtgtaggaaaggcaactaggatccatttatgctagaaatgtgtacagctaaatgtaaatggaaagttctacattgtatgcaaagcctatatccgcaccatctgttacaccaatttgatttcattgttatgaacgacatattattctagtgcaaccacgctaattggtgcaacagtgcaatcaagataagacacgacaatggagttgaga

SEQ ID NO: 37489 - DNA, 2499 bp, Zea Mays
aaaactctgtcgggactagcctcagcgcagcggttgccgcggctgtttctgcttgctgtcgccggccgcagtctccgccgcggctcacggatgccctgcatcctccttcccgcggccgcgcttaatcgaagccttcttctgcaccaaccttatcctgtcagctggaaacgccaaattctccaaaccctagcgccaaaatccccattctgatcgctgcaaccggagccggattctcttggtttacgcctggcgctcgtatcgtgtctccgcatgatgcaacgagcacgcgcatgaactcgatggatgaaatcaacctgctgcggcaggcgcagcggcagcatcagcatcatctcatggtgcgcggcatcggcgaggagatcgacctcgagatcggccctgtcgacgatccctctttttccggagcttccttagtggccgttacgtccacgcacgacactgtcgttcacgccgacgaccacaagagcctcctcatcccgtgttcgcagcccggcgcggcggacgggctggcgccgcagcagcacctgtcgcagggggaagagcatgacgggatgctcaggtcgccgtcggggcacaccaagaagaagaagaaggtggtcaagaaatggcgggaggagtgggcggacacctacaagtgggcctacgtcgccgtgcacgacaccaccaccaggatcttctgctcggtgtgcaaggagtacggccggaagcaccgccggaatccatatggtaacgagggaagcaggaatatgcagatgagtgcgcttgaggagcacaacaatagcttgttgcataaggaggcgctccggttacagatggcctccaaggagaagttgcagcctcccgagattgaggggccggtctatgtcaaagctttatcgaaaacagcagcatcaatacttgaatgtgtcctaaggagggatccccatgaagctgaatatatacagtcgatccaggaggtggttcattccttagaacctgttttggtgaagaatgcccaatatattcaaattttggagcgtttgttggaacctgagagatgctttatcttcagagtgccatggattgatgacagagactttaaagaatgctttgtcactatataaacttggaggtgctgctggaggaagtgattttgatccaaagggaaaaagtgataatgagataatgcgcttttgccaaagtttcatggatgagctgtatagatatttgggccctgatcaggattttcccgctgaagatattggtgttggtccaagggaaatgggttacctttttgggcagtatagacgtctttctggtcattttcaggacctaaaattttctggtcagggtcaagttttcgaacagaagctactggatatggtctggtgttttttgcacgtcttttacttgctgaaatgaataaagagcttaaaggattaagatgtgtgatcagcggttctgggaagatagcaatgcatgttttggaaaagcttttgccttgtggagccattcctattactgtctcagattcaaagggatatttgttagatgaagatgggtttgattatatgaaatattcacttctaagggatattaaggctcagcaaaagagcctcaaggagtacttgaaatcatatccacatgctaagtatattgatgatgcaaaaccatggagccagcggtgtgatgttgcatttccttgtgcatcacataatgagattgaccaaggggaggctgttgcaatcagcaactctggttgtcgtgttcttgtcgaatgttcaaatatgtcgtgcactgttcaagctgttgatatcctaagaaaggcaaaagttattgttgctccagcaaaggcaactgctgctggtggggtagcacttggggagattgaattgaatccagagtttaatttgatgcaattgtcagtggaggattttgagaatagaattcaagatgcaataaagcaaacatatgaaaggtcggtcaaagctgctcaagattacgggatcatgaaagaaagccccgagtttttggtccatggcgcgaacatttgtgctttccttaatatcgcgcaagccatgactgaccagggatgtgtttagttaggcctggattctgtcaagaagcttcaactggagctttctgcaaccgcgagggaaaaaactttctgacaactagaggtgctttgatgcttaaactttgagtagttctgcacaaatcttgaagccctacaaaacagggagtaactaggatccatttacccctgtttatgctagaaatgtgtacagctaaggtgtaggaaaggcaactaggatccatttatgctagaaatgtgtacagctaaatgtaaatggaaagttctacattgtatgcaaagcctatatccgcaccatctgttacaccaatttgatttcattgttatgaacgacatattattctagtgcaaccacgctaattggtgcaacagtgcaatcaagataagacacgacaatggagttgaga

SEQ ID NO: 37490 - DNA, 2715 bp, Zea Mays
gaaaactctgtcgggactagcctcagcgcagcggttgccgcggctgtttctgcttgctgtcgccggccgcagtctccgccgcggctcacggatgccctgcatcctccttcccgcggccgcgcttaatcgaagccttcttctgcaccaaccttatcctgtcagctggaaacgccaaattctccaaaccctagcgccaaaatccccattctgatcgctgcaaccggagccggattctcttggtttacgcctggcgctcgtatcgtgtctccgcatgatgcaacgagcacgcgcatgaactcgatggatgaaatcaacctgctgcggcaggcgcagcggcagcatcagcatcatctcatggtgcgcggcatcggcgaggagatcgacctcgagatcggccctgtcgacgatccctctttttccggagcttccttagtggccgttacgtccacgcacgacactgtcgttcacgccgacgaccacaagagcctcctcatcccgtgttcgcagcccggcgcggcggacgggctggcgccgcagcagcacctgtcgcagggggaagagcatgacgggatgctcaggtcgccgtcggggcacaccaagaagaagaagaaggtggtcaagaaatggcgggaggagtgggcggacacctacaagtgggcctacgtcgccgtgcacgacaccaccaccaggatcttctgctcggtgtgcaaggagtacggccggaagcaccgccggaatccatatggtaacgagggaagcaggaatatgcagatgagtgcgcttgaggagcacaacaatagcttgttgcataaggaggcgctccggttacagatggcctccaaggagaagttgcagcctcccgagattgaggggccggtctatgtcaaagctttatcgaaaacagcagcatcaatacttgaatgtgtcctaaggagggatccccatgaagctgaatatatacagtcgatccaggaggtggttcattccttagaacctgttttggtgaagaatgcccaatatattcaaattttggagcgtttgttggaacctgagagatgctttatcttcagagtgccatggattgatgacagaggtgaagcacacgtcaatagaggtttccgtgtgcaattcagtcaggcgttaggtccatgcaggggtggtcttcggtttcacccatccatgagcttaagtgtggcaaagtttctggcctttgaacatactttaaagaatgctttgtcactatataaacttggaggtgctgctggaggaagtgattttgatccaaagggaaaaagtgataatgagataatgcgcttttgccaaagtttcatggatgagctgtatagatatttgggccctgatcaggattttcccgctgaagatattggtgttggtccaagggaaatgggttacctttttgggcagtatagacgtctttctggtcattttcagggaaattttacaggacctaaaattttctggtcagggtcaagttttcgaacagaagctactggatatggtctggtgttttttgcacgtcttttacttgctgaaatgaataaagagcttaaaggattaaggtttcttacattgatccactaaatgtttctttgttataatttagccttttgttactttaatactatgcaaagttttctgcagatgtgtgatcagcggttctgggaagatagcaatgcatgttttggaaaagcttttgccttgtggagccattcctattactgtctcagattcaaagggatatttgttagatgaagatgggtttgattatatgaaatattcacttctaagggatattaaggctcagcaaaagagcctcaaggagtacttgaaatcatatccacatgctaagtatattgatgatgcaaaaccatggagccagcggtgtgatgttgcatttccttgtgcatcacataatgagattgaccaaggggaggctgttgcaatcagcaactctggttgtcgtgttcttgtcgaatgttcaaatatgtcgtgcactgttcaagctgttgatatcctaagaaaggcaaaagttattgttgctccagcaaaggcaactgctgctggtagcacttggggagattgaattgaatccagagtttaatttgatgcaattgtcagtggaggattttgagaatagaattcaagatgcaataaagcaaacatatgaaaggtcggtcaaagctgctcaagattacgggatcatgaaagaaagccccgagtttttggtccatggcgcgaacatttgtgctttccttaatatcgcgcaagccatgactgaccagggatgtgtttagttaggcctggattctgtcaagaagcttcaactggagctttctgcaaccgcgagggaaaaaactttctgacaactagaggtgctttgatgcttaaactttgagtagttctgcacaaatcttgaagccctacaaaacagggagtaactaggatccatttacccctgtttatgctagaaatgtgtacagctaaggtgtaggaaaggcaactaggatccatttatgctagaaatgtgtacagctaaatgtaaatggaaagttctacattgtatgcaaagcctatatccgcaccatctgttacaccaatttgatttcattgttatgaacgacatattattctagtgcaaccacgctaattggtgcaacagtgcaatcaagataagacacgacaatggagttgaga

SEQ ID NO: 37491 - DNA, 2642 bp, Zea Mays
gaaaactctgtcgggactagcctcagcgcagcggttgccgcggctgtttctgcttgctgtcgccggccgcagtctccgccgcggctcacggatgccctgcatcctccttcccgcggccgcgcttaatcgaagccttcttctgcaccaaccttatcctgtcagctggaaacgccaaattctccaaaccctagcgccaaaatccccattctgatcgctgcaaccggagccggattctcttggtttacgcctggcgctcgtatcgtgtctccgcatgatgcaacgagcacgcgcatgaactcgatggatgaaatcaacctgctgcggcaggcgcagcggcagcatcagcatcatctcatggtgcgcggcatcggcgaggagatcgacctcgagatcggccctgtcgacgatccctctttttccggagcttccttagtggccgttacgtccacgcacgacactgtcgttcacgccgacgaccacaagagcctcctcatcccgtgttcgcagcccggcgcggcggacgggctggcgccgcagcagcacctgtcgcagggggaagagcatgacgggatgctcaggtcgccgtcggggcacaccaagaagaagaagaaggtggtcaagaaatggcgggaggagtgggcggacacctacaagtgggcctacgtcgccgtgcacgacaccaccaccaggatcttctgctcggtgtgcaaggagtacggccggaagcaccgccggaatccatatggtaacgagggaagcaggaatatgcagatgagtgcgcttgaggagcacaacaatagcttgttgcataaggaggcgctccggttacagatggcctccaaggagaagttgcagcctcccgagattgaggggccggtctatgtcaaagctttatcgaaaacagcagcatcaatacttgaatgtgtcctaaggagggatccccatgaagctgaatatatacagtcgatccaggaggtggttcattccttagaacctgttttggtgaagaatgcccaatatattcaaattttggagcgtttgttggaacctgagagatgctttatcttcagagtgccatggattgatgacagaggtgaagcacacgtcaatagaggtttccgtgtgcaattcagtcaggcgttaggtccatgcaggggtggtcttcggtttcacccatccatgagcttaagtgtggcaaagtttctggcctttgaacatactttaaagaatgctttgtcactatataaacttggaggtgctgctggaggaagtgattttgatccaaagggaaaaagtgataatgagataatgcgcttttgccaaagtttcatggatgagctgtatagatatttgggccctgatcaggattttcccgctgaagatattggtgttggtccaagggaaatgggttacctttttgggcagtatagacgtctttctggtcattttcagggaaattttacaggacctaaaattttctggtcagggtcaagttttcgaacagaagctactggatatggtctggtgttttttgcacgtcttttacttgctgaaatgaataaagagcttaaaggattaagatgtgtgatcagcggttctgggaagatagcaatgcatgttttggaaaagcttttgccttgtggagccattcctattactgtctcagattcaaagggatatttgttagatgaagatgggtttgattatatgaaatattcacttctaagggatattaaggctcagcaaaagagcctcaagtggggagtacttgaaatcatatccacatgctaagtatattgatgatgcaaaaccatggagccagcggtgtgatgttgcatttccttgtgcatcacataatgagattgaccaaggggaggctgttgcaatcagcaactctggttgtcgtgttcttgtcgaatgttcaaatatgtcgtgcactgttcaagctgttgatatcctaagaaaggcaaaagttattgttgctccagcaaaggcaactgctgctggtggggtagcacttggggagattgaattgaatccagagtttaatttgatgcaattgtcagtggaggattttgagaatagaattcaagatgcaataaagcaaacatatgaaaggtcggtcaaagctgctcaagattacgggatcatgaaagaaagccccgagtttttggtccatggcgcgaacatttgtgctttccttaatatcgcgcaagccatgactgaccagggatgtgtttagttaggcctggattctgtcaagaagcttcaactggagctttctgcaaccgcgagggaaaaaactttctgacaactagaggtgctttgatgcttaaactttgagtagttctgcacaaatcttgaagccctacaaaacagggagtaactaggatccatttacccctgtttatgctagaaatgtgtacagctaaggtgtaggaaaggcaactaggatccatttatgctagaaatgtgtacagctaaatgtaaatggaaagttctacattgtatgcaaagcctatatccgcaccatctgttacaccaatttgatttcattgttatgaacgacatattattctagtgcaaccacgctaattggtgcaacagtgcaatcaagataagacacgacaatggagttgaga

SEQ ID NO: 37492 - DNA, 2570 bp, Zea Mays
gaaaactctgtcgggactagcctcagcgcagcggttgccgcggctgtttctgcttgctgtcgccggccgcagtctccgccgcggctcacggatgccctgcatcctccttcccgcggccgcgcttaatcgaagccttcttctgcaccaaccttatcctgtcagctggaaacgccaaattctccaaaccctagcgccaaaatccccattctgatcgctgcaaccggagccggattctcttggtttacgcctggcgctcgtatcgtgtctccgcatgatgcaacgagcacgcgcatgaactcgatggatgaaatcaacctgctgcggcaggcgcagcggcagcatcagcatcatctcatggtgcgcggcatcggcgaggagatcgacctcgagatcggccctgtcgacgatccctctttttccggagcttccttagtggccgttacgtccacgcacgacactgtcgttcacgccgacgaccacaagagcctcctcatcccgtgttcgcagcccggcgcggcggacgggctggcgccgcagcagcacctgtcgcagggggaagagcatgacgggatgctcaggtcgccgtcggggcacaccaagaagaagaagaaggtggtcaagaaatggcgggaggagtgggcggacacctacaagtgggcctacgtcgccgtgcacgacaccaccaccaggatcttctgctcggtgtgcaaggagtacggccggaagcaccgccggaatccatatggtaacgagggaagcaggaatatgcagatgagtgcgcttgaggagcacaacaatagcttgttgcataaggaggcgctccggttacagatggcctccaaggagaagttgcagcctcccgagattgaggggccggtctatgtcaaagctttatcgaaaacagcagcatcaatacttgaatgtgtcctaaggagggatccccatgaagctgaatatatacagtcgatccaggaggtggttcattccttagaacctgttttggtgaagaatgcccaatatattcaaattttggagcgtttgttggaacctgagagatgctttatcttcagagtgccatggattgatgacagagactttaaagaatgctttgtcactatataaacttggaggtgctgctggaggaagtgattttgatccaaagggaaaaagtgataatgagataatgcgcttttgccaaagtttcatggatgagctgtatagatatttgggccctgatcaggattttcccgctgaagatattggtgttggtccaagggaaatgggttacctttttgggcagtatagacgtctttctggtcattttcaggacctaaaattttctggtcagggtcaagttttcgaacagaagctactggatatggtctggtaaagtgctaccttaattttcgtttggctggagatagtgtgttctgtgggtgctatagttgtttcacaagtgttttttgcacgtcttttacttgctgaaatgaataaagagcttaaaggattaagatgtgtgatcagcggttctgggaagatagcaatgcatgttttggaaaagcttttgccttgtggagccattcctattactgtctcagattcaaagggatatttgttagatgaagatgggtttgattatatgaaatattcacttctaagggatattaaggctcagcaaaagagcctcaaggagtacttgaaatcatatccacatgctaagtatattgatgatgcaaaaccatggagccagcggtgtgatgttgcatttccttgtgcatcacataatgagattgaccaaggggaggctgttgcaatcagcaactctggttgtcgtgttcttgtcgaatgttcaaatatgtcgtgcactgttcaagctgttgatatcctaagaaaggcaaaagttattgttgctccagcaaaggcaactgctgctggtggggtagcacttggggagattgaattgaatccagagtttaatttgatgcaattgtcagtggaggattttgagaatagaattcaagatgcaataaagcaaacatatgaaaggtcggtcaaagctgctcaagattacgggatcatgaaagaaagccccgagtttttggtccatggcgcgaacatttgtgctttccttaatatcgcgcaagccatgactgaccagggatgtgtttagttaggcctggattctgtcaagaagcttcaactggagctttctgcaaccgcgagggaaaaaactttctgacaactagaggtgctttgatgcttaaactttgagtagttctgcacaaatcttgaagccctacaaaacagggagtaactaggatccatttacccctgtttatgctagaaatgtgtacagctaaggtgtaggaaaggcaactaggatccatttatgctagaaatgtgtacagctaaatgtaaatggaaagttctacattgtatgcaaagcctatatccgcaccatctgttacaccaatttgatttcattgttatgaacgacatattattctagtgcaaccacgctaattggtgcaacagtgcaatcaagataagacacgacaatggagttgaga

SEQ ID NO: 37493 - DNA, 2513 bp, Zea Mays
gaaaactctgtcgggactagcctcagcgcagcggttgccgcggctgtttctgcttgctgtcgccggccgcagtctccgccgcggctcacggatgccctgcatcctccttcccgcggccgcgcttaatcgaagccttcttctgcaccaaccttatcctgtcagctggaaacgccaaattctccaaaccctagcgccaaaatccccattctgatcgctgcaaccggagccggattctcttggtttacgcctggcgctcgtatcgtgtctccgcatgatgcaacgagcacgcgcatgaactcgatggatgaaatcaacctgctgcggcaggcgcagcggcagcatcagcatcatctcatggtgcgcggcatcggcgaggagatcgacctcgagatcggccctgtcgacgatccctctttttccggagcttccttagtggccgttacgtccacgcacgacactgtcgttcacgccgacgaccacaagagcctcctcatcccgtgttcgcagcccggcgcggcggacgggctggcgccgcagcagcacctgtcgcagggggaagagcatgacgggatgctcaggtcgccgtcggggcacaccaagaagaagaagaaggtggtcaagaaatggcgggaggagtgggcggacacctacaagtgggcctacgtcgccgtgcacgacaccaccaccaggatcttctgctcggtgtgcaaggagtacggccggaagcaccgccggaatccatatggtaacgagggaagcaggaatatgcagatgagtgcgcttgaggagcacaacaatagcttgttgcataaggaggcgctccggttacagatggcctccaaggagaagttgcagcctcccgagattgaggggccggtctatgtcaaagctttatcgaaaacagcagcatcaatacttgaatgtgtcctaaggagggatccccatgaagctgaatatatacagtcgatccaggaggtggttcattccttagaacctgttttggtgaagaatgcccaatatattcaaattttggagcgtttgttggaacctgagagatgctttatcttcagagtgccatggattgatgacagagactttaaagaatgctttgtcactatataaacttggaggtgctgctggaggaagtgattttgatccaaagggaaaaagtgataatgagataatgcgcttttgccaaagtttcatggatgagctgtatagatatttgggccctgatcaggattttcccgctgaagatattggtgttggtccaagggaaatgggttacctttttgggcagtatagacgtctttctggtcattttcagggaaattttacaggacctaaaattttctggtcagggtcaagttttcgaacagaagctactggatatggtctggtgttttttgcacgtcttttacttgctgaaatgaataaagagcttaaaggattaagatgtgtgatcagcggttctgggaagatagcaatgcatgttttggaaaagcttttgccttgtggagccattcctattactgtctcagattcaaagggatatttgttagatgaagatgggtttgattatatgaaatattcacttctaagggatattaaggctcagcaaaagagcctcaaggagtacttgaaatcatatccacatgctaagtatattgatgatgcaaaaccatggagccagcggtgtgatgttgcatttccttgtgcatcacataatgagattgaccaaggggaggctgttgcaatcagcaactctggttgtcgtgttcttgtcgaatgttcaaatatgtcgtgcactgttcaagctgttgatatcctaagaaaggcaaaagttattgttgctccagcaaaggcaactgctgctggtggggtagcacttggggagattgaattgaatccagagtttaatttgatgcaattgtcagtggaggattttgagaatagaattcaagatgcaataaagcaaacatatgaaaggtcggtcaaagctgctcaagattacgggatcatgaaagaaagccccgagtttttggtccatggcgcgaacatttgtgctttccttaatatcgcgcaagccatgactgaccagggatgtgtttagttaggcctggattctgtcaagaagcttcaactggagctttctgcaaccgcgagggaaaaaactttctgacaactagaggtgctttgatgcttaaactttgagtagttctgcacaaatcttgaagccctacaaaacagggagtaactaggatccatttacccctgtttatgctagaaatgtgtacagctaaggtgtaggaaaggcaactaggatccatttatgctagaaatgtgtacagctaaatgtaaatggaaagttctacattgtatgcaaagcctatatccgcaccatctgttacaccaatttgatttcattgttatgaacgacatattattctagtgcaaccacgctaattggtgcaacagtgcaatcaagataagacacgacaatggagttgaga

SEQ ID NO: 37494 - DNA, 2640 bp, Zea Mays
ccgtaataatagaaagaaaactctgtcgggactagcctcagcgcagcggttgccgcggctgtttctgcttgctgtcgccggccgcagtctccgccgcggctcacggatgccctgcatcctccttcccgcggccgcgcttaatcgaagccttcttctgcaccaaccttatcctgtcagctggaaacgccaaattctccaaaccctagcgccaaaatccccattctgatcgctgcaaccggagccggattctcttggtttacgcctggcgctcgtatcgtgtctccgcatgatgcaacgagcacgcgcatgaactcgatggatgaaatcaacctgctgcggcaggcgcagcggcagcatcagcatcatctcatggtgcgcggcatcggcgaggagatcgacctcgagatcggccctgtcgacgatccctctttttccggagcttccttagtggccgttacgtccacgcacgacactgtcgttcacgccgacgaccacaagagcctcctcatcccgtgttcgcagcccggcgcggcggacgggctggcgccgcagcagcacctgtcgcagggggaagagcatgacgggatgctcaggtcgccgtcggggcacaccaagaagaagaagaaggtggtcaagaaatggcgggaggagtgggcggacacctacaagtgggcctacgtcgccgtgcacgacaccaccaccaggatcttctgctcggtgtgcaaggagtacggccggaagcaccgccggaatccatatggtaacgagggaagcaggaatatgcagatgagtgcgcttgaggagcacaacaatagcttgttgcataaggaggcgctccggttacagatggcctccaaggagaagttgcagcctcccgagattgaggggccggtctatgtcaaagctttatcgaaaacagcagcatcaatacttgaatgtgtcctaaggagggatccccatgaagctgaatatatacagtcgatccaggaggtggttcattccttagaacctgttttggtgaagaatgcccaatatattcaaattttggagcgtttgttggaacctgagagatgctttatcttcagagtgccatggattgatgacagaggtgaagcacacgtcaatagaggtttccgtgtgcaattcagtcaggcgttaggtccatgcaggggtggtcttcggtttcacccatccatgagcttaagtgtggcaaagtttctggcctttgaacatactttaaagaatgctttgtcactatataaacttggaggtgctgctggaggaagtgattttgatccaaagggaaaaagtgataatgagataatgcgcttttgccaaagtttcatggatgagctgtatagatatttgggccctgatcaggattttcccgctgaagatattggtgttggtccaagggaaatgggttacctttttgggcagtatagacgtctttctggtcattttcaggacctaaaattttctggtcagggtcaagttttcgaacagaagctactggatatggtctggtgttttttgcacgtcttttacttgctgaaatgaataaagagcttaaaggattaagatgtgtgatcagcggttctgggaagatagcaatgcatgttttggaaaagcttttgccttgtggagccattcctattactgtctcagattcaaagggatatttgttagatgaagatgggtttgattatatgaaatattcacttctaagggatattaaggctcagcaaaagagcctcaaggagtacttgaaatcatatccacatgctaagtatattgatgatgcaaaaccatggagccagcggtgtgatgttgcatttccttgtgcatcacataatgagattgaccaaggggaggctgttgcaatcagcaactctggttgtcgtgttcttgtcgaatgttcaaatatgtcgtgcactgttcaagctgttgatatcctaagaaaggcaaaagttattgttgctccagcaaaggcaactgctgctggtggggtagcacttggggagattgaattgaatccagagtttaatttgatgcaattgtcagtggaggattttgagaatagaattcaagatgcaataaagcaaacatatgaaaggtcggtcaaagctgctcaagattacgggatcatgaaagaaagccccgagtttttggtccatggcgcgaacatttgtgctttccttaatatcgcgcaagccatgactgaccagggatgtgtttagttaggcctggattctgtcaagaagcttcaactggagctttctgcaaccgcgagggaaaaaactttctgacaactagaggtgctttgatgcttaaactttgagtagttctgcacaaatcttgaagccctacaaaacagggagtaactaggatccatttacccctgtttatgctagaaatgtgtacagctaaggtgtaggaaaggcaactaggatccatttatgctagaaatgtgtacagctaaatgtaaatggaaagttctacattgtatgcaaagcctatatccgcaccatctgttacaccaatttgatttcattgttatgaacgacatattattctagtgcaaccacgctaattggtgcaacagtgcaatcaagataagacacgacaatggagttgaga

SEQ ID NO: 37495 - DNA, 2294 bp, Zea Mays
aaaagtatagggaagttagtgcaagtcctggtcttcttacaccaggaaacgaaaagaaacgacatcgccaatccctagcaggagacacagctccggcttgcggcctgggatccggtccagtatggagccaccccggcgatccttgtgcgtcgttgcctctgaagtctcctcagcggccggatcggacgccgaggacgacaggtactgcagcgccaactctgccctcggcacgcccagctcgatcgctacccttctcccctcctccgacttctgggaccaccagatggacctcctcgacgaccatcccgccaccgccggcttccccaagaaacaccagctcaggtgcctccaaacgctggcatcggcgcagtcgtggccggaaacggtttctcctccggcgactgccggagtcgacgacctcgcgccgcaggggtcgagtcctgcttcaccatatattcctccgctccctcgtcacaaccaggtgcatggatttggtggcaatgatttatttgatgatatggtccaagagatggaacatattctgctcaattcaggggagccacatggaaatggatcttttatgaatgatcgtagaaataatgctctccaggctcaccatttcagagatggcagcactactgcctctacttctggtacagatgatgcctttgtatctcctgttccacagtattcttcaagaatcgattgggtggaggttgtgggggcaaagcaaagatctggtgatgtttcttttggtgaacgaattgttggtgtcaaaaaatacactgtttatttgtttaaagtaaggagtggtgaagacgaatgggaaattgagcggcgataccgtgaattttacgcgctttatcggctacttaagggcttcttttatgagagaggtttaagtcttcccgctgcatgggaaaatgttgaaagagagtcaagtaaaatatttgggaatgcgtcaccagatgttgtcaatgacagaagtgccctcattcaagactgtttgcgttctttactggtctcaagttatccatttggaattcccacccctctggttaattttttgtcaccagggaggcctggatacgaatatagttttttgaaaactctcattccacgatctttgcaaagacgtagcaatgatttaaattcaaaagattcagattgcaatggaggtcaacatgatgattctacctcaatgggcaagacaatatcacttattgtagaggataggcctcagaagtcgaccagacagttgttggaattacaacattacaactgtgcggggtgccataggcatttggatgctggtcgaacattgctgcaagaacttgcacagactattggatggaacaaacctcggttttgttcttacactggacaattgttttgtgcttcttgtcacacaaatgatactgcagttcttccagcaagagttctacaccactgggatttttcactgtatccaatttcccagttagcaaaagcatatttagactccatatatgaccagcctatgctctgtgtaagtgcagtcaatcctttcctattctcgaaagtaccagctctgcttaacatcatgagtgtccggaagaaaatagcagctatgcttccttgtgtccaatgtcctttccggaattccatacttaaaggactaggagttcgaagataccttctagatgggaatgacttctttgcgcttcgtgacctcgttgatctctcaaaaggagcttttgcagcacttccagttaaggtgctgaccatatcaaacaggatacttgagcacattactgagcaatgccttgtgtgctacgatggtggcgtaccttgtgctgctcgacaagcttgtgatgacccgctgtcccttatattcccatttcaggaagatcgcggcgcttgagcaagctgtacatgatggcacgggcatgccatcaacggaatctattcagcctccacctctctcttcatcttatgggtttttctctgatattctctccaaagcaaggccggacaagcttctgaggccgagaaatagcagtcctgtgatccttatgggttctttgccagatatgtctatatgagctgagttgtatttttgtgttccattgattgtgtatttttgtacacggtaggaaagacgctcctagttttgaatgaatgtaatcctgcagtgttattacttgaggtgtgcgtgtagatttatttttcgtggacaacgaagaattgtgtcatttgacatttcatctgtgaggaaataatgaaacgagagactaagggactgtttggtagaa

SEQ ID NO: 37496 - DNA, 2178 bp, Zea Mays
atcaccactggcgggacgggaacgagacgcaccaccaactgaattgaaggaagcggtgataaaacctccccctcggcactcggcccacgcggcgcacggcacctcaagctctgctcctccttttccactgctctgcgtctgcgtctgcgtctgcactgcttcgcgtctccctccccccgcctccgcccccgccccggcaaaaagcaaaacacggccatggaaggctacgaccgcgagttctaccagttcagcgaccagctgcgcctgcagacggccgccttctcgggcctctccctcggcgactccatctggtcccccgccggccggcgcaacaacagcaacgacgtcctcttcgccgcctccgcgtcgcccgccgacgccgccgccaagagcaacgccgtcgtcgggctcaagctcaacgacggagggcccggcctcatcggctccgggaagctggccttcggcggcggcgccggaggcggcggcaccaacaaggccgaccgctacaacaacaacaacctccccaacaccgacaacaagaccgtgtacaacaccagcagcagcagcttcatgggcaacggcagcagctacgccaagaacaacaacaacaacgccgacatgctggcgttcgacaagatggggagctacggctacaacggcggcggtaataccaacaacaacagcaacggcgtggaggtgaagagctacttcaacaagtccgccgggagggcggcgagcaacaacaacaacaacaacaacagccacgccggcggcggcaacaagaagggcggcgccggggagtacggcaggaagaagcacgccaagagcgagggcgcggcggcggccacggacaagcagcggttcaagacgctgccggcgtcggaggcgctgccgcggggccaggccatcggcgggtacatcttcgtctgcaacaacgacactatggacgagaacctcaggagggagctgttcgggctgccgtccaggtacagggactctgtgcgtgctatccgcccgggactgcccctcttcctctacaactactccacgcaccagctccacggcatcttcgaggccgcgagcttcggcgggaccaacatcgacccgacggcgtgggaggacaagaagtgccccggcgagtcgcgctttcctgcgcaggtaccctactgtactgtctgcttcgatccacagtctagtactctagtctagcagccatggcggcggcggcggcggcgggtgatcgatcagctcaacgtaccacacgccacactagcgaagcgtgacttgtacgcttgtttcaattgtgttcaacaccaccaaacagtacatgtacatgtatcaccgacagacgaaaggctatcaatcacatcacgtgctgcgatggcgtgtggaatcgcaaaaagatttggtcagcggaggtaggttttggttgcgaaaaagtgaccgcccgccctaccctatacggcgggaccgcgtcaggtcagcagcttggttggctcgtagctttcgtcctagctagctactgtagtgtaggttgcttggtcagtcggcagaggatctggtcgcaggctccaagtgcgaccatctagatgctgtagctgctgcatttcctcgttattgacgcatggtgcttgcgatgtgatgtgctgcaggtgcgggtggcaacgcggaagatctacgacccgctggaggaggacgccttccgccccatcctgcaccactacgacgggcccaagttccggctcgagctctccgtcaccgaggccctcgccctcctcgacatcttcgccgacaaggacgacgcctgatccccatcggatctgtcgtcgggccactcgaagctcggatgcacgaatgaatgaacaaacaataataacgaatggatgtgcatgtatatcgtcatgcgcatgtcccacgacgagacgggagtataccacggtgtagtagtattatattaatacgtaattaatatagtatgtccacctttgtttgatactactaagggctatgtattgaggcacgcgtcccattgttttgtttttataacacttgtgcgatggttgcagaggactagccctctttttttttggtaagatgtctgtattattattattattcgggttccactgacatggataaaaaccatctgtgaaatagtttgctcttgtgctgtgctac

SEQ ID NO: 37497 - DNA, 1250 bp, Zea Mays
acggttaattaagcattccaatcctcagccatggccgtggacactactcaaccggagtactggctcaactggaggttcttgctgtgcgcgctctgggtctactcctgcatggccttggcattcttcttgattaagaagtacgagggggccagttcaccggacagcaatggcgatgacggtggagacagagaagaggcgttaccacgtgtcagacctggtgttgtttatcttgaagattgctggaagacatgccttgaggcaggtgcaggtcctgggggggatttggaccccgacgctgtgccagaaggaagctgcatagtggaaccagaggaagatgtggtagcagtcttcgtctgcttgaaggcagaggtcacagatggggttggcaatcacacctttctcgaccaagcttactttgtgcttgattttgctttgattgaggagccacataaagagcttcaaccgttccacacaaagtcaggctcctctaggttgggggctgacagagattggatcattgtgtaaagggctccggagtgcaacttgccagtgatgtcaatgaggggactccggagctgatctggcagatcagtgatatcgacgttgttcagagcaagttggagaatggccatctcccgttgggcagttcgactgagacgagttctcaggttgttgatcataccagtttgcataacctggctaacaattggttcaacatctgtcacatggttgcagagagcaggcaggtgttccacgatcgggccaaaggggagccagacgtccaaccataacgatgtggtcgtgccatttccaacacagaccgaagtgatggcccggtacagggggagaagggtctggaggtggttccagtgatcccctgcaggtttgttcctgtcatcggattgggcccaagccacccaggatgacagagcaggttggtgtagacgatggatgagcttgaggaggcaggtattcccacaggaaaatatatactatgacagttacgtgctttgacagtgtaagatacatgttacatgaagtaattttatagcatttagttagctttgtatgaaaccacctccaaaagctagcattccttccggcggccagctgtttgtttaaagctagctagctagcagagagagatggatcacttgttcttgcactccctgctgtcgtctgtgtatatgatccggctgccaggaatctatcacttcatcatcaagtcgaatcgcatacacatatatata

SEQ ID NO: 37498 - DNA, 1007 bp, Zea Mays
aaaacagcaaaatgagttccatgttatggtgtataacttgttactacgaatggtacctgcattgagagattgaccttggtgcatgtctagcatttgacagtatgaacatccccataatgtgaaaaagaagggtcccttgtagagctggcacatgcacaactcctattcaagtaacatcatctcagttggtctcaaatgatatattcccagcagctgttgtgaaggccatgctctaccctggagctaccgtgagcagcctaactaaaagcaagacatttccgagttggaatgacctgtttgacatgtacaacctgacagaagcaaaaaatgcttctgcagtagttgatctccagcgtctagagatacttgccggaagctacttctgtgttgctggagcgctcattggcatcataaatcctgggaggatgactttgtttggtacccttttgattatctggggtatggtgaaagaagcactatttgggaagccagtgaacagtgatctgactcaatcaactcatgtctacccaaccattttgattgcacttatctgtgcattcatgtcaataacttacaacgtaaagaagacagcaagaagtagtactcctgtttctatcgctaagccactgataagttctgccaagtcaaaactgaagtagacttacaagtttaatcctcgtaactcttttgagatatttatttatgtgaaaaaaaacaggtttgaggatgacctgaggatgcttttggtgtatatctgactctttcaatactgtaacattcagtttcctttattgtattaacaattcgcaagggcacaccgtctgtaatgtttacaaaaaaaaccagctaaatcttggttttcccccaatgtttctgctatctaggcaggtttaattcagtttcatattgtatccaataagattgtagtctattttaccacaaggatggaaagttgtaattcctgacaggttctgggtcagttgttattcttctgtgtttggattttc

SEQ ID NO: 37499 - DNA, 1004 bp, Zea Mays
ccgatattcaaacttcagtttgcgaacagtgcggcctacagtgtaaaatagtgcaaaacagtgttttgggtgaccatatgagtgaaccgcttgagacggtctaagataaaagaaagaagaaaagcagggtcccttgtagagctggcacatgcacaactcctattcaagtaacatcatctcagttggtctcaaatgatatattcccagcagctgttgtgaaggccatgctctaccctggagctaccgtgagcagcctaactaaaagcaagacatttccgagttggaatgacctgtttgacatgtacaacctgacagaagcaaaaaatgcttctgcagtagttgatctccagcgtctagagatacttgccggaagctacttctgtgttgctggagcgctcattggcatcataaatcctgggaggatgactttgtttggtacccttttgattatctggggtatggtgaaagaagcactatttgggaagccagtgaacagtgatctgactcaatcaactcatgtctacccaaccattttgattgcacttatctgtgcattcatgtcaataacttacaacgtaaagaagacagcaagaagtagtactcctgtttctatcgctaagccactgataagttctgccaagtcaaaactgaagtagacttacaagtttaatcctcgtaactcttttgagatatttatttatgtgaaaaaaaacaggtttgaggatgacctgaggatgcttttggtgtatatctgactctttcaatactgtaacattcagtttcctttattgtattaacaattcgcaagggcacaccgtctgtaatgtttacaaaaaaaaccagctaaatcttggttttcccccaatgtttctgctatctaggcaggtttaattcagtttcatattgtatccaataagattgtagtctattttaccacaaggatggaaagttgtaattcctgacaggttctgggtcagttgttattcttctgtgtttggattttc

SEQ ID NO: 37500 - DNA, 902 bp, Zea Mays
ggacagcacaaggcgtcaaaataagggtcccttgtagagctggcacatgcacaactcctattcaagtaacatcatctcagttggtctcaaatgatatattcccagcagctgttgtgaaggccatgctctaccctggagctaccgtgagcagcctaactaaaagcaagacatttccgagttggaatgacctgtttgacatgtacaacctgacagaagcaaaaaatgcttctgcagtagttgatctccagcgtctagagatacttgccggaagctacttctgtgttgctggagcgctcattggcatcataaatcctgggaggatgactttgtttggtacccttttgattatctggggtatggtgaaagaagcactatttgggaagccagtgaacagtgatctgactcaatcaactcatgtctacccaaccattttgattgcacttatctgtgcattcatgtcaataacttacaacgtaaagaagacagcaagaagtagtactcctgtttctatcgctaagccactgataagttctgccaagtcaaaactgaagtagacttacaagtttaatcctcgtaactcttttgagatatttatttatgtgaaaaaaaacaggtttgaggatgacctgaggatgcttttggtgtatatctgactctttcaatactgtaacattcagtttcctttattgtattaacaattcgcaagggcacaccgtctgtaatgtttacaaaaaaaaccagctaaatcttggttttcccccaatgtttctgctatctaggcaggtttaattcagtttcatattgtatccaataagattgtagtctattttaccacaaggatggaaagttgtaattcctgacaggttctgggtcagttgttattcttctgtgtttggattttc

SEQ ID NO: 37501 - DNA, 957 bp, Zea Mays
ggaaagctgcagaatgtttcaatcaaatgctaccggttacgggcttcaagtatcagcttcgattgcaaaattagcaacggggtcccttgtagagctggcacatgcacaactcctattcaagtaacatcatctcagttggtctcaaatgatatattcccagcagctgttgtgaaggccatgctctaccctggagctaccgtgagcagcctaactaaaagcaagacatttccgagttggaatgacctgtttgacatgtacaacctgacagaagcaaaaaatgcttctgcagtagttgatctccagcgtctagagatacttgccggaagctacttctgtgttgctggagcgctcattggcatcataaatcctgggaggatgactttgtttggtacccttttgattatctggggtatggtgaaagaagcactatttgggaagccagtgaacagtgatctgactcaatcaactcatgtctacccaaccattttgattgcacttatctgtgcattcatgtcaataacttacaacgtaaagaagacagcaagaagtagtactcctgtttctatcgctaagccactgataagttctgccaagtcaaaactgaagtagacttacaagtttaatcctcgtaactcttttgagatatttatttatgtgaaaaaaaacaggtttgaggatgacctgaggatgcttttggtgtatatctgactctttcaatactgtaacattcagtttcctttattgtattaacaattcgcaagggcacaccgtctgtaatgtttacaaaaaaaaccagctaaatcttggttttcccccaatgtttctgctatctaggcaggtttaattcagtttcatattgtatccaataagattgtagtctattttaccacaaggatggaaagttgtaattcctgacaggttctgggtcagttgttattcttctgtgtttggattttc

SEQ ID NO: 37502 - DNA, 1124 bp, Zea Mays
cacgaccatgatttggtaaagaaagcaggaggaagccggcggtgtaggcgacccatggctccacagacgaggagagagaggttggcgggggaggcgcggccgagctcgtcggggctaacaccggcgaagccgggggcggtcgaggtgcagcgccgacgggtgggcagcggttggacgagccgtcggatctccatctacgcctcccgagtctacttcctcctcatcatgctccagatcccgctcttcagggtcccttgtagagctggcacatgcacaactcctattcaagtaacatcatctcagttggtctcaaatgatatattcccagcagctgttgtgaaggccatgctctaccctggagctaccgtgagcagcctaactaaaagcaagacatttccgagttggaatgacctgtttgacatgtacaacctgacagaagcaaaaaatgcttctgcagtagttgatctccagcgtctagaatacttgccggaagctacttctgtgttgctggagcgctcattggcatcataaatcctgggaggatgactttgtttggtacccttttgattatctggggtatggtgaaagaagcactatttgggaagccagtgaacagtgatctgactcaatcaactcatgtctacccaaccattttgattgcacttatctgtgcattcatgtcaataacttacaacgtaaagaagacagcaagaagtagtactcctgtttctatcgctaagccactgataagttctgccaagtcaaaactgaagtagacttacaagtttaatcctcgtaactcttttgagatatttatttatgtgaaaaaaaacaggtttgaggatgacctgaggatgcttttggtgtatatctgactctttcaatactgtaacattcagtttcctttattgtattaacaattcgcaagggcacaccgtctgtaatgtttacaaaaaaaaccagctaaatcttggttttcccccaatgtttctgctatctaggcaggtttaattcagtttcatattgtatccaataagattgtagtctattttaccacaaggatggaaagttgtaattcctgacaggttctgggtcagttgttattcttctgtgtttggattttc

SEQ ID NO: 37503 - DNA, 1511 bp, Zea Mays
cttgtgatatgtgagatgctatgagtaaagagtctcttatcagagttgaaagtattgagaaaaggtcccctgaagctatggtgtgataacaagtcagctataaatatagtcaataatccagttcagcatgacagaacaaaacatagagatcgatcggttcttcatcaaggagaagctagacaatggtactttagagctgggtcatctgcgagggataccacagtatgcagaaggaagccgcgtagaggtgatgtgtgataaacagggcagagtttggaggccggctactatcaagaacatggtcggcggtaccaactatgttgttagctatggaaatgggcagagctcgattgaggtcctccacacaatgttcattcggcggccagaacccatccaaatggaagttgaagcccctaatgatagcaatatggagataaaaaacgaaagaatgggtatgtctcttgtggtagcagaaaggtttcacctggaaacctgtacgaactccaatgatattacaattgtatcatcacaacatccttgggctgaacctctacaacctgtttctgagaaatcacctggaccatcttcattgcttcatcctgttgtgatggcggatacatcagcattcatggcattggcagtgcctaacagtagtgatctttcaacggcgttctcgacaacttccttgctgctgatgcccaatgacaaaatggaggtcttccagaagctaccacagattccacacttccgcgaggcatggaattgccctccagaacttcgtgaaggaagagccctaggacttatggtctgttttgcaaacatggccaaaagcataaaagacatgcgaattcaggaggaaccacgactttatcaagagaagatgaacatcctgttagagatggaagagaatgggtttgaaactgggcccctgaaggttcgtctccataatcttctttgtacaaggaatcaccatatgaatctcaagagcaggaaagtaagattagagaaggagatacttgagatagaagcaataaactgtggattagagcagcgactcaagttccttgacatgtgcatcatggggatggaggagaagaaataccaagagatgaaaggttcacttgacatccaaaaaacagaaaattgttcacttatttcaaagctccaagtatatttgtgtcaagttgaggaatcactcaagtatgctgaagccgatttttgtagtattgctactgcaccgtggcaaccacatgttgtgccttcgataccgtaaccttgcttagctattaggggggagggggtaacccttctcctccacgcttgaactgtgtaattatgtatatatgcatgctttctccatggagctgagagacaaaccaatgtgtattttgagtttgcagtctgctccacctaacctaagtgatcttcagatacgtgtattttgagtcgtagtgctggttgctctctccagttgtagctcatacttaatgttgcaatttgagaagttgagc

SEQ ID NO: 37504 - DNA, 1626 bp, Zea Mays
gtcaacttcagattattgtgtgtttgttggaggaaatttgatatcatggagaagcaagaaacaatcagtggtatctcgttccactgctaaggcggaatatagagctatgttacttgtgatatgtgagatgctatgagtaaagagtctcttatcagagttgaaagtattgagaaaaggtcccctgaagctatggtgtgataacaagtcagctataaatatagtcaataatccagttcagcatgacagaacaaaacatagagatcgatcggttcttcatcaaggagaagctagacaatggtactttagagctgggtcatctgcgagggataccacagtatgcagaaggaagccgcgtagaggtgatgtgtgataaacagggcagagtttggaggccggctactatcaagaacatggtcggcggtaccaactatgttgttagctatggaaatgggcagagctcgattgaggtcctccacacaatgttcattcggcggccagaacccatccaaatggaagttgaagcccctaatgatagcaatcagatggagataaaaaacgaaagaatgggtatgtctcttgtggtagcagaaaggtttcacctggaaacctgtacgaactccaatgatattacaattgtatcatcacaacatccttgggctgaacctctacaacctgtttctgagaaatcacctggaccatcttcattgcttcatcctgttgtgatggcggatacatcagcattcatggcattggcagtgcctaacagtagtgatctttcaacggcgttctcgacaacttccttgctgctgatgcccaatgacaaaatggaggtcttccagaagctaccacagattccacacttccgcgaggcatggaattgccctccagaacttcgtgaaggaagagccctaggacttatggtctgttttgcaaacatggccaaaagcataaaagacatgcgaattcaggaggaaccacgactttatcaagagaagatgaacatcctgttagagatggaagagaatgggtttgaaactgggcccctgaaggttcgtctccataatcttctttgtacaaggaatcaccatatgaatctcaagagcaggaaagtaagattagagaaggagatacttgagatagaagcaataaactgtggattagagcagcgactcaagttccttgacatgtgcatcatggggatggaggagaagaaataccaagagatgaaaggttcacttgacatccaaaaaacagaaaattgttcacttatttcaaagctccaagtatatttgtgtcaagttgaggaatcactcaagtatgctgaagccgatttttgtagtattgctactgcaccgtggcaaccacatgttgtgccttcgataccgtaaccttgcttagctattaggggggagggggtaacccttctcctccacgcttgaactgtgtaattatgtatatatgcatgctttctccatggagctgagagacaaaccaatgtgtattttgagtttgcagtctgctccacctaacctaagtgatcttcagatacgtgtattttgagtcgtagtgctggttgctctctccagttgtagctcatacttaatgttgcaatttgagaagttgagc

SEQ ID NO: 37505 - DNA, 2431 bp, Zea Mays
atggatcgatcgcctgcgttggaggggaaggatgccggcaggggctccggcagctggccacgcaccccacgcttcgccgtgggggatgaggtcgaggtcctcttcaccggatcgggctttcgtggcgcgcgcttcgaggccaccgtcactgcgcgcttcccggactcccgtcgctacgaggtcgtgggagtctccgagctacggccgaggccgccgccgccgcagccggggcgcgagttcgagctgtttgacctcgtcgaggcgtacaacaacgacggatggtggccgggcgtcgtgtccgacatccggcccaagcggaggcggaaccaagcgaaacgattcgccgtgtcgctcccgctgttccgcgaggtactggagctctcggcctcgttcgtgcggcccaggcgggagttcgtgtacggaagctggatagacgcgcaggaagtgctcgtagcctcttataaaattttacatgcattggtcacgaactatctgcccgatgggaccctcagccatgcaagccaaacagtacatggaatggaaaggctagtgtcagcaaaggtttatttgtcttatcagggcggaatgcccggtaatggcgagcagtggcgtcatgcgttgaggagttggatccggcggcgaggagagacatccggctgggtggaccactgcgtgaaggaccagacgctcgtcgtggttgccgagaagaagcaaaaggaggagctcaaagaggtgctgggcgacggcagggtggtggtgacagacgacaagaagaagagggtgcagcgcgccaagaagaagccagcgacgttccacggtgaaggtaaggttgcagtccagtgaaggagtcagaagcgcaacaaggagtagagaagacaatcacctagaattgagtgaagagcgagtaggctgcctgagctatgcgtactgcagctgtgagctctccatcaacggtggtttgtctacaagttgaagctgaaagggttgcgcaaatcagctgcgagggataccacagtatgcagaaggaagccgcgtagaggtgatgtgtgataaacagggcagagtttggaggccggctactatcaagaacatggtcggcggtaccaactatgttgttagctatggaaatgggcagagctcgattgaggtcctccacacaatgttcattcggcggccagaacccatccaaatggaagttgaagcccctaatgatagcaatgtaattactcgtcattgttagaatcagctattgccattttcatatcttcccttttggttttcttctagtttattgaattccatatattttttcaaacactctgcgtctgttgatgattctatcagcagatggagataaaaaacgaaagaatgggtatgtctcttgtggtagcagaaaggtttcacctggaaacctgtacgaactccaatgatattacaattgtatcatcacaacatccttgggctgaacctctacaacctgtttctgagaaatcacctggaccatcttcattgcttcatcctgttgtgatggcggatacatcagcattcatggcattggcagtgcctaacagtagtgatctttcaacggcgttctcgacaacttccttgctgctgatgcccaatgacaaaatggaggtcttccagaagctaccacagattccacacttccgcgaggcatggaattgccctccagaacttcgtgaaggaagagccctaggacttatggtctgttttgcaaacatggccaaaagcataaaagacatgcgaattcaggaggaaccacgactttatcaagagaagatgaacatcctgttagagatggaagagaatgggtttgaaactgggcccctgaaggttcgtctccataatcttctttgtacaaggaatcaccatatgaatctcaagagcaggaaagtaagattagagaaggagatacttgagatagaagcaataaactgtggattagagcagcgactcaagttccttgacatgtgcatcatggggatggaggagaagaaataccaagagatgaaaggttcacttgacatccaaaaaacagaaaattgttcacttatttcaaagctccaagtatatttgtgtcaagttgaggaatcactcaagtatgctgaagccgatttttgtagtattgctactgcaccgtggcaaccacatgttgtgccttcgataccgtaaccttgcttagctattaggggggagggggtaacccttctcctccacgcttgaactgtgtaattatgtatatatgcatgctttctccatggagctgagagacaaaccaatgtgtattttgagtttgcagtctgctccacctaacctaagtgatcttcagatacgtgtattttgagtcgtagtgctggttgctctctccagttgtagctcatacttaatgttgcaatttgagaagttgagc

SEQ ID NO: 37506 - DNA, 2297 bp, Zea Mays
atggatcgatcgcctgcgttggaggggaaggatgccggcaggggctccggcagctggccacgcaccccacgcttcgccgtgggggatgaggtcgaggtcctcttcaccggatcgggctttcgtggcgcgcgcttcgaggccaccgtcactgcgcgcttcccggactcccgtcgctacgaggtcgtgggagtctccgagctacggccgaggccgccgccgccgcagccggggcgcgagttcgagctgtttgacctcgtcgaggcgtacaacaacgacggatggtggccgggcgtcgtgtccgacatccggcccaagcggaggcggaaccaagcgaaacgattcgccgtgtcgctcccgctgttccgcgaggtactggagctctcggcctcgttcgtgcggcccaggcgggagttcgtgtacggaagctggatagacgcgcaggaagtgctcgtagcctcttataaaattttacatgcattggtcacgaactatctgcccgatgggaccctcagccatgcaagccaaacagtacatggaatggaaaggctagtgtcagcaaaggtttatttgtcttatcagggcggaatgcccggtaatggcgagcagtggcgtcatgcgttgaggagttggatccggcggcgaggagagacatccggctgggtggaccactgcgtgaaggaccagacgctcgtcgtggttgccgagaagaagcaaaaggaggagctcaaagaggtgctgggcgacggcagggtggtggtgacagacgacaagaagaagagggtgcagcgcgccaagaagaagccagcgacgttccacggtgaaggtaaggttgcagtccagtgaaggagtcagaagcgcaacaaggagtagagaagacaatcacctagaattgagtgaagagcgagtaggctgcctgagctatgcgtactgcagctgtgagctctccatcaacggtggtttgtctacaagttgaagctgaaagggttgcgcaaatcagctgcgagggataccacagtatgcagaaggaagccgcgtagaggtgatgtgtgataaacagggcagagtttggaggccggctactatcaagaacatggtcggcggtaccaactatgttgttagctatggaaatgggcagagctcgattgaggtcctccacacaatgttcattcggcggccagaacccatccaaatggaagttgaagcccctaatgatagcaataaaggtttcacctggaaacctgtacgaacttgcattcatacgctgacaggaccaaaactgtttccagcagccaatgatattacaattgtatcatcacaacatccttgggctgaacctctacaacctgtttctgagaaatcacctggaccatcttcattgcttcatcctgttgtgatggcggatacatcagcattcatggcattggcagtgcctaacagtagtgatctttcaacggcgttctcgacaacttccttgctgctgatgcccaatgacaaaatggaggtcttccagaagctaccacagattccacacttccgcgaggcatggaattgccctccagaacttcgtgaaggaagagccctaggacttatggtctgttttgcaaacatggccaaaagcataaaagacatgcgaattcaggaggaaccacgactttatcaagagaagatgaacatcctgttagagatggaagagaatgggtttgaaactgggcccctgaaggttcgtctccataatcttctttgtacaaggaatcaccatatgaatctcaagagcaggaaagtaagattagagaaggagatacttgagatagaagcaataaactgtggattagagcagcgactcaagttccttgacatgtgcatcatggggatggaggagaagaaataccaagagatgaaaggttcacttgacatccaaaaaacagaaaattgttcacttatttcaaagctccaagtatatttgtgtcaagttgaggaatcactcaagtatgctgaagccgatttttgtagtattgctactgcaccgtggcaaccacatgttgtgccttcgataccgtaaccttgcttagctattaggggggagggggtaacccttctcctccacgcttgaactgtgtaattatgtatatatgcatgctttctccatggagctgagagacaaaccaatgtgtattttgagtttgcagtctgctccacctaacctaagtgatcttcagatacgtgtattttgagtcgtagtgctggttgctctctccagttgtagctcatacttaatgttgcaatttgagaagttgagc

SEQ ID NO: 37507 - DNA, 2306 bp, Zea Mays
atggatcgatcgcctgcgttggaggggaaggatgccggcaggggctccggcagctggccacgcaccccacgcttcgccgtgggggatgaggtcgaggtcctcttcaccggatcgggctttcgtggcgcgcgcttcgaggccaccgtcactgcgcgcttcccggactcccgtcgctacgaggtcgtgggagtctccgagctacggccgaggccgccgccgccgcagccggggcgcgagttcgagctgtttgacctcgtcgaggcgtacaacaacgacggatggtggccgggcgtcgtgtccgacatccggcccaagcggaggcggaaccaagcgaaacgattcgccgtgtcgctcccgctgttccgcgaggtactggagctctcggcctcgttcgtgcggcccaggcgggagttcgtgtacggaagctggatagacgcgcaggaagtgctcgtagcctcttataaaattttacatgcattggtcacgaactatctgcccgatgggaccctcagccatgcaagccaaacagtacatggaatggaaaggctagtgtcagcaaaggtttatttgtcttatcagggcggaatgcccggtaatggcgagcagtggcgtcatgcgttgaggagttggatccggcggcgaggagagacatccggctgggtggaccactgcgtgaaggaccagacgctcgtcgtggttgccgagaagaagcaaaaggaggagctcaaagaggtgctgggcgacggcagggtggtggtgacagacgacaagaagaagagggtgcagcgcgccaagaagaagccagcgacgttccacggtgaaggtaaggttgcagtccagtgaaggagtcagaagcgcaacaaggagtagagaagacaatcacctagaattgagtgaagagcgagtaggctgcctgagctatgcgtactgcagctgtgagctctccatcaacggtggtttgtctacaagttgaagctgaaagggttgcgcaaatcagctgcgagggataccacagtatgcagaaggaagccgcgtagaggtgatgtgtgataaacagggcagagtttggaggccggctactatcaagaacatggtcggcggtaccaactatgttgttagctatggaaatgggcagagctcgattgaggtcctccacacaatgttcattcggcggccagaacccatccaaatggaagttgaagcccctaatgatagcaatatggagataaaaaacgaaagaatgggtatgtctcttgtggtagcagaaaggtttcacctggaaacctgtacgaactcagccaatgatattacaattgtatcatcacaacatccttgggctgaacctctacaacctgtttctgagaaatcacctggaccatcttcattgcttcatcctgttgtgatggcggatacatcagcattcatggcattggcagtgcctaacagtagtgatctttcaacggcgttctcgacaacttccttgctgctgatgcccaatgacaaaatggaggtcttccagaagctaccacagattccacacttccgcgaggcatggaattgccctccagaacttcgtgaaggaagagccctaggacttatggtctgttttgcaaacatggccaaaagcataaaagacatgcgaattcaggaggaaccacgactttatcaagagaagatgaacatcctgttagagatggaagagaatgggtttgaaactgggcccctgaaggttcgtctccataatcttctttgtacaaggaatcaccatatgaatctcaagagcaggaaagtaagattagagaaggagatacttgagatagaagcaataaactgtggattagagcagcgactcaagttccttgacatgtgcatcatggggatggaggagaagaaataccaagagatgaaaggttcacttgacatccaaaaaacagaaaattgttcacttatttcaaagctccaagtatatttgtgtcaagttgaggaatcactcaagtatgctgaagccgatttttgtagtattgctactgcaccgtggcaaccacatgttgtgccttcgataccgtaaccttgcttagctattaggggggagggggtaacccttctcctccacgcttgaactgtgtaattatgtatatatgcatgctttctccatggagctgagagacaaaccaatgtgtattttgagtttgcagtctgctccacctaacctaagtgatcttcagatacgtgtattttgagtcgtagtgctggttgctctctccagttgtagctcatacttaatgttgcaatttgagaagttgagc

SEQ ID NO: 37508 - DNA, 2232 bp, Zea Mays
gcctggttaatttgatacccatggtttccaatcaattccaacaataattcattcattcgcccactgccacacagcgagcgcgctctcaggctgggctgtacgtatataggtcgcccacaggcagcccagtgactccactccacccacgcctccaccacagagagccgcagcagactcgcaagggggtagtgttgtgtactctgcgctgtgcggacggcggccggcggccggcgaaggagatggatcgcctgcccgagtcgacccggagcatgaggaagtacgcgtcggaggccggcgggctgcgcgcggcgcggcagggcccccacgggcggtcgctgacggcgcgcacggcgcacagcatgtccacgacggcgctgcgcaccaagtccaagtcggccgcgtcgctgctgcgcagggtgcccttcgcgccgctccgccccgtcctcgccaacctgcaggaggtgttcctcggcaccaagctcgccgtgctattccccgccgtgccgctcgccatcgccgcccagtgcgcgcacttcggccaggtaatcgatcaatcaatcccttactccagccacatcgatccactggatcaaaacagaccagcagcatgtggcgccttgctcctcgcatttattcgtcctatcctgcacgccgtggggtctctctgtagcctgcggaccacatgcgatccattcgtgttaaaacccggtcgaaatttgaattggaactgcctcgctcactcactgtcactggcatggcaggtgtgggtgttttcgctcagcctactcggcctcatccccctcgccgagcgtgtcagcttcctcaccgagcagatcgcgatatacaccggccccaccgtgggcggcctcctcaacgcgacgtgcggcaacgccacggagctcatcatcgcgctcttcgcgctcatggagggccagatcgaggtcgtcaagtgctccctcctcggctccgtcctctccaacctgctgctcgtgctcggcacgtccctcttctgcggcggcgtcgtcaacctcggctccgaccagccgtacgacaggacccaagcggacgtcagcacgggcctcctcatcctcggcgtgctgtgccagtcgctgccgctcatgctgcgctacgcggtgggcgccggcgagcactccgtcgccgcggccaccacggtgctcgacctctcccgcgcctgcagcgtcgtcatgctgctcgcctacgtcgcctacctcttcttccagctcaagacgcacgcgcagctgttcgagccgcaggaggtggacgacggctgcgaggcggaagaggacgagcaggccgtcatcggcttcgccagcggactcttctggctcgccttcaacaccgtgctcatcgccatcctgtccgagtacgtggtcggcaccatcgagcctacctccaagtcctggggtttgtccgtcagcttcatcagcatcatacttctacccatcgtggggaacgccgcggagcacgccggagcaatcatttttgctctcaagaacaagctggacattaccctcggagtagcgttggggtcggcgacccagatctccatgtttgtggtgccgctgagtgtcattgtagcttggatcgcgggtattcaaatggatcttgacttcaagctcatagagaccggctctctcttcgtctcagtaatagtgacagcattcaccctccaggatggttcgtcacactacctcaaggggatccttctgctgctgtgctacattgtgatcggtgcatgcttctttgttacgaggcaacctgcaagtaacaacaatggcgctgggctgtcgctgccaactggcactttgagtgcacaagctgcatgatggttcaagggtcctgcctgagcctgaacaaatgagcatccaaggcagcaacgcagttgtgagtctgaaacaatgccgtgcaaaggttgatgctttcagaagcggtgaaatctcagccggtggctcagtgctatgggagaaatgaaggctagctgctgttgcaataagggtagcgaatttgcatccggtctatgtatatgatgctgtgttgtttcatttattatacagcttaataagatatatgcagagggtggatttgtatatatttgtggcttgccggcttgtgcggttgtacaagaggattcccagcttgtttcactagggtgtacggtgaaaacatgtcgggtataccagggccagcgctggccctggcggggtcgaccag

SEQ ID NO: 37509 - DNA, 1945 bp, Zea Mays
cgctgatgactctctgtctctcttgcattttctttttgcatgattaattcattcctctcctcctcttgtttactacgtacggtacgtatctctcgcaaaccggccaaacctctcatcagttaatcatcaaccgaccaatcatcaaggcgcattggtctttaattcctatattcctatcgctgctgctactccagtctccagcagatagatagatcccccgtccatcggcaatcaagcacaacacaatgattaaatgagagcctggttaatttgatacccatggtttccaatcaattccaacaataattcattcattcgcccactgccacacagcgagcgcgctctcaggctgggctgtacgtatataggtcgcccacaggcagcccagtgactccactccacccacgcctccaccacagagagccgcagcagactcgcaagggggtagtgttgtgtactctgcgctgtgcggacggcggccggcggccggcgaaggagatggatcgcctgcccgagtcgacccggagcatgaggaagtacgcgtcggaggccggcgggctgcgcgcggcgcggcagggcccccacgggcggtcgctgacggcgcgcacggcgcacagcatgtccacgacggcgctgcgcaccaagtccaagtcggccgcgtcgctgctgcgcagggtgcccttcgcgccgctccgccccgtcctcgccaacctgcaggaggtgttcctcggcaccaagctcgccgtgctattccccgccgtgccgctcgccatcgccgcccagtgcgcgcacttcggccaggtgtgggtgttttcgctcagcctactcggcctcatccccctcgccgagcgtgtcagcttcctcaccgagcagatcgcgatatacaccggccccaccgtgggcggcctcctcaacgcgacgtgcggcaacgccacggagctcatcatcgcgctcttcgcgctcatggagggccagatcgaggtcgtcaagtgctccctcctcggctccgtcctctccaacctgctgctcgtgctcggcacgtccctcttctgcggcggcgtcgtcaacctcggctccgaccagccgtacgacaggacccaagcggacgtcagcacgggcctcctcatcctcggcgtgctgtgccagtcgctgccgctcatgctgcgctacgcggtgggcgccggcgagcactccgtcgccgcggccaccacggtgctcgacctctcccgcgcctgcagcgtcgtcatgctgctcgcctacgtcgcctacctcttcttccagctcaagacgcacgcgcagctgttcgagccgcaggaggtggacgacggctgcgaggcggaagaggacgagcaggccgtcatcggcttcgccagcggactcttctggctcgccttcaacaccgtgctcatcgccatcctgtccgagtacgtggtcggcaccatcgagcctacctccaagtcctggggtttgtccgtcagcttcatcagcatcatacttctacccatcgtggggaacgccgcggagcacgccggagcaatcatttttgctctcaagaacaagctggacattaccctcggagtagcgttggggtcggcgacccagatctccatgtttgtggtgccgctgagtgtcattgtagcttggatcgcgggtattcaaatggatcttgacttcaagctcatagagaccggctctctcttcgtctcagtaatagtgacagcattcaccctccaggatggttcgtcacactacctcaaggggatccttctgctgctgtgctacattgtgatcggtgcatgcttctttgttacgaggcaacctgcaagtaacaacaatggcgctgggctgtcgctgccaactggcactttgagtgcacaagctgcatgatgggaaatgaacaatactataaccacagtaggacgtatatgaatttgggacagagatg

SEQ ID NO: 37510 - DNA, 1991 bp, Zea Mays
gctcaggaagagtaactgaaccacacatttgtcagaaagaacaatgtaaagccacaaattctatgaccctagtgcacaacagatgcagattttcagacaagcagatcataaagttgcaggaaacaccagacgagataccagaaggtggcactccacatacagttagtgtcttgatgcatgataagcttgttgatgctggaaagcctggagatagggttgagataactggaatatacagagctatgagtattcgaattggaccaactcaaaggacagtgaagtctatattcaagacatatattgattgccttcacataaagaagacagacaagtctaggcttcatgtggaggacaccatggatattgataattctaacgctagcaaatctactgaagaggattttcttagtgataaggttgagaaactaaaagagctttcgaagttgcctgatatctatgaaagattgactagatcattagctccaaacatatgggagttggatgatgtcaaaagaggtctcctttgccagcttttcggcggcaatcccttgaagcttccttctggagctagtttccggggtgacatcaatattttacttgtgggggaccctggaacaagtaaatcccagcttctccagtacatgcataaactgtctcctcgtggtatctatacgagtggtagaggaagttctgctgttggtcttactgcttatgttaccaaagaccctgagactggcgaaactgttctagaaagtggagcacttgttttgagtgacaaaggtgtttgttgcatagatgagtttgataagatgtctgataatgcccgaagcatgttacacgaggtgatggaacagcagacagtatccattgcgaaggctggaataattgcatctttaaacgctaggacatctgtcctggcatgtgccaatcctactgaatcacgttacaatccaaggctctctgtaattgacaacatccacttagcgccaacgctactttcaagattcgacctgatttatcttatcttggacaaggcggatgagcaaactgataggcgcctggcaaagcatattgtttcgttgcattttgagaatccaaatttagaggagctcgaggtcttggacttgcagacactagtttcctacataagctatgcaaggaagtatattcagccacagttatctgatgaagctgcagaagagttaactcgtggctatgtcgagatgagaaaaagagggaatagccctgggagcagaaagaaggtcataacagcaaccgctagacaaatagagagtttgatccgtctcagcgaagcattagcccgaatgcggttctctgaagtggtcgaggtgcgggatgttgtggaggcattcaggcttcttgaagtcgccatgcagcagtctgcgacggatcatgcaactggtacgattgatatggatctgatcatgacggggatatccgcaagcgaaaggcagaggcgggagaacctcgttgccgcaacccgtaacctgattgcggagaaaatgcagcttggaggcccctcgatgcgcatgattgagttgctggaggaactgaggaagcagagctcaatggaaattcatatgcacgaactccgcggtgctcttggcaccctgatgactgaaggcgcggtggttatccatggagacaacgtgaggagagtttgatgtcttgacggccatctgcggtgatgcttctataaggctccaacccgccacttccttgaacagacaaggttccgaagataactgtagcacttagccgtaacttgtggtccgaggtctaaactggtccagatttgtagcagtattgctagttgtagatttttttttaaaaaattgttatcagaattttgttctcttgctattgtccgagtttactgcaacaaggcaactatcatctcgttctctgatcagtatcatgctgggttctatcatctatatgtgcgaacaccggcagcgctgacgcaaggc

SEQ ID NO: 37511 - DNA, 2859 bp, Zea Mays
cccaccaccacctcctctctcactacctatctgccatcccgagtgattgtctgtgcgaccaagacatggcttctgacggcggcggcagctcccctcctccccacacgccgctccggcggtcgccgtcgccgtggttccgctagtccttatgcttcgtccccttctctcggggggttcgagacgccgccgcaccctggccgccgcacgccgtccggagctggggctggcgcccctcggcagccgcgtcagaactcgactggccggttcccgccgacgccctccactccaatgtccaccgatgacgtccctccatcctccgaagctggggacgacgagaccgacggcggcggcggcgtcgacgccaccccggtcttcgtctggggcaccaacataagcgtgcaggacgtcaacgccgccattctccggttcttgcgccacttccgggacccgcgcgacgctggccgcgtcgacccggtcatggacgagggcaagtacatgcgcgccatccaccgcatcctcgagctcgagggcggggagtcgctcgacgtcgatgcgcacgacgtgtttgaccacgacccagacctctacagcaagatggttcgctatccgctcgaggtgctcgccatcttcgacatcgtgctcatggacctcgtcgcgcgcatcgagccgctcttcgagaagcacatccagaccaggatctacaacctcaagtcgtccatttgcttgaggaatctcaacccatctgatattgagaagatggtatccatcaagggtatgataattagatgcagctcggtcataccggagctcaaggaggctgtgttccgctgcctggtttgtggtttctactcagagcccgtcatggttgatagaggaagagtaactgaaccacacatttgtcagaaagaacaatgtaaagccacaaattctatgaccctagtgcacaacagatgcagattttcagacaagcagatcataaagttgcaggaaacaccagacgagataccagaaggtggcactccacatacagttagtgtcttgatgcatgataagcttgttgatgctggaaagcctggagatagggttgagataactggaatatacagagctatgagtattcgaattggaccaactcaaaggacagtgaagtctatattcaagacatatattgattgccttcacataaagaagacagacaagtctaggcttcatgtggaggacaccatggatattgataattctaacgctagcaaatctactgaagaggattttcttagtgataaggttgagaaactaaaagagctttcgaagttgcctgatatctatgaaagattgactagatcattagctccaaacatatgggagttggatgatgtcaaaagaggtctcctttgccagcttttcggcggcaatcccttgaagcttccttctggagctagtttccggggtgacatcaatattttacttgtgggggaccctggaacaagtaaatcccagcttctccagtacatgcataaactgtctcctcgtggtatctatacgagtggtagaggaagttctgctgttggtcttactgcttatgttaccaaagaccctgagactggcgaaactgttctagaaagtggagcacttgttttgagtgacaaaggtgtttgttgcatagatgagtttgataagatgtctgataatgcccgaagcatgttacacgaggtgatggaacagcagacagtatccattgcgaaggctggaataattgcatctttaaacgctaggacatctgtcctggcatgtgccaatcctactgaatcacgttacaatccaaggctctctgtaattgacaacatccacttagcgccaacgctactttcaagattcgacctgatttatcttatcttggacaaggcggatgagcaaactgataggcgcctggcaaagcatattgtttcgttgcattttgagaatccaaatttagaggagctcgaggtcttggacttgcagacactagtttcctacataagctatgcaaggaagtatattcagccacagttatctgatgaagctgcagaagagttaactcgtggctatgtcgagatgagaaaaagagggaatagccctgggagcagaaagaaggtcataacagcaaccgctagacaaatagagagtttgatccgtctcagcgaagcattagcccgaatgcggttctctgaagtggtcgaggtgcgggatgttgtggaggcattcaggcttcttgaagtcgccatgcagcagtctgcgacggatcatgcaactggtacgattgatatggatctgatcatgacggggatatccgcaagcgaaaggcagaggcgggagaacctcgttgccgcaacccgtaacctgattgcggagaaaatgcagcttggaggcccctcgatgcgcatgattgagttgctggaggaactgaggaagcagagctcaatggaaattcatatgcacgaactccgcggtgctcttggcaccctgatgactgaaggcgcggtggttatccatggagacaacgtgaggagagtttgatgtcttgacggccatctgcggtgatgcttctataaggctccaacccgccacttccttgaacagacaaggttccgaagataactgtagcacttagccgtaacttgtggtccgaggtctaaactggtccagatttgtagcagtattgctagttgtagatttttttttaaaaaattgttatcagaattttgttctcttgctattgtccgagtttactgcaacaaggcaactatcatctcgttctctgatcagtatcatgctgggttctatcatctatatgtgcgaacaccggcagcgctgacgcaaggc

SEQ ID NO: 37512 - DNA, 2091 bp, Zea Mays
cccatatcccaccaccacctcctctctcactacctatctgccatcccgagtgattgtctgtgcgaccaagacatggcttctgacggcggcggcagctcccctcctcgaagagtaactgaaccacacatttgtcagaaagaacaatgtaaagccacaaattctatgaccctagtgcacaacagatgcagattttcagacaagcagatcataaagttgcaggaaacaccagacgagataccagaaggtggcactccacatacagttagtgtcttgatgcatgataagcttgttgatgctggaaagcctggagatagggttgagataactggaatatacagagctatgagtattcgaattggaccaactcaaaggacagtgaagtctatattcaagacatatattgattgccttcacataaagaagacagacaagtctaggcttcatgtggaggacaccatggatattgataattctaacgctagcaaatctactgaagaggattttcttagtgataaggttgagaaactaaaagagctttcgaagttgcctgatatctatgaaagattgactagatcattagctccaaacatatgggagttggatgatgtcaaaagaggtctcctttgccagcttttcggcggcaatcccttgaagcttccttctggagctagtttccggggtgacatcaatattttacttgtgggggaccctggaacaagtaaatcccagcttctccagtacatgcataaactgtctcctcgtggtatctatacgagtggtagaggaagttctgctgttggtcttactgcttatgttaccaaagaccctgagactggcgaaactgttctagaaagtggagcacttgttttgagtgacaaaggtgtttgttgcatagatgagtttgataagatgtctgataatgcccgaagcatgttacacgaggtgatggaacagcagacagtatccattgcgaaggctggaataattgcatctttaaacgctaggacatctgtcctggcatgtgccaatcctactgaatcacgttacaatccaaggctctctgtaattgacaacatccacttagcgccaacgctactttcaagattcgacctgatttatcttatcttggacaaggcggatgagcaaactgataggcgcctggcaaagcatattgtttcgttgcattttgagaatccaaatttagaggagctcgaggtcttggacttgcagacactagtttcctacataagctatgcaaggaagtatattcagccacagttatctgatgaagctgcagaagagttaactcgtggctatgtcgagatgagaaaaagagggaatagccctgggagcagaaagaaggtcataacagcaaccgctagacaaatagagagtttgatccgtctcagcgaagcattagcccgaatgcggttctctgaagtggtcgaggtgcgggatgttgtggaggcattcaggcttcttgaagtcgccatgcagcagtctgcgacggatcatgcaactggtacgattgatatggatctgatcatgacggggatatccgcaagcgaaaggcagaggcgggagaacctcgttgccgcaacccgtaacctgattgcggagaaaatgcagcttggaggcccctcgatgcgcatgattgagttgctggaggaactgaggaagcagagctcaatggaaattcatatgcacgaactccgcggtgctcttggcaccctgatgactgaaggcgcggtggttatccatggagacaacgtgaggagagtttgatgtcttgacggccatctgcggtgatgcttctataaggctccaacccgccacttccttgaacagacaaggttccgaagataactgtagcacttagccgtaacttgtggtccgaggtctaaactggtccagatttgtagcagtattgctagttgtagatttttttttaaaaaattgttatcagaattttgttctcttgctattgtccgagtttactgcaacaaggcaactatcatctcgttctctgatcagtatcatgctgggttctatcatctatatgtgcgaacaccggcagcgctgacgcaaggc

SEQ ID NO: 37513 - DNA, 2733 bp, Zea Mays
ccccatcccacccttcccatatcccaccaccacctcctctctcactacctatctgccatcccgagtgattgtctgtgcgaccaagacatggcttctgacggcggcggcagctcccctcctcccgcatcgtcgccctatggtcggccgtcaagcccactcgcggttactaactcctccccatctcagcccacacgccgctccggcggtcgccgtcgccgtggttccgctagtccttatgcttcgtccccttctctcggggggttcgagacgccgccgcaccctggccgccgcacgccgtccggagctggggctggcgcccctcggcagccgcgtcagaactcgactggccggttcccgccgacgccctccactccaatgtccaccgatgacgtccctccatcctccgaagctggggacgacgagaccgacggcggcggcggcgtcgacgccaccccggtcttcgtctggggcaccaacataagcgtgcaggacgtcaacgccgccattctccggttcttgcgccacttccgggacccgcgcgacgctggccgcgtcgacccggtcatggacgagggcaagtacatgcgcgccatccaccgcatcctcgagctcgagggcggggagtcgctcgacgtcgatgcgcacgacgtgtttgaccacgacccagacctctacagcaagatggttcgctatccgctcgaggtgctcgccatcttcgacatcgtgctcatggacctcgtcgcgcgcatcgagccgctcttcgagaagcacatccagaccaggatctacaacctcaagtcgtccatttgcttgaggaatctcaacccatctgatattgagaagatggtatccatcaagggtatgataattagatgcagctcggtcataccggagctcaaggaggctgtgttccgctgcctggtttgtggtttctactcagagcccgtcatggttgatagaggaagagtaactgaaccacacatttgtcagaaagaacaatgtaaagccacaaattctatgaccctagtgcacaacagatgcagattttcagacaagcagatcataaagttgcaggaaacaccagacgagataccagaaggtggcactccacatacagttagtgtcttgatgcatgataagcttgttgatgctggaaagcctggagatagggttgagataactggaatatacagagctatgagtattcgaattggaccaactcaaaggacagtgaagtctatattcaagacatatattgattgccttcacataaagaagacagacaagtctaggcttcatgtggaggacaccatggatattgataattctaacgctagcaaatctactgaagaggattttcttagtgataaggttgagaaactaaaagagctttcgaagttgcctgatatctatgaaagattgactagatcattagctccaaacatatgggagttggatgatgtcaaaagaggtctcctttgccaggttctagaaagtggagcacttgttttgagtgacaaaggtgtttgttgcatagatgagtttgataagatgtctgataatgcccgaagcatgttacacgaggtgatggaacagcagacagtatccattgcgaaggctggaataattgcatctttaaacgctaggacatctgtcctggcatgtgccaatcctactgaatcacgttacaatccaaggctctctgtaattgacaacatccacttagcgccaacgctactttcaagattcgacctgatttatcttatcttggacaaggcggatgagcaaactgataggcgcctggcaaagcatattgtttcgttgcattttgagaatccaaatttagaggagctcgaggtcttggacttgcagacactagtttcctacataagctatgcaaggaagtatattcagccacagttatctgatgaagctgcagaagagttaactcgtggctatgtcgagatgagaaaaagagggaatagccctgggagcagaaagaaggtcataacagcaaccgctagacaaatagagagtttgatccgtctcagcgaagcattagcccgaatgcggttctctgaagtggtcgaggtgcgggatgttgtggaggcattcaggcttcttgaagtcgccatgcagcagtctgcgacggatcatgcaactggtacgattgatatggatctgatcatgacggggatatccgcaagcgaaaggcagaggcgggagaacctcgttgccgcaacccgtaacctgattgcggagaaaatgcagcttggaggcccctcgatgcgcatgattgagttgctggaggaactgaggaagcagagctcaatggaaattcatatgcacgaactccgcggtgctcttggcaccctgatgactgaaggcgcggtggttatccatggagacaacgtgaggagagtttgatgtcttgacggccatctgcggtgatgcttctataaggctccaacccgccacttccttgaacagacaaggttccgaagataactgtagcacttagccgtaacttgtggtccgaggtctaaactggtccagatttgtagcagtattgctagttgtagatttttttttaaaaaattgttatcagaattttgttctcttgctattgtccgagtttactgcaacaaggcaactatcatctcgttctctgatcagtatcatgctgggttctatcatctatatgtgcgaacaccggcagcgctgacgcaaggc

SEQ ID NO: 37514 - DNA, 2936 bp, Zea Mays
cccatccccatcccacccttcccatatcccaccaccacctcctctctcactacctatctgccatcccgagtgattgtctgtgcgaccaagacatggcttctgacggcggcggcagctcccctcctcccgcatcgtcgccctatggtcggccgtcaagcccactcgcggttactaactcctccccatctcagcccacacgccgctccggcggtcgccgtcgccgtggttccgctagtccttatgcttcgtccccttctctcggggggttcgagacgccgccgcaccctggccgccgcacgccgtccggagctggggctggcgcccctcggcagccgcgtcagaactcgactggccggttcccgccgacgccctccactccaatgtccaccgatgacgtccctccatcctccgaagctggggacgacgagaccgacggcggcggcggcgtcgacgccaccccggtcttcgtctggggcaccaacataagcgtgcaggacgtcaacgccgccattctccggttcttgcgccacttccgggacccgcgcgacgctggccgcgtcgacccggtcatggacgagggcaagtacatgcgcgccatccaccgcatcctcgagctcgagggcggggagtcgctcgacgtcgatgcgcacgacgtgtttgaccacgacccagacctctacagcaagatggttcgctatccgctcgaggtgctcgccatcttcgacatcgtgctcatggacctcgtcgcgcgcatcgagccgctcttcgagaagcacatccagaccaggatctacaacctcaagtcgtccatttgcttgaggaatctcaacccatctgatattgagaagatggtatccatcaagggtatgataattagatgcagctcggtcataccggagctcaaggaggctgtgttccgctgcctggtttgtggtttctactcagagcccgtcatggttgatagaggaagagtaactgaaccacacatttgtcagaaagaacaatgtaaagccacaaattctatgaccctagtgcacaacagatgcagattttcagacaagcagatcataaagttgcaggaaacaccagacgagataccagaaggtggcactccacatacagttagtgtcttgatgcatgataagcttgttgatgctggaaagcctggagatagggttgagataactggaatatacagagctatgagtattcgaattggaccaactcaaaggacagtgaagtctatattcaagacatatattgattgccttcacataaagaagacagacaagtctaggcttcatgtggaggacaccatggatattgataattctaacgctagcaaatctactgaagaggattttcttagtgataaggttgagaaactaaaagagctttcgaagttgcctgatatctatgaaagattgactagatcattagctccaaacatatgggagttggatgatgtcaaaagaggtctcctttgccagcttttcggcggcaatcccttgaagcttccttctggagctagtttccggggtgacatcaatattttacttgtgggggaccctggaacaagtaaatcccagcttctccagtacatgcataaactgtctcctcgtggtatctatacgagtggtagaggaagttctgctgttggtcttactgcttatgttaccaaagaccctgagactggcgaaactgttctagaaagtggagcacttgttttgagtgacaaaggtgtttgttgcatagatgagtttgataagatgtctgataatgcccgaagcatgttacacgagacagtatccattgcgaaggctggaataattgcatctttaaacgctaggacatctgtcctggcatgtgccaatcctactgaatcacgttacaatccaaggctctctgtaattgacaacatccacttagcgccaacgctactttcaagattcgacctgatttatcttatcttggacaaggcggatgagcaaactgataggcgcctggcaaagcatattgtttcgttgcattttgagaatccaaatttagaggagctcgaggtcttggacttgcagacactagtttcctacataagctatgcaaggaagtatattcagccacagttatctgatgaagctgcagaagagttaactcgtggctatgtcgagatgagaaaaagagggaatagccctgggagcagaaagaaggtcataacagcaaccgctagacaaatagagagtttgatccgtctcagcgaagcattagcccgaatgcggttctctgaagtggtcgaggtgcgggatgttgtggaggcattcaggcttcttgaagtcgccatgcagcagtctgcgacggatcatgcaactggtacgattgatatggatctgatcatgacggggatatccgcaagcgaaaggcagaggcgggagaacctcgttgccgcaacccgtaacctgattgcggagaaaatgcagcttggaggcccctcgatgcgcatgattgagttgctggaggaactgaggaagcagagctcaatggaaattcatatgcacgaactccgcggtgctcttggcaccctgatgactgaaggcgcggtggttatccatggagacaacgtgaggagagtttgatgtcttgacggccatctgcggtgatgcttctataaggctccaacccgccacttccttgaacagacaaggttccgaagataactgtagcacttagccgtaacttgtggtccgaggtctaaactggtccagatttgtagcagtattgctagttgtagatttttttttaaaaaattgttatcagaattttgttctcttgctattgtccgagtttactgcaacaaggcaactatcatctcgttctctgatcagtatcatgctgggttctatcatctatatgtgcgaacaccggcagcgctgacgcaaggc

SEQ ID NO: 37515 - DNA, 2955 bp, Zea Mays
cccatccccatccccatcccacccttcccatatcccaccaccacctcctctctcactacctatctgccatcccgagtgattgtctgtgcgaccaagacatggcttctgacggcggcggcagctcccctcctcccgcatcgtcgccctatggtcggccgtcaagcccactcgcggttactaactcctccccatctcagcccacacgccgctccggcggtcgccgtcgccgtggttccgctagtccttatgcttcgtccccttctctcggggggttcgagacgccgccgcaccctggccgccgcacgccgtccggagctggggctggcgcccctcggcagccgcgtcagaactcgactggccggttcccgccgacgccctccactccaatgtccaccgatgacgtccctccatcctccgaagctggggacgacgagaccgacggcggcggcggcgtcgacgccaccccggtcttcgtctggggcaccaacataagcgtgcaggacgtcaacgccgccattctccggttcttgcgccacttccgggacccgcgcgacgctggccgcgtcgacccggtcatggacgagggcaagtacatgcgcgccatccaccgcatcctcgagctcgagggcggggagtcgctcgacgtcgatgcgcacgacgtgtttgaccacgacccagacctctacagcaagatggttcgctatccgctcgaggtgctcgccatcttcgacatcgtgctcatggacctcgtcgcgcgcatcgagccgctcttcgagaagcacatccagaccaggatctacaacctcaagtcgtccatttgcttgaggaatctcaacccatctgatattgagaagatggtatccatcaagggtatgataattagatgcagctcggtcataccggagctcaaggaggctgtgttccgctgcctggtttgtggtttctactcagagcccgtcatggttgatagaggaagagtaactgaaccacacatttgtcagaaagaacaatgtaaagccacaaattctatgaccctagtgcacaacagatgcagattttcagacaagcagatcataaagttgcaggaaacaccagacgagataccagaaggtggcactccacatacagttagtgtcttgatgcatgataagcttgttgatgctggaaagcctggagatagggttgagataactggaatatacagagctatgagtattcgaattggaccaactcaaaggacagtgaagtctatattcaagacatatattgattgccttcacataaagaagacagacaagtctaggcttcatgtggaggacaccatggatattgataattctaacgctagcaaatctactgaagaggattttcttagtgataaggttgagaaactaaaagagctttcgaagttgcctgatatctatgaaagattgactagatcattagctccaaacatatgggagttggatgatgtcaaaagaggtctcctttgccagcttttcggcggcaatcccttgaagcttccttctggagctagtttccggggtgacatcaatattttacttgtgggggaccctggaacaagtaaatcccagcttctccagtacatgcataaactgtctcctcgtggtatctatacgagtggtagaggaagttctgctgttggtcttactgcttatgttaccaaagaccctgagactggcgaaactgttctagaaagtggagcacttgttttgagtgacaaaggtgtttgttgcatagatgagtttgataagatgtctgataatgcccgaagcatgttacacgaggtgatggaacagcagacagtatccattgcgaaggctggaataattgcatctttaaacgctaggacatctgtcctggcatgtgccaatcctactgaatcacgttacaatccaaggctctctgtaattgacaacatccacttagcgccaacgctactttcaagattcgacctgatttatcttatcttggacaaggcggatgagcaaactgataggcgcctggcaaagcatattgtttcgttgcattttgagaatccaaatttagaggagctcgaggtcttggacttgcagacactagtttcctacataagctatgcaaggaagtatattcagccacagttatctgatgaagctgcagaagagttaactcgtggctatgtcgagatgagaaaaagagggaatagccctgggagcagaaagaaggtcataacagcaaccgctagacaaatagagagtttgatccgtctcagcgaagcattagcccgaatgcggttctctgaaggtcgaggtgcgggatgttgtggaggcattcaggcttcttgaagtcgccatgcagcagtctgcgacggatcatgcaactggtacgattgatatggatctgatcatgacggggatatccgcaagcgaaaggcagaggcgggagaacctcgttgccgcaacccgtaacctgattgcggagaaaatgcagcttggaggcccctcgatgcgcatgattgagttgctggaggaactgaggaagcagagctcaatggaaattcatatgcacgaactccgcggtgctcttggcaccctgatgactgaaggcgcggtggttatccatggagacaacgtgaggagagtttgatgtcttgacggccatctgcggtgatgcttctataaggctccaacccgccacttccttgaacagacaaggttccgaagataactgtagcacttagccgtaacttgtggtccgaggtctaaactggtccagatttgtagcagtattgctagttgtagatttttttttaaaaaattgttatcagaattttgttctcttgctattgtccgagtttactgcaacaaggcaactatcatctcgttctctgatcagtatcatgctgggttctatcatctatatgtgcgaacaccggcagcgctgacgcaaggc

SEQ ID NO: 37516 - DNA, 1938 bp, Zea Mays
ctccgctagacttcacccccaaaaaaaaataccgcttttcttcgtcgtcgggaacattctaggctccgcacgaagagtcgtctggggaaaaaattccgatccccacgacagcaacactggttctccgttctccctcctcgtgcgctccgcaatgactcccggatcctccctcttgtgcgctccgcagagctatgagtattcgaattggaccaactcaaaggacagtgaagtctatattcaagacatatattgattgccttcacataaagaagacagacaagtctaggcttcatgtggaggacaccatggatattgataattctaacgctagcaaatctactgaagaggattttcttagtgataaggttgagaaactaaaagagctttcgaagttgcctgatatctatgaaagattgactagatcattagctccaaacatatgggagttggatgatgtcaaaagaggtctcctttgccagcttttcggcggcaatcccttgaagcttccttctggagctagtttccggggtgacatcaatattttacttgtgggggaccctggaacaagtaaatcccagcttctccagtacatgcataaactgtctcctcgtggtatctatacgagtggtagaggaagttctgctgttggtcttactgcttatgttaccaaagaccctgagactggcgaaactgttctagaaagtggagcacttgttttgagtgacaaaggtgtttgttgcatagatgagtttgataagatgtctgataatgcccgaagcatgttacacgaggtgatggaacagcagacagtatccattgcgaaggctggaataattgcatctttaaacgctaggacatctgtcctggcatgtgccaatcctactgaatcacgttacaatccaaggctctctgtaattgacaacatccacttagcgccaacgctactttcaagattcgacctgatttatcttatcttggacaaggcggatgagcaaactgataggcgcctggcaaagcatattgtttcgttgcattttgagaatccaaatttagaggagctcgaggtcttggacttgcagacactagtttcctacataagctatgcaaggaagtatattcagccacagttatctgatgaagctgcagaagagttaactcgtggctatgtcgagatgagaaaaagagggaatagccctgggagcagaaagaaggtcataacagcaaccgctagacaaatagagagtttgatccgtctcagcgaagcattagcccgaatgcggttctctgaaggtcgaggtgcgggatgttgtggaggcattcaggcttcttgaagtcgccatgcagcagtctgcgacggatcatgcaactggtacgattgatatggatctgatcatgacggggatatccgcaagcgaaaggcagaggcgggagaacctcgttgccgcaacccgtaacctgattgcggagaaaatgcagcttggaggcccctcgatgcgcatgattgagttgctggaggaactgaggaagcagagctcaatggaaattcatatgcacgaactccgcggtgctcttggcaccctgatgactgaaggcgcggtggttatccatggagacaacgtgaggagagtttgatgtcttgacggccatctgcggtgatgcttctataaggctccaacccgccacttccttgaacagacaaggttccgaagataactgtagcacttagccgtaacttgtggtccgaggtctaaactggtccagatttgtagcagtattgctagttgtagatttttttttaaaaaattgttatcagaattttgttctcttgctattgtccgagtttactgcaacaaggcaactatcatctcgttctctgatcagtatcatgctgggttctatcatctatatgtgcgaacaccggcagcgctgacgcaaggc

SEQ ID NO: 37517 - DNA, 916 bp, Zea Mays
ctagacttcacccccaaaaaaaaataccgcttttcttcgtcgtcgggaacattctaggctccgcacgaagagtcgtctggggaaaaaattccgatccccacgacagcaacactggttctccgttctccctcctcgtgcgctccgcaatgactcccggatcctccctcttgtgcgctccgcagagttccagatagacgactaggcataacaaatttctagaggaaacaagtttctgtaagcaaattgaacttgaattcagaacgccgaagaaagccactgaagttgatattgagataatgtcgtcgagcaaccacaatcagggcgataatgtcaatgaatcgcagtcacaacaaggttctataccatctgttaatggttccgaagcaataggaggaaatgaggaagtggaagagattgaagtatctaatgatgaagactagaatggtggtgttggttcaaagagaaagttgacttcaactatttggaatgaattcaaaagggttaaagttggggataaaattgaagcaaagtgcaattggtgtgcaaaaaagcttggaggagagacaaaaaaatgaaaccaaacatcttcatgatcatctcaagatatgcccatagcgtaagagtaaaatggcctggcaaaacaagacatttagccaaagctcattaaggtttggttcccatgataaaggaaaaacctcagtggaaaacaatacatttgagatagggaagagggaggggggaggcgcgggcggcttgcgccgaggtagacggaatcgggtagatagagcaaggttatgttggtttagctttttatcatttaccaaaaacctttttataatttcagatatgtaaatataaatatagatatattctgaaaattaatataaatacaatattattattcacttaaataaat

SEQ ID NO: 37518 - DNA, 852 bp, Zea Mays
cttcatcggacatcatcaccattcgtcctctccgctagacttcacccccaaaaaaaaataccgcttttcttcgtcgtcgggaacattctaggctccgcacgaagagtcgtctggggaaaaaattccgatccccacgacagcaacactggttctccgttctccctcctcgtgcgctccgcaatgactcccggatcctccctcttgtgcgctccgcagagttgatattgagataatgtcgtcgagcaaccacaatcagggcgataatgtcaatgaatcgcagtcacaacaaggttctataccatctgttaatggttccgaagcaataggaggaaatgaggaagtggaagagattgaagtatctaatgatgaagactagaatggtggtgttggttcaaagagaaagttgacttcaactatttggaatgaattcaaaagggttaaagttggggataaaattgaagcaaagtgcaattggtgtgcaaaaaagcttggaggagagacaaaaaaatgaaaccaaacatcttcatgatcatctcaagatatgcccatagcgtaagagtaaaatggcctggcaaaacaagacatttagccaaagctcattaaggtttggttcccatgataaaggaaaaacctcagtggaaaacaatacatttgagatagggaagagggaggggggaggcgcgggcggcttgcgccgaggtagacggaatcgggtagatagagcaaggttatgttggtttagctttttatcatttaccaaaaacctttttataatttcagatatgtaaatataaatatagatatattctgaaaattaatataaatacaatattattattcacttaaataaat

SEQ ID NO: 37519 - DNA, 1569 bp, Zea Mays
cccttttccccttctctcgactcgcctctctaggtttccttgcagccgcatgctgtcccgctgcactgcaagctagcgactagcagcagttgccaacgaccaccaccgccgccgccctcacctcacctaccacacactgccgtgatccccggcccttttgcctgcagaccgcctgtgccttttgttccctgtgccctgggaggttctgttctgtccccggtcgatcgaccttctcttctcgtcggagttattagcaactgcctgttgtccagccaaactaaaacccttttgccgtcacaaaccagcttagctttgctgatcagggcaaggctctgccggatttttttacaagaagaacctagctagcttttcaggccgtcactctgccgaaatttttcgccagaaacactgctgtctagggcgtcactctgccgaaatttccggcgctccaaaacctgcttgtacgtccagggcgcgcggcaccctgtcaaaagatttcaccttgcctgttcaagggaaaactctgctggatttttgttctttctttcgcggcacacacagcgttgcttccgtgatttgctttgcatgcgttttgtgcaaccaagcaacagcctctaggctttatttgatggtgccgctgctgtcgtgtttatgataacatccactgtgctcgtccagtccttctccgtcgtcttcctctactggttctacgtcttctcataattaattaaaccacacccccgtgtccatcgactgctcgcgcgctcttccagatccaagttctgaatccctgtcggcaacttagcttgtagctatagctatagtccggcttagtagtaaaacacagcaacaaactagctgctccatctcgatcgatcgttaaccaggtaattaatcgtcgtcgagacgcataaaaagaagggaaaagaaaaaagaacagtgtgtgcatatgatggcctctcctcccactcccagcacggtgtctacgaccgtgaccacgtcgccgtcgtcgaccggcgggtccgagctggggcccgacccgcagctggccgccgagaggaagcgcaagcgcaaggagtcgaaccggctgtccgcgcagcggtcccgcgcgcgcaagcagcggcagctggacgacctcacggcgcaggtggccgcgctgcgcgcccgcaacggcgccatggacgcggccgcccgcgacgccgcgcgccggtgcgtcgccgtgcaggccgagaacgcgatgctgcacgcccggaccgtggagctcagcgcgcgcctccagtccctcgtcgacctcatccagtgcatgcaagcaggcgacgccatgtaccagtaccagcagttgccgctggtggacgccaccatctacaactactactagctagtgtccatcgtgctatagctatgcctgctagctgtgtgtctgctgctttgtctactctactcccggtcgggtcgtgttgttattggttgggcacattggaaagcaggccaaagtagggtttagttttgtggtggtgtcatggtgtgtcactttatatataatagcgtgacatggacggcaaaagcaaa

SEQ ID NO: 37520 - DNA, 1781 bp, Zea Mays
cacttacataattattgttgggacatacgaagtacttcgcagtgtcctcacatgtcacaggacgatctccgcaatcgcaccgagacagagactccagccgtctttgtgtggctatgttcttctcctcatctgtcattggtggcgggtcggggaggaggcacccaatgcttaaaacgctcatgtgtattcctctcgcacaaccaattatcgaaaaggagatatcgagagtcaaacttatcaagaccgtcgatccactggaaaagaacagctctcatgatcctacaagaaatgaaatgaagcattagtacacatctatttaatagtaacaacatacaagtaaaagaccacataaattaaaacgaccacatgtgtaaaaacaacgagcaaccgtatctggatgttagattaaaatacccaagtcggcctgccatagtcacaattagacacatgaagctcaagatgatgcattatgatataactctcgagtactacctctcttctgccacaacatctctcgatacatgtctccatttacgaaacgattttatattaatatgactatagaaatagcaaaaatgatttaaacttttaaataacatggtactcatggtttcaaaaccctaaagattttttaaacccgcgattcacaaactatatagcaaatcgtaatcatcatatcaacaaccataactaatagcaataagttcaccgatcaaaactaattaatcaaaaccctaaataaaccatactatgcaatataggtgaaaatgaattattgagacatcataccttgatcttcaagctatatggaccgaatcgaagttttaaaactcaaatacgaagatttaaacttataaataacatggtactcatagtttcaaaaaccctaaagattttataaacccatggttcagtaactatctaacgaattgtagtcatcatatcaaccatatatcttagaaaccataactaatagcaatatgtgcaccaatcaaaactaataaatcggaaccatactacgcaatatacgtaacaaacgaatcagtgaaacaccataccctggtcttcaagctatatatacggatcaaatcaaagttttccaactcgaatacaaagattagagcacctctcgacggtatggataaagagaaaagcaagggagataaatggttgggcgtagctctcggcaagggaaggagcgatttataacacttcatagctcggaaccaagatatgcaacatcgatttaggtgccacgtcggtgccgcgtcaggcctccgtcgccagtgaggcaggtaacttggcgccataggatgtgacggcgagcagtgttacctcggcgtcacgactcacgacctatgacaccgaacaagaggtccaaacgagattaagtcgtccaggagtctaaacatggaaatttttttagcaaaagaggtaaaataaaaaaatcgggttgcaaggtacaggtgtcagtgtgacaaccagcccccaaccttgactttataaaaaaaaaacttgactgacctatctaacctgagattccttaaccctagttaggcctaactaactccagttctccatgcagtgcaggtgccaggtgcagcaccactcaaagcaaggtacccaacccaaggcaaaacctaatggaatcctcgagcgacacctaacctgagattccaaaggccctcttcctccctctcgctttccctgcctgctttccccggccgtggtcgctttctcctcctccaccaccaccaccaccgcacacaccggcctttcgc

SEQ ID NO: 37521 - DNA, 4523 bp, Zea Mays
atgaatcctctgtccggttcatcttccaccatctcgtgtttctccacccaattacgcagtctcgcgcaagttctgctctccggccgagcaggcagccgcctccgccgcgtcctcccggctgcccacgcccgcgccatcatctccgatggacttggcttcctgtttctcgcgaaccttctcctcgacggttactctaagctcggccgcatccacgacgcgcgccgcctgttcgatggaatgccgcaccggaacctcgtgtcctggtcgtcagccatctccatgtacgcgcagcacggcgccgatggccaagcccttgccctgtttgcagccttcaggagatcctctgacgaggcacccaacgaattcgttcttgccagcgtcgtgcgggcctgcatgcagtccagggatgttccttttggcgagcaagtgcatggaaagatcattaatcttggcctggatgtcaatctctatgttggcactgcactcgtcaacctatatgcgaaggttgcctgcatggatgcggccatgcgtgtgttccatgctctcccaacaaagaatccggttacttggacagcaatcatcactggttactctcggattggccatggagaactagccctgggcttgtttcaaacgatggtcgctcaaggcgtccagcctgacaggtttgtgttagcaagtgctgtcagtgcctgctctgcacttgcctttctacagggaggcaggcaaatacatggctacgcttatcgaagtgcagcagaagtggatgcttccgtgatcaacgcgctcatagatttgtattgcaagtgctccagaccgttagtggctcgtaagctatttgatcgaatgaagaatcataatctcgtgtcttggactacaatgattgctggttatatgcagaattcacttgatgctgaagccatacagatgttctggcagatgtgtcaggctggatggcagccagatgcttttgcctgtacaagtatcttgaattcgtgtggttcaatggaagctatttcacaaggaacacagatacatgcccatgccataaaggttaatctggagaatgatgagtatgtcaagaatgctctcattgacatgtacgctaaatgtgcccatttaactgctgcaagagtggcatttgatgccttggcgcatgatgacgtagtctcttacaatgcgatgatcgaaggctatgcaaggcaaggtgatcttacagaagcagttcatatattccgtaaaatgaaatattactccataaggccaaacctactaacctttgtttcactccttgggatgtcatcacttctatcatctattgaatggagtaagcagattcatggtctcatcatcaaatcaggaacttcagtcgacctctatgtgggaagtgctctaatcgatgcatattcaaaatcttcccttgtggatgatgccaaggctgtgttttttatgatgcaaaacagggacatggccatctggaatgctatgatatttggccacacacagaatgagcaaggggaagaggcagtaaaactcttcaaccaggttcgtgtctctgggatgacacccaatgagttcacgtttgtagcactagtaactgtggcgagcaacttggcaagcatgtttcatgggcagcagtttcatgcccagatcatcaaagcaggttgtgacattaatcctcatgtttcaaatgctcttgtagacatgtatgcaaaatgtggcttcattaaagaaggatggatgctgtttgagtcaacatgtgggaaggatgttatttgttggaactccatgattactatgtatgcacaacatggtcatgctgaagaagccctttgtgctttccagctgatgagagaggccaaagtagaaccaaactatgtgacttttgttggtgtgctatcagcatgtgctcatgcaggccttgtggatgaaggcttacaccattttaactctatgaaatcaaaatatggtattgacccgggcactgagcattatgcttcagtggtcaatctcctcggtcgttcagggaaattacattctgctcaggagttcattgaaaagatgccaatcaaaccagcggcagctgtttggaggagcttgctgagtgcctgccgtctctttggtaatgttcaaattgggaggtatgccgctgaaatggcactcttggaagatccgtcagacagtggcccttatgtattactatccaatatttatgcctccaaagggctatgggtggatgtgcagcagctaagactgaggatggattatgctggggcggtgaaggagccaggttatagttggattgaggtgatgaaggaggttcatatgttcattgcaagagggacagaacacccacaggcagaattgatatatgcagtattggatgaactgacgggtctactaaaggattttggctatcaccctgatatctctgaacttgcattgcttggtgagactggttagtgctacttgctcattggtcagctctgggatgatgaggctgtgatatagtattagtggctttagaattttactgttacttacaactgccagttccaaaacaataacctgactggagtcatcttccgatgctgaaccagaaatcaagacttgagtcatcttctatgcatgatgctagacaaataaaaaaatcagcaggtcctcagctcgtgaatgattccagaagcaaggggatggttctgacaaatttcggtcccatgtacctagatgcatggatgcgaacagtgacttgtatagttcctggcatcagtatgaggtggtgtacggtggttttctttcagcactgattatgccctaggtagtctaacatacctgggtacttcaaacagcaaatccattttagccatcagttatgatgtgatgggcaagacgttttgctagattattcaactaagttgcatctttgtacatctgacaatttattcagtactgaagtattctgctagcatcattagtcatgacgttctgagacttcgtctctgtttcaataacttacagtgagcttcttactggtatggtgccttatactcatctgagagcagaagcacaggcacacactgttcttgaaatgacttatactgaacaacaacttacagcagcatttgtttctcaagcatcgccactggcggagtacgaactgaaaaataggcatgacggagcttactatatgcacaaaaaaaaagataaccacccataaacttgcagaaacaaggaagaaaaaaatccataaacttgcaaaaacagtgaaaaacatttaaaaacgtgcacacagtaggctttgaacctgcaacgtacacccctgtactaggaatgatttgctcctttagttgggagctacactgtactaataagtttgctcagatccagatatggcaagaccgcaagagccatactccgtcataacaggtcctccgcccctgagcattgcgtccatcacttgcccttcctcaatctggtgccccaccaactcttttgtcacttatccagcgttgctgggatccttatcctgaaaagagaccatcatttgaagacataattggtgagctaaatatagctcaaaagcctttagtttcaaatgcttccgttccatcatttcctgtgagcaagagtcaaaatggcaccaaagaagtgcaccgttatcaagaagcatcgaactgtttcaaccaaggggagctttttgttaagagatcatgtagatcagatcttaagaatctttggtctggttgttttgatcagtcctcagagtatcatccaacattaaattggggctcttttgcaacaagtggtcgaagggaaactatagaagatacccattttgtgcctccctttatgagcgaagaaaaggaagttttttcctttggcattttttatggccacagagatgctgaattttctgtccgagcagtccctggatttcacaagcaatttggtcatggagcaagagcccaacctacgctctttcagaagcatttgtaaggactgacatagcgtttcgagaagaactaattgttcaccggaagtcaaaaatgataatccaaaaaagactggcatcaaggtgatggtctatggtaagcaacgaggatgtgctgtcattctgtaaataatcaagaggctgcagagcggggcaacaaagacaaatatcactgtcaaatcaaatgtcattgttgtgtttcttcgccccgtctacacgtctgagcgaatatactcagcggggtgcttttgaggggaggatatttttctctgttatatatactcccttgttcccaaaatctaattcgttttagactaaccatacatttattaagtaacacataaatatagttggcatatatgtctattcattgaacgcggacagaaaaaagtaagctagaaagaactataatttagaacagatagaatatctttttaaacaagtggtggaaatccgctctagttcatcattactgtttgtggaacatccaactcgttatccttgtccgacaatacaatacccaactacaaat

SEQ ID NO: 37522 - DNA, 3426 bp, Zea Mays
atgaatcctctgtccggttcatcttccaccatctcgtgtttctccacccaattacgcagtctcgcgcaagttctgctctccggccgagcaggcagccgcctccgccgcgtcctcccggctgcccacgcccgcgccatcatctccgatggacttggcttcctgtttctcgcgaaccttctcctcgacggttactctaagctcggccgcatccacgacgcgcgccgcctgttcgatggaatgccgcaccggaacctcgtgtcctggtcgtcagccatctccatgtacgcgcagcacggcgccgatggccaagcccttgccctgtttgcagccttcaggagatcctctgacgaggcacccaacgaattcgttcttgccagcgtcgtgcgggcctgcatgcagtccagggatgttccttttggcgagcaagtgcatggaaagatcattaatcttggcctggatgtcaatctctatgttggcactgcactcgtcaacctatatgcgaaggttgcctgcatggatgcggccatgcgtgtgttccatgctctcccaacaaagaatccggttacttggacagcaatcatcactggttactctcggattggccatggagaactagccctgggcttgtttcaaacgatggtcgctcaaggcgtccagcctgacaggtttgtgttagcaagtgctgtcagtgcctgctctgcacttgcctttctacagggaggcaggcaaatacatggctacgcttatcgaagtgcagcagaagtggatgcttccgtgatcaacgcgctcatagatttgtattgcaagtgctccagaccgttagtggctcgtaagctatttgatcgaatgaagaatcataatctcgtgtcttggactacaatgattgctggttatatgcagaattcacttgatgctgaagccatacagatgttctggcagatgtgtcaggctggatggcagccagatgcttttgcctgtacaagtatcttgaattcgtgtggttcaatggaagctatttcacaaggaacacagatacatgcccatgccataaaggttaatctggagaatgatgagtatgtcaagaatgctctcattgacatgtacgctaaatgtgcccatttaactgctgcaagagtggcatttgatgccttggcgcatgatgacgtagtctcttacaatgcgatgatcgaaggctatgcaaggcaaggtgatcttacagaagcagttcatatattccgtaaaatgaaatattactccataaggccaaacctactaacctttgtttcactccttgggatgtcatcacttctatcatctattgaatggagtaagcagattcatggtctcatcatcaaatcaggaacttcagtcgacctctatgtgggaagtgctctaatcgatgcatattcaaaatcttcccttgtggatgatgccaaggctgtgttttttatgatgcaaaacagggacatggccatctggaatgctatgatatttggccacacacagaatgagcaaggggaagaggcagtaaaactcttcaaccagacatgtatgcaaaatgtggcttcattaaagaaggatggatgctgtttgagtcaacatgtgggaaggatgttatttgttggaactccatgattactatgtatgcacaacatggtcatgctgaagaagccctttgtgctttccagctgatgagagaggccaaagtagaaccaaactatgtgacttttgttggtgtgctatcagcatgtgctcatgcaggccttgtggatgaaggcttacaccattttaactctatgaaatcaaaatatggtattgacccgggcactgagcattatgcttcagtggtcaatctcctcggtcgttcagggaaattacattctgctcaggagttcattgaaaagatgccaatcaaaccagcggcagctgtttggaggagcttgctgagtgcctgccgtctctttggtaatgttcaaattgggaggtatgccgctgaaatggcactcttggaagatccgtcagacagtggcccttatgtattactatccaatatttatgcctccaaagggctatgggtggatgtgcagcagctaagactgaggatggattatgctggggcggtgaaggagccaggttatagttggattgaggtgatgaaggaggttcatatgttcattgcaagagggacagaacacccacaggcagaattgatatatgcagtattggatgaactgacgggtctactaaaggattttggctatcaccctgatatctctgaacttgcattgcttggtgagactgaaatcaagacttgagtcatcttctatgcatgatgctagacaaataaaaaaatcagcaggtcctcagctcgtgaatgattccagaagcaaggggatggttctgacaaatttcggtcccatgtacctagatgcatggatgcgaacagtgacttgtatagttcctggcatcagtatgaggtggtgtacggtggttttctttcagcactgattatgccctagtgagcttcttactggtatggtgccttatactcatctgagagcagaagcacagtcctcagagtatcatccaacattaaattggggctcttttgcaacaagtggtcgaagggaaactatagaagatacccattttgtgcctccctttatgagcgaagaaaaggaagttttttcctttggcattttttatggccacagaggttcgctagccgaaaaacatagtttggttgatctttgctagcttttacattagcatttcttacaataaaaacttttcacatgttcagcagatgctgaattttctgtccgagcagtccctggatttcacaagcaatttggtcatggagcaagcccaacctacgctctttcagaagcatttgtaaggactgacatagcgtttcgagaagaactaattgttcaccggaagtcaaaaatgataatccaaaaaagactggcatcaaggtgatggtctatggtaagcaacgaggatgtgctgtcattctgtaaataatcaagaggctgcagagcggggcaacaaagacaaatatcactgtcaaatcaaatgtcattgttgtgtttcttcgccccgtctacacgtctgagcgaatatactcagcggggtgcttttgaggggaggatatttttctctgttatatatactcccttgttcccaaaatctaattcgttttagactaaccatacatttattaagtaacacataaatatagttggcatatatgtctattcattgaacgcggacagaaaaaagtaagctagaaagaactataatttagaacagatagaatatctttttaaacaagtggtggaaatccgctctagttcatcattactgtttgtggaacatccaactcgttatccttgtccgacaatacaatacccaactacaaat

SEQ ID NO: 37523 - DNA, 3561 bp, Zea Mays
atgaatcctctgtccggttcatcttccaccatctcgtgtttctccacccaattacgcagtctcgcgcaagttctgctctccggccgagcaggcagccgcctccgccgcgtcctcccggctgcccacgcccgcgccatcatctccgatggacttggcttcctgtttctcgcgaaccttctcctcgacggttactctaagctcggccgcatccacgacgcgcgccgcctgttcgatggaatgccgcaccggaacctcgtgtcctggtcgtcagccatctccatgtacgcgcagcacggcgccgatggccaagcccttgccctgtttgcagccttcaggagatcctctgacgaggcacccaacgaattcgttcttgccagcgtcgtgcgggcctgcatgcagtccagggatgttccttttggcgagcaagtgcatggaaagatcattaatcttggcctggatgtcaatctctatgttggcactgcactcgtcaacctatatgcgaaggttgcctgcatggatgcggccatgcgtgtgttccatgctctcccaacaaagaatccggttacttggacagcaatcatcactggttactctcggattggccatggagaactagccctgggcttgtttcaaacgatggtcgctcaaggcgtccagcctgacaggtttgtgttagcaagtgctgtcagtgcctgctctgcacttgcctttctacagggaggcaggcaaatacatggctacgcttatcgaagtgcagcagaagtggatgcttccgtgatcaacgcgctcatagatttgtattgcaagtgctccagaccgttagtggctcgtaagctatttgatcgaatgaagaatcataatctcgtgtcttggactacaatgattgctggttatatgcagaattcacttgatgctgaagccatacagatgttctggcagatgtgtcaggctggatggcagccagatgcttttgcctgtacaagtatcttgaattcgtgtggttcaatggaagctatttcacaaggaacacagatacatgcccatgccataaaggttaatctggagaatgatgagtatgtcaagaatgctctcattgacatgtacgctaaatgtgcccatttaactgctgcaagagtggcatttgatgccttggcgcatgatgacgtagtctcttacaatgcgatgatcgaaggctatgcaagattcatggtctcatcatcaaatcaggaacttcagtcgacctctatgtgggaagtgctctaatcgatgcatattcaaaatcttcccttgtggatgatgccaaggctgtgttttttatgatgcaaaacagggacatggccatctggaatgctatgatatttggccacacacagaatgagcaaggggaagaggcagtaaaactcttcaaccaggttcgtgtctctgggatgacacccaatgagttcacgtttgtagcactagtaactgtggcgagcaacttggcaagcatgtttcatgggcagcagtttcatgcccagatcatcaaagcaggttgtgacattaatcctcatgtttcaaatgctcttgtagacatgtatgcaaaatgtggcttcattaaagaaggatggatgctgtttgagtcaacatgtgggaaggatgttatttgttggaactccatgattactatgtatgcacaacatggtcatgctgaagaagccctttgtgctttccagctgatgagagaggccaaagtagaaccaaactatgtgacttttgttggtgtgctatcagcatgtgctcatgcaggccttgtggatgaaggcttacaccattttaactctatgaaatcaaaatatggtattgacccgggcactgagcattatgcttcagtggtcaatctcctcggtcgttcagggaaattacattctgctcaggagttcattgaaaagatgccaatcaaaccagcggcagctgtttggaggagcttgctgagtgcctgccgtctctttggtaatgttcaaattgggaggtatgccgctgaaatggcactcttggaagatccgtcagacagtggcccttatgtattactatccaatatttatgcctccaaagggctatgggtggatgtgcagcagctaagactgaggatggattatgctggggcggtgaaggagccaggttatagttggattgaggtgatgaaggaggttcatatgttcattgcaagagggacagaacacccacaggcagaattgatatatgcagtattggatgaactgacgggtctactaaaggattttggctatcaccctgatatctctgaacttgcattgcttggtgagactggttagtgctacttgctcattggtcagctctgggatgatgaggctgtgatatagtattagtggctttagaattttactgttacttacaactgccagttccaaaacaataacctgactggagtcatcttccgatgctgaaccagaaatcaagacttgagtcatcttctatgcatgatgctagacaaataaaaaaatcagcaggtcctcagctcgtgaatgattccagaagcaaggggatggttctgacaaatttcggtcccatgtacctagatgcatggatgcgaacagtgacttgtatagttcctggcatcagtatgaggtggtgtacggtggttttctttcagcactgattatgccctaggtagtctaacatacctgggtacttcaaacagcaaatccattttagccatcagttatgatgtgatgggcaagacgttttgctagattattcaactaagttgcatctttgtacatctgacaatttattcagtactgaagtattctgctagcatcattagtcatgacgttctgagacttcgtctctgtttcaataacttacagtgagcttcttactggtatggtgccttatactcatctgagagcagaagcacagcagatgctgaattttctgtccgagcagtccctggatttcacaagcaatttggtcatggagcaaggcccaacctacgctctttcagaagcatttgtaaggactgacatagcgtttcgagaagaactaattgttcaccggaagtcaaaaatgataatccaaaaaagactggcatcaaggtgatggtctatggtaagcaacgaggatgtgctgtcattctgtaaataatcaagaggctgcagagcggggcaacaaagacaaatatcactgtcaaatcaaatgtcattgttgtgtttcttcgccccgtctacacgtctgagcgaatatactcagcggggtgcttttgaggggaggatatttttctctgttatatatactcccttgttcccaaaatctaattcgttttagactaaccatacatttattaagtaacacataaatatagttggcatatatgtctattcattgaacgcggacagaaaaaagtaagctagaaagaactataatttagaacagatagaatatctttttaaacaagtggtggaaatccgctctagttcatcattactgtttgtggaacatccaactcgttatccttgtccgacaatacaatacccaactacaaat

SEQ ID NO: 37524 - DNA, 4204 bp, Zea Mays
atgaatcctctgtccggttcatcttccaccatctcgtgtttctccacccaattacgcagtctcgcgcaagttctgctctccggccgagcaggcagccgcctccgccgcgtcctcccggctgcccacgcccgcgccatcatctccgatggacttggcttcctgtttctcgcgaaccttctcctcgacggttactctaagctcggccgcatccacgacgcgcgccgcctgttcgatggaatgccgcaccggaacctcgtgtcctggtcgtcagccatctccatgtacgcgcagcacggcgccgatggccaagcccttgccctgtttgcagccttcaggagatcctctgacgaggcacccaacgaattcgttcttgccagcgtcgtgcgggcctgcatgcagtccagggatgttccttttggcgagcaagtgcatggaaagatcattaatcttggcctggatgtcaatctctatgttggcactgcactcgtcaacctatatgcgaaggttgcctgcatggatgcggccatgcgtgtgttccatgctctcccaacaaagaatccggttacttggacagcaatcatcactggttactctcggattggccatggagaactagccctgggcttgtttcaaacgatggtcgctcaaggcgtccagcctgacaggtttgtgttagcaagtgctgtcagtgcctgctctgcacttgcctttctacagggaggcaggcaaatacatggctacgcttatcgaagtgcagcagaagtggatgcttccgtgatcaacgcgctcatagatttgtattgcaagtgctccagaccgttagtggctcgtaagctatttgatcgaatgaagaatcataatctcgtgtcttggactacaatgattgctggttatatgcagaattcacttgatgctgaagccatacagatgttctggcagatgtgtcaggctggatggcagccagatgcttttgcctgtacaagtatcttgaattcgtgtggttcaatggaagctatttcacaaggaacacagatacatgcccatgccataaaggttaatctggagaatgatgagtatgtcaagaatgctctcattgacatgtacgctaaatgtgcccatttaactgctgcaagagtggcatttgatgccttggcgcatgatgacgtagtctcttacaatgcgatgatcgaaggctatgcaaggcaaggtgatcttacagaagcagttcatatattccgtaaaatgaaatattactccataaggccaaacctactaacctttgtttcactccttgggatgtcatcacttctatcatctattgaatggagtaagcagattcatggtctcatcatcaaatcaggaacttcagtcgacctctatgtgggaagtgctctaatcgatgcatattcaaaatcttcccttgtggatgatgccaaggctgtgttttttatgatgcaaaacagggacatggccatctggaatgctatgatatttggccacacacagaatgagcaaggggaagaggcagtaaaactcttcaaccaggttcgtgtctctgggatgacacccaatgagttcacgtttgtagcactagtaactgtggcgagcaacttggcaagcatgtttcatgggcagcagtttcatgcccagatcatcaaagcaggttgtgacattaatcctcatgtttcaaatgctcttgtagacatgtatgcaaaatgtggcttcattaaagaaggatggatgctgtttgagtcaacatgtgggaaggatgttatttgttggaactccatgattactatgtatgcacaacatggtcatgctgaagaagccctttgtgctttccagctgatgagagaggccaaagtagaaccaaactatgtgacttttgttggtgtgctatcagcatgtgctcatgcaggccttgtggatgaaggcttacaccattttaactctatgaaatcaaaatatggtattgacccgggcactgagcattatgcttcagtggtcaatctcctcggtcgttcagggaaattacattctgctcaggagttcattgaaaagatgccaatcaaaccagcggcagctgtttggaggagcttgctgagtgcctgccgtctctttggtaatgttcaaattgggaggtatgccgctgaaatggcactcttggaagatccgtcagacagtggcccttatgtattactatccaatatttatgcctccaaagggctatgggtggatgtgcagcagctaagactgaggatggattatgctggggcggtgaaggagccaggttatagttggattgaggtgatgaaggaggttcatatgttcattgcaagagggacagaacacccacaggcagaattgatatatgcagtattggatgaactgacgggtctactaaaggattttggctatcaccctgatatctctgaacttgcattgcttggtgagactggttagtgctacttgctcattggtcagctctgggatgatgaggctgtgatatagtattagtggctttagaattttactgttacttacaactgccagttccaaaacaataacctgactggagtcatcttccgatgctgaaccagaaatcaagacttgagtcatcttctatgcatgatgctagacaaataaaaaaatcagcaggtcctcagctcgtgaatgattccagaagcaaggggatggttctgacaaatttcggtcccatgtacctagatgcatggatgcgaacagtgacttgtatagttcctggcatcagtatgaggtggtgtacggtggttttctttcagcactgattatgccctaggtagtctaacatacctgggtacttcaaacagcaaatccattttagccatcagttatgatgtgatgggcaagacgttttgctagattattcaactaagttgcatctttgtacatctgacaatttattcagtactgaagtattctgctagcatcattagtcatgacgttctgagacttcgtctctgtttcaataacttacagtgagcttcttactggtatggtgccttatactcatctgagagcagaagcacagatatggcaagaccgcaagagccatactccgtcataacaggtcctccgcccctgagcattgcgtccatcacttgcccttcctcaatctggtgccccaccaactcttttgtcacttatccagcgttgctgggatccttatcctgaaaagagaccatcatttgaagacataattggtgagctaaatatagctcaaaagcctttagtttcaaatgcttccgttccatcatttcctgtgagcaagagtcaaaatggcaccaaagaagtgcaccgttatcaagaagcatcgaactgtttcaaccaaggggagctttttgttaagagatcatgtagatcagatcttaagaatctttggtctggttgttttgatcagtcctcagagtatcatccaacattaaattggggctcttttgcaacaagtggtcgaagggaaactatagaagatacccattttgtgcctccctttatgagcgaagaaaaggaagttttttcctttggcattttttatggccacagagatgctgaattttctgtccgagcagtccctggatttcacaagcaatttggtcatggagcaagcccaacctacgctctttcagaagcatttgtaaggactgacatagcgtttcgagaagaactaattgttcaccggaagtcaaaaatgataatccaaaaaagactggcatcaaggtgatggtctatggtaagcaacgaggatgtgctgtcattctgtaaataatcaagaggctgcagagcggggcaacaaagacaaatatcactgtcaaatcaaatgtcattgttgtgtttcttcgccccgtctacacgtctgagcgaatatactcagcggggtgcttttgaggggaggatatttttctctgttatatatactcccttgttcccaaaatctaattcgttttagactaaccatacatttattaagtaacacataaatatagttggcatatatgtctattcattgaacgcggacagaaaaaagtaagctagaaagaactataatttagaacagatagaatatctttttaaacaagtggtggaaatccgctctagttcatcattactgtttgtggaacatccaactcgttatccttgtccgacaatacaatacccaactacaaat

SEQ ID NO: 37525 - DNA, 4911 bp, Zea Mays
atgaatcctctgtccggttcatcttccaccatctcgtgtttctccacccaattacgcagtctcgcgcaagttctgctctccggccgagcaggcagccgcctccgccgcgtcctcccggctgcccacgcccgcgccatcatctccgatggacttggcttcctgtttctcgcgaaccttctcctcgacggttactctaagctcggccgcatccacgacgcgcgccgcctgttcgatggaatgccgcaccggaacctcgtgtcctggtcgtcagccatctccatgtacgcgcagcacggcgccgatggccaagcccttgccctgtttgcagccttcaggagatcctctgacgaggcacccaacgaattcgttcttgccagcgtcgtgcgggcctgcatgcagtccagggatgttccttttggcgagcaagtgcatggaaagatcattaatcttggcctggatgtcaatctctatgttggcactgcactcgtcaacctatatgcgaaggttgcctgcatggatgcggccatgcgtgtgttccatgctctcccaacaaagaatccggttacttggacagcaatcatcactggttactctcggattggccatggagaactagccctgggcttgtttcaaacgatggtcgctcaaggcgtccagcctgacaggtttgtgttagcaagtgctgtcagtgcctgctctgcacttgcctttctacagggaggcaggcaaatacatggctacgcttatcgaagtgcagcagaagtggatgcttccgtgatcaacgcgctcatagatttgtattgcaagtgctccagaccgttagtggctcgtaagctatttgatcgaatgaagaatcataatctcgtgtcttggactacaatgattgctggttatatgcagaattcacttgatgctgaagccatacagatgttctggcagatgtgtcaggctggatggcagccagatgcttttgcctgtacaagtatcttgaattcgtgtggttcaatggaagctatttcacaaggaacacagatacatgcccatgccataaaggttaatctggagaatgatgagtatgtcaagaatgctctcattgacatgtacgctaaatgtgcccatttaactgctgcaagagtggcatttgatgccttggcgcatgatgacgtagtctcttacaatgcgatgatcgaaggctatgcaaggcaaggtgatcttacagaagcagttcatatattccgtaaaatgaaatattactccataaggccaaacctactaacctttgtttcactccttgggatgtcatcacttctatcatctattgaatggagtaagcagattcatggtctcatcatcaaatcaggaacttcagtcgacctctatgtgggaagtgctctaatcgatgcatattcaaaatcttcccttgtggatgatgccaaggctgtgttttttatgatgcaaaacagggacatggccatctggaatgctatgatatttggccacacacagaatgagcaaggggaagaggcagtaaaactcttcaaccaggttcgtgtctctgggatgacacccaatgagttcacgtttgtagcactagtaactgtggcgagcaacttggcaagcatgtttcatgggcagcagtttcatgcccagatcatcaaagcaggttgtgacattaatcctcatgtttcaaatgctcttgtagacatgtatgcaaaatgtggcttcattaaagaaggatggatgctgtttgagtcaacatgtgggaaggatgttatttgttggaactccatgattactatgtatgcacaacatggtcatgctgaagaagccctttgtgctttccagctgatgagagaggccaaagtagaaccaaactatgtgacttttgttggtgtgctatcagcatgtgctcatgcaggccttgtggatgaaggcttacaccattttaactctatgaaatcaaaatatggtattgacccgggcactgagcattatgcttcagtggtcaatctcctcggtcgttcagggaaattacattctgctcaggagttcattgaaaagatgccaatcaaaccagcggcagctgtttggaggagcttgctgagtgcctgccgtctctttggtaatgttcaaattgggaggtatgccgctgaaatggcactcttggaagatccgtcagacagtggcccttatgtattactatccaatatttatgcctccaaagggctatgggtggatgtgcagcagctaagactgaggatggattatgctggggcggtgaaggagccaggttatagttggattgaggtgatgaaggaggttcatatgttcattgcaagagggacagaacacccacaggcagaattgatatatgcagtattggatgaactgacgggtctactaaaggattttggctatcaccctgatatctctgaacttgcattgcttggtgagactggttagtgctacttgctcattggtcagctctgggatgatgaggctgtgatatagtattagtggctttagaattttactgttacttacaactgccagttccaaaacaataacctgactggagtcatcttccgatgctgaaccagaaatcaagacttgagtcatcttctatgcatgatgctagacaaataaaaaaatcagcaggtcctcagctcgtgaatgattccagaagcaaggggatggttctgacaaatttcggtcccatgtacctagatgcatggatgcgaacagtgacttgtatagttcctggcatcagtatgaggtggtgtacggtggttttctttcagcactgattatgccctaggtagtctaacatacctgggtacttcaaacagcaaatccattttagccatcagttatgatgtgatgggcaagacgttttgctagattattcaactaagttgcatctttgtacatctgacaatttattcagtactgaagtattctgctagcatcattagtcatgacgttctgagacttcgtctctgtttcaataacttacagtgagcttcttactggtatggtgccttatactcatctgagagcagaagcacaggtatttaattgttcttttatgttctttgttggttggttaaagtgttctattttttaatgcaattttgatgtaaaagttcatctaattgattacgagcggcaatcattctataatatagttattccatgatgcctagcagaaaaggttaccataatttctttgccattcggctgcagttagaaatttaattattgtggctattacaaccagtcttattccagtatgttgaaatttgatttactatggaacttttttaatatttagattcaggtgtattttacttgggtttatgcatttattagttctatacatatgttcatattcaccgtatttaacatgacaaatccattttttctctagaagtgaccatttgccatatttttttaggcacacactgttcttgaaatgacttatactgaacaacaacttacagcagcatttgtttctcaagcatcgccactggcggagtacgaactgaaaaataggcatgacggagcttactatatgcacaaaaaaaaagataaccacccataaacttgcagaaacaaggaagaaaaaaatccataaacttgcaaaaacagtgaaaaacatttaaaaacgtgcacacagtaggctttgaacctgcaacgtacacccctgtactaggaatgatttgctcctttagttgggagctacactgtactaataagtttgctcagatccagatatggcaagaccgcaagagccatactccgtcataacaggtcctccgcccctgagcattgcgtccatcacttgcccttcctcaatctggtgccccaccaactcttttgtcacttatccagcgttgctgggatccttatcctgaaaagagaccatcatttgaagacataattggtgagctaaatatagctcaaaagcctttagtttcaaatgcttccgttccatcatttcctgtgagcaagagtcaaaatggcaccaaagaagtgcaccgttatcaagaagcatcgaactgtttcaaccaaggggagctttttgttaagagatcatgtagatcagatcttaagaatctttggtctggttgttttgatcagtcctcagagtatcatccaacattaaattggggctcttttgcaacaagtggtcgaagggaaactatagaagatacccattttgtgcctccctttatgagcgaagaaaaggaagttttttcctttggcattttttatggccacagagcagatgctgaattttctgtccgagcagtccctggatttcacaagcaatttggtcatggagcaagcccaacctacgctctttcagaagcatttgtaaggactgacatagcgtttcgagaagaactaattgttcaccggaagtcaaaaatgataatccaaaaaagactggcatcaaggtgatggtctatggtaagcaacgaggatgtgctgtcattctgtaaataatcaagaggctgcagagcggggcaacaaagacaaatatcactgtcaaatcaaatgtcattgttgtgtttcttcgccccgtctacacgtctgagcgaatatactcagcggggtgcttttgaggggaggatatttttctctgttatatatactcccttgttcccaaaatctaattcgttttagactaaccatacatttattaagtaacacataaatatagttggcatatatgtctattcattgaacgcggacagaaaaaagtaagctagaaagaactataatttagaacagatagaatatctttttaaacaagtggtggaaatccgctctagttcatcattactgtttgtggaacatccaactcgttatccttgtccgacaatacaatacccaactacaaat

SEQ ID NO: 37526 - DNA, 4031 bp, Zea Mays
atgaatcctctgtccggttcatcttccaccatctcgtgtttctccacccaattacgcagtctcgcgcaagttctgctctccggccgagcaggcagccgcctccgccgcgtcctcccggctgcccacgcccgcgccatcatctccgatggacttggcttcctgtttctcgcgaaccttctcctcgacggttactctaagctcggccgcatccacgacgcgcgccgcctgttcgatggaatgccgcaccggaacctcgtgtcctggtcgtcagccatctccatgtacgcgcagcacggcgccgatggccaagcccttgccctgtttgcagccttcaggagatcctctgacgaggcacccaacgaattcgttcttgccagcgtcgtgcgggcctgcatgcagtccagggatgttccttttggcgagcaagtgcatggaaagatcattaatcttggcctggatgtcaatctctatgttggcactgcactcgtcaacctatatgcgaaggttgcctgcatggatgcggccatgcgtgtgttccatgctctcccaacaaagaatccggttacttggacagcaatcatcactggttactctcggattggccatggagaactagccctgggcttgtttcaaacgatggtcgctcaaggcgtccagcctgacaggtttgtgttagcaagtgctgtcagtgcctgctctgcacttgcctttctacagggaggcaggcaaatacatggctacgcttatcgaagtgcagcagaagtggatgcttccgtgatcaacgcgctcatagatttgtattgcaagtgctccagaccgttagtggctcgtaagctatttgatcgaatgaagaatcataatctcgtgtcttggactacaatgattgctggttatatgcagaattcacttgatgctgaagccatacagatgttctggcagatgtgtcaggctggatggcagccagatgcttttgcctgtacaagtatcttgaattcgtgtggttcaatggaagctatttcacaaggaacacagatacatgcccatgccataaaggttaatctggagaatgatgagtatgtcaagaatgctctcattgacatgtacgctaaatgtgcccatttaactgctgcaagagtggcatttgatgccttggcgcatgatgacgtagtctcttacaatgcgatgatcgaaggctatgcaagattcatggtctcatcatcaaatcaggaacttcagtcgacctctatgtgggaagtgctctaatcgatgcatattcaaaatcttcccttgtggatgatgccaaggctgtgttttttatgatgcaaaacagggacatggccatctggaatgctatgatatttggccacacacagaatgagcaaggggaagaggcagtaaaactcttcaaccagacatgtatgcaaaatgtggcttcattaaagaaggatggatgctgtttgagtcaacatgtgggaaggatgttatttgttggaactccatgattactatgtatgcacaacatggtcatgctgaagaagccctttgtgctttccagctgatgagagaggccaaagtagaaccaaactatgtgacttttgttggtgtgctatcagcatgtgctcatgcaggccttgtggatgaaggcttacaccattttaactctatgaaatcaaaatatggtattgacccgggcactgagcattatgcttcagtggtcaatctcctcggtcgttcagggaaattacattctgctcaggagttcattgaaaagatgccaatcaaaccagcggcagctgtttggaggagcttgctgagtgcctgccgtctctttggtaatgttcaaattgggaggtatgccgctgaaatggcactcttggaagatccgtcagacagtggcccttatgtattactatccaatatttatgcctccaaagggctatgggtggatgtgcagcagctaagactgaggatggattatgctggggcggtgaaggagccaggttatagttggattgaggtgatgaaggaggttcatatgttcattgcaagagggacagaacacccacaggcagaattgatatatgcagtattggatgaactgacgggtctactaaaggattttggctatcaccctgatatctctgaacttgcattgcttggtgagactggttagtgctacttgctcattggtcagctctgggatgatgaggctgtgatatagtattagtggctttagaattttactgttacttacaactgccagttccaaaacaataacctgactggagtcatcttccgatgctgaaccagaaatcaagacttgagtcatcttctatgcatgatgctagacaaataaaaaaatcagcaggtcctcagctcgtgaatgattccagaagcaaggggatggttctgacaaatttcggtcccatgtacctagatgcatggatgcgaacagtgacttgtatagttcctggcatcagtatgaggtggtgtacggtggttttctttcagcactgattatgccctagtgagcttcttactggtatggtgccttatactcatctgagagcagaagcacaggcacacactgttcttgaaatgacttatactgaacaacaacttacagcagcatttgtttctcaagcatcgccactggcggagtacgaactgaaaaataggcatgacggagcttactatatgcacaaaaaaaaagataaccacccataaacttgcagaaacaaggaagaaaaaaatccataaacttgcaaaaacagtgaaaaacatttaaaaacgtgcacacagtaggctttgaacctgcaacgtacacccctgtactaggaatgatttgctcctttagttgggagctacactgtactaataagtttgctcagatccagatatggcaagaccgcaagagccatactccgtcataacaggtcctccgcccctgagcattgcgtccatcacttgcccttcctcaatctggtgccccaccaactcttttgtcacttatccagcgttgctgggatccttatcctgaaaagagaccatcatttgaagacataattggtgagctaaatatagctcaaaagcctttagtttcaaatgcttccgttccatcatttcctgtgagcaagagtcaaaatggcaccaaagaagtgcaccgttatcaagaagcatcgaactgtttcaaccaaggggagctttttgttaagagatcatgtagatcagatcttaagaatctttggtctggttgttttgatcagtcctcagagtatcatccaacattaaattggggctcttttgcaacaagtggtcgaagggaaactatagaagatacccattttgtgcctccctttatgagcgaagaaaaggaagttttttcctttggcattttttatggccacagagatgctgaattttctgtccgagcagtccctggatttcacaagcaatttggtcatggagcaagcccaacctacgctctttcagaagcatttgtaaggactgacatagcgtttcgagaagaactaattgttcaccggaagtcaaaaatgataatccaaaaaagactggcatcaaggtgatggtctatggtaagcaacgaggatgtgctgtcattctgtaaataatcaagaggctgcagagcggggcaacaaagacaaatatcactgtcaaatcaaatgtcattgttgtgtttcttcgccccgtctacacgtctgagcgaatatactcagcggggtgcttttgaggggaggatatttttctctgttatatatactcccttgttcccaaaatctaattcgttttagactaaccatacatttattaagtaacacataaatatagttggcatatatgtctattcattgaacgcggacagaaaaaagtaagctagaaagaactataatttagaacagatagaatatctttttaaacaagtggtggaaatccgctctagttcatcattactgtttgtggaacatccaactcgttatccttgtccgacaatacaatacccaactacaaat

SEQ ID NO: 37527 - DNA, 1273 bp, Zea Mays
cgcttgttggcctccgtcagcccgcgcctccttcctccgtcctccggctcggcggtccgccgccctccttcatcctccggctggaggccctcctccacccccgcctcgcggccctacactctcgttgggtcggcacccgtgcctcccattctctcctcttctctcgctcgagcgccgcggcctctgctcgctcggtcgaggctgaaggacgggacaaagcgcagattgaccaccgggcgtcggaaccgccgccgctgccgccgaaggggttataagatcagatggggacttcggtgcagaagttggaaaagaagatgagaagcttattttgcttcccccatcgtcaacaccaccaccccataagcctgttcttgtgggtgatctaaagttgtctgattttaaacaatttttggaaaacaaaggctggcaggatttttcagttgaacgtgagaggatcaaatatgttgagattcagtcgctaaggaaagagctgttgcaggttgaatttgccggaggtgctttacggtgtggcgaatacatcatggtgcgcaaagttggtgattctatcctaaagggcagcacagggtcccagcagatcgtcatcgagggccccctctgcgaggactattacaagatcagggagcttctgtactcgcagttctacttgctgtgaggcaacgtacggcaaagcttaggctttatttacattggttataaattattagattagatgttgactgtaagactatcctggtgttttctgtttttacattgtttgtttcccctttcacaagcttaggcttgtgttgtccgaaatttggcgtgggatgaccgtgacaaagttttggcatcagtttccggatgaccgtggttagtatgctgaagcttgtttcgtccttcatcattatgggcatgtgttctatattgatcgtattgactctttttgaattggttgagcatattttaaatcttcttccccttgataccttctttcatcaacatcaaagctgactaccaagtggtccaagaacgatgacaatgcatccatccaaagaagaacaaaaacaacgacgacaaagcgtccacctattttccacctaggggtgcaatcaatcagatcggagatgggtaatgcttgtatcatattttctctttagatttagattagatatattttctttttagatttagatcagatacgaatattattggtctatgaccgtaagatttgaatggatatcaatatatcttaaatacctatactctatgcggc

SEQ ID NO: 37528 - DNA, 2856 bp, Zea Mays
cgcttgttggcctccgtcagcccgcgcctccttcctccgtcctccggctcggcggtccgccgccctccttcatcctccggctggaggccctcctccacccccgcctcgcggccctacactctcgttgggtcggcacccgtgcctcccattctctcctcttctctcgctcgagcgccgcggcctctgctcgctcggtcgaggctgaaggacgggacaaagcgcagattgaccaccgggcgtcggaaccgccgccgctgccgccgaaggggttataagatcagatggggacttcggtgcaggtgacgcctctcagcggggcgtacggggagggccccctgtgctacctactcgccgtcgatggtttccgcttcctcctcgactgcggatggaccgacctctgcgatacctcgcaacttcaacccctcgcaaaggttgcaccaactgtagatgctgttcttttgtcacatcctgacatgatgcatctaggagctttgccttacgctatgaaacaccttgggctgtctgcaccagtttatgcaacagaacccgtgtttaggcttggccttttgaccatgtatgaccatttcctgtctcgatggcaagtttcagactttgacttgtttactctagatgatgttgatgctgcattccaaaatgttgtgagactgaagtactcacaaaattaccttctgaatgataaaggtgaaggagttgttattgctccacatgtggctgggcatcttttgggggggacagtttggaagattacaaaagatggggaggatgttgtgtatgctgttgacttcaaccatcggaaagagaggcatttgaatggcaccgttcttggatctttcgtgcggccagctgttctgataactgatgcttacaatgctttgaacaaccaaggctatagaaaaaagcaggatcaagatttcattgaatcattaattaaagttctggcaactggtggaagtgtgctacttcctgttgacacggctggtagagtgttggaacttcttttgttattggatatgtactgggatgaaaggcgattgcagtaccctatctacttcctgacaaatgtgtcgacaagtaccgttgattatgtcaagagttttcttgaatggatgggtgatcaaattgcaaaatcttttgaaagcagtagagccaatgccttcttgttaaaaaaggtcacgctgataattaacaaagaagagcttgagaaattgggagatgctccaaaggtggttctggcatccatggcaagtttggaggttggcttttctcatgacatatttgtggagatggcaaatgaagcaagaaatctagtgctctttactgagaagggacagaaaatatttgctctccagtttgggacactggctcgaatgctccaagtggacccaccccctaaagctttaaaggtcactatgagcaagaggattcctttggtgggtaatgaactaaaggcttatgaagaagagcaagaacggataaaaaaagagaaatcgctaaaggctagccttgtcaaagaagaggagctaaaggcttctcatggatcaaacacaaaggcttctgagccaatggtcattgatgcaagctcatctcgaaaatctgtgaatgcttcacattttggtgggaacaatgatattctcatagatggatttgtccctcctttaaccagtgttgctccaatgtttcccttctttgaaaacactgctgaatgggacgactttggtgaggtcatcaaccctgatgattatatgatgaaacaagaagaaatggataatactctgatgcttggccctggagatggattagatggtaggatcgatgatggctcagcacgcctgcttcttgattcaacgccctcaaaagtcatttccaacgagatgactgttcaagtgaaatgctcattggtttatatggactttgaaggtcgctctgatgggcgttctgtaaaatcaattattgctcacgtggctccactgaaacttatcctggtgcatggatcagctgaagcaactgaacatttgaaaatgcactgcgcaaagaatttagatttgcatgtttatgctccacagattgaggaaactattgatgtaacatcagacttatgtgcttataaggtacaactttcggagaagttaatgagtaacatcatttctaagaagttgggtgagcatgaaattgcttgggtggatgcagaagttggaaaagaagatgagaagcttattttgcttcccccatcgtcaacaccaccaccccataagcctgttcttgtgggtgatctaaagttgtctgattttaaacaatttttggaaaacaaaggctggcaggttgaatttgccggaggtgctttacggtgtggcgaatacatcatggtgcgcaaagttggtgattctatcctaaagggcagcacagggtcccagcagatcgtcatcgagggccccctctgcgaggactattacaagatcagggagcttctgtactcgcagttctacttgctgtgaggcaacgcttgtgttgtccgaaatttggcgtgggatgaccgtgacaaagttttggcatcagtttccggatgaccgtgctgactaccaagtggtccaagaacgatgacaatgcatccatccaaagaagaacaaaaacaacgacgacaaagcgtccacctattttccacctaggggtgcaatcaatcagatcggagatgggtaatgcttgtatcatattttctctttagatttagattagatatattttctttttagatttagatcagatacgaatattattggtctatgaccgtaagatttgaatggatatcaatatatcttaaatacctatactctatgcggc

SEQ ID NO: 37529 - DNA, 2850 bp, Zea Mays
cgcttgttggcctccgtcagcccgcgcctccttcctccgtcctccggctcggcggtccgccgccctccttcatcctccggctggaggccctcctccacccccgcctcgcggccctacactctcgttgggtcggcacccgtgcctcccattctctcctcttctctcgctcgagcgccgcggcctctgctcgctcggtcgaggctgaaggacgggacaaagcgcagattgaccaccgggcgtcggaaccgccgccgctgccgccgaaggggttataagatcagatggggacttcggtgcaggtgacgcctctcagcggggcgtacggggagggccccctgtgctacctactcgccgtcgatggtttccgcttcctcctcgactgcggatggaccgacctctgcgatacctcgcaacttcaacccctcgcaaaggttgcaccaactgtagatgctgttcttttgtcacatcctgacatgatgcatctaggagctttgccttacgctatgaaacaccttgggctgtctgcaccagtttatgcaacagaacccgtgtttaggcttggccttttgaccatgtatgaccatttcctgtctcgatggcaagtttcagactttgacttgtttactctagatgatgttgatgctgcattccaaaatgttgtgagactgaagtactcacaaaattaccttctgaatggtgaaggagttgttattgctccacatgtggctgggcatcttttgggggggacagtttggaagattacaaaagatggggaggatgttgtgtatgctgttgacttcaaccatcggaaagagaggcatttgaatggcaccgttcttggatctttcgtgcggccagctgttctgataactgatgcttacaatgctttgaacaaccaaggctatagaaaaaagcaggatcaagatttcattgaatcattaattaaagttctggcaactggtggaagtgtgctacttcctgttgacacggctggtagagtgttggaacttcttttgttattggatatgtactgggatgaaaggcgattgcagtaccctatctacttcctgacaaatgtgtcgacaagtaccgttgattatgtcaagagttttcttgaatggatgggtgatcaaattgcaaaatcttttgaaagcagtagagccaatgccttcttgttaaaaaaggtcacgctgataattaacaaagaagagcttgagaaattgggagatgctccaaaggtggttctggcatccatggcaagtttggaggttggcttttctcatgacatatttgtggagatggcaaatgaagcaagaaatctagtgctctttactgagaagggacagaaaatatttgctctccagtttgggacactggctcgaatgctccaagtggacccaccccctaaagctttaaaggtcactatgagcaagaggattcctttggtgggtaatgaactaaaggcttatgaagaagagcaagaacggataaaaaaagagaaatcgctaaaggctagccttgtcaaagaagaggagctaaaggcttctcatggatcaaacacaaaggcttctgagccaatggtcattgatgcaagctcatctcgaaaatctgtgaatgcttcacattttggtgggaacaatgatattctcatagatggatttgtccctcctttaaccagtgttgctccaatgtttcccttctttgaaaacactgctgaatgggacgactttggtgaggtcatcaaccctgatgattatatgatgaaacaagaagaaatggataatactctgatgcttggccctggagatggattagatggtaggatcgatgatggctcagcacgcctgcttcttgattcaacgccctcaaaagtcatttccaacgagatgactgttcaagtgaaatgctcattggtttatatggactttgaaggtcgctctgatgggcgttctgtaaaatcaattattgctcacgtggctccactgaaacttatcctggtgcatggatcagctgaagcaactgaacatttgaaaatgcactgcgcaaagaatttagatttgcatgtttatgctccacagattgaggaaactattgatgtaacatcagacttatgtgcttataaggtacaactttcggagaagttaatgagtaacatcatttctaagaagttgggtgagcatgaaattgcttgggtggatgcagaagttggaaaagaagatgagaagcttattttgcttcccccatcgtcaacaccaccaccccataagcctgttcttgtgggtgatctaaagttgtctgattttaaacaatttttggaaaacaaaggctggcaggttgaatttgccggaggtgctttacggtgtggcgaatacatcatggtgcgcaaagttggtgattctatcctaaagggcagcacagggtcccagcagatcgtcatcgagggccccctctgcgaggactattacaagatcagggagcttctgtactcgcagttctacttgctgtgaggcaacgcttgtgttgtccgaaatttggcgtgggatgaccgtgacaaagttttggcatcagtttccggatgaccgtgctgactaccaagtggtccaagaacgatgacaatgcatccatccaaagaagaacaaaaacaacgacgacaaagcgtccacctattttccacctaggggtgcaatcaatcagatcggagatgggtaatgcttgtatcatattttctctttagatttagattagatatattttctttttagatttagatcagatacgaatattattggtctatgaccgtaagatttgaatggatatcaatatatcttaaatacctatactctatgcggc

SEQ ID NO: 37530 - DNA, 2896 bp, Zea Mays
cgcttgttggcctccgtcagcccgcgcctccttcctccgtcctccggctcggcggtccgccgccctccttcatcctccggctggaggccctcctccacccccgcctcgcggccctacactctcgttgggtcggcacccgtgcctcccattctctcctcttctctcgctcgagcgccgcggcctctgctcgctcggtcgaggctgaaggacgggacaaagcgcagattgaccaccgggcgtcggaaccgccgccgctgccgccgaaggggttataagatcagatggggacttcggtgcaggtgacgcctctcagcggggcgtacggggagggccccctgtgctacctactcgccgtcgatggtttccgcttcctcctcgactgcggatggaccgacctctgcgatacctcgcaacttcaacccctcgcaaaggttgcaccaactgtagatgctgttcttttgtcacatcctgacatgatgcatctaggagctttgccttacgctatgaaacaccttgggctgtctgcaccagtttatgcaacagaacccgtgtttaggcttggccttttgaccatgtatgaccatttcctgtctcgatggcaagtttcagactttgacttgtttactctagatgatgttgatgctgcattccaaaatgttgtgagactgaagtactcacaaaattaccttctgaatgataaaggtgaaggagttgttattgctccacatgtggctgggcatcttttgggggggacagtttggaagattacaaaagatggggaggatgttgtgtatgctgttgacttcaaccatcggaaagagaggcatttgaatggcaccgttcttggatctttcgtgcggccagctgttctgataactgatgcttacaatgctttgaacaaccaaggctatagaaaaaagcaggatcaagatttcattgaatcattaattaaagttctggcaactggtggaagtgtgctacttcctgttgacacggctggtagagtgttggaacttcttttgttattggatatgtactgggatgaaaggcgattgcagtaccctatctacttcctgacaaatgtgtcgacaagtaccgttgattatgtcaagagttttcttgaatggatgggtgatcaaattgcaaaatcttttgaaagcagtagagccaatgccttcttgttaaaaaaggtcacgctgataattaacaaagaagagcttgagaaattgggagatgctccaaaggtggttctggcatccatggcaagtttggaggttggcttttctcatgacatatttgtggagatggcaaatgaagcaagaaatctagtgctctttactgagaagggacagtttgggacactggctcgaatgctccaagtggacccaccccctaaagctttaaaggtcactatgagcaagaggattcctttggtgggtaatgaactaaaggcttatgaagaagagcaagaacggataaaaaaagagaaatcgctaaaggctagccttgtcaaagaagaggagctaaaggcttctcatggatcaaacacaaaggcttctgagccaatggtcattgatgcaagctcatctcgaaaatctgtgaatgcttcacattttggtgggaacaatgatattctcatagatggatttgtccctcctttaaccagtgttgctccaatgtttcccttctttgaaaacactgctgaatgggacgactttggtgaggtcatcaaccctgatgattatatgatgaaacaagaagaaatggataatactctgatgcttggccctggagatggattagatggtaggatcgatgatggctcagcacgcctgcttcttgattcaacgccctcaaaagtcatttccaacgagatgactgttcaagtgaaatgctcattggtttatatggactttgaaggtcgctctgatgggcgttctgtaaaatcaattattgctcacgtggctccactgaaacttatcctggtgcatggatcagctgaagcaactgaacatttgaaaatgcactgcgcaaagaatttagatttgcatgtttatgctccacagattgaggaaactattgatgtaacatcagacttatgtgcttataaggtacaactttcggagaagttaatgagtaacatcatttctaagaagttgggtgagcatgaaattgcttgggtggatgcagaagttggaaaagaagatgagaagcttattttgcttcccccatcgtcaacaccaccaccccataagcctgttcttgtgggtgatctaaagttgtctgattttaaacaatttttggaaaacaaagcttaggctttatttacattggttataaattattagattagatgttgactgtaagactatcctggtgttttctgtttttacattgtttgtttcccctttcacaagcttaggcttgtgttgtccgaaatttggcgtgggatgaccgtgacaaagttttggcatcagtttccggatgaccgtggttagtatgctgaagcttgtttcgtccttcatcattatgggcatgtgttctatattgatcgtattgactctttttgaattggttgagcatattttaaatcttcttccccttgataccttctttcatcaacatcaaagctgactaccaagtggtccaagaacgatgacaatgcatccatccaaagaagaacaaaaacaacgacgacaaagcgtccacctattttccacctaggggtgcaatcaatcagatcggagatgggtaatgcttgtatcatattttctctttagatttagattagatatattttctttttagatttagatcagatacgaatattattggtctatgaccgtaagatttgaatggatatcaatatatcttaaatacctatactctatgcggc

SEQ ID NO: 37531 - DNA, 926 bp, Zea Mays
ccttactgctcgctagggaggagttacttttggcgggtttggccaggctagaggacgataatgaggatgcttttgaagatgaaacaggtcctctaacacttaatgcattcgacctaatcattctttcgcaaggattgaatcttgcagcgctctttgaccgcagacaggactgtgacaagcttcaaaatagattcttatcacgcaatccagcaaaggttatcttgtcaagcatggaggttgttgcgcaatcaatgggatttaagacacacattcgcaattataagatgagggtggaaggtctaaatgccgacaagactagccatctctcagttatggttgaagttttcgaagttgctccatcaatcttcatggtagaactacaaagagcagcaggagatacttcagagtataacacgttcgtaaataactactgcagcaaattagatgatatcatctggaaatttccaactgagaagggaaaatcgaggataccccggttatcaaagtctcattcataatctagtgctgtgtgttatcaattactatggacttaagtggatatatttgcagagtgtatcgcaattggattatgatattctaagtgtagctcttcgagtagtatatgtttgtatattcagagtccccatgtacaaagaggccgttttaattgaggtttccgtacctcgattccctgtgcaaagttttcatcgatgttttagactacacatctgtatattttgtcgagagcatcagtttcttagacaccacctatgtatcatgcgtttgttgccatctagtgtcattttgtaagatctaacttgtgatatacttggattgagtggtatggttgaaaagagtgaaagtcctttaaaaatcttagtgaaaaatacaaacttacacaaagttgatagaacatttttgagtta

SEQ ID NO: 37532 - DNA, 1125 bp, Zea Mays
gtgtcatgattatttaatgtatcgtatcaactacaggttctcagtcataagggatataatggcgcacttgctgatacatggtcatgtggagtaattttatatgtattgttagcaggttatcttccatttgatgaagtggacctgactaccctttatggaaagattgagagtgcagaatattcattcccagcctggttttcaggtggtgcgaaatcactgattcgtagaattcttgacccaaatccagagacagacgataatgaggatgcttttgaagatgaaacaggtcctctaacacttaatgcattcgacctaatcattctttcgcaaggattgaatcttgcagcgctctttgaccgcagacaggactgtgacaagcttcaaaatagattcttatcacgcaatccagcaaaggttatcttgtcaagcatggaggttgttgcgcaatcaatgggatttaagacacacattcgcaattataagatgagggtggaaggtctaaatgccgacaagactagccatctctcagttatggttgaagttttcgaagttgctccatcaatcttcatggtagaactacaaagagcagcaggagatacttcagagtataacacgttcgtaaataactactgcagcaaattagatgatatcatctggaaatttccaactgagaagggaaaatcgaggataccccggttatcaaagtctcattcataatctagtgctgtgtgttatcaattactatggacttaagtggatatatttgcagagtgtatcgcaattggattatgatattctaagtgtagctcttcgagtagtatatgtttgtatattcagagtccccatgtacaaagaggccgttttaattgaggtttccgtacctcgattccctgtgcaaagttttcatcgatgttttagactacacatctgtatattttgtcgagagcatcagtttcttagacaccacctatgtatcatgcgtttgttgccatctagtgtcattttgtaagatctaacttgtgatatacttggattgagtggtatggttgaaaagagtgaaagtcctttaaaaatcttagtgaaaaatacaaacttacacaaagttgatagaacatttttgagtta

SEQ ID NO: 37533 - DNA, 1857 bp, Zea Mays
tcccaggctctcaactcccagtagaaaacttcaccggctgcctgcctgcccacagaaattgcgcccggccgccccccattcaccttcaaaaaaggagccaggcttcccatcaacgagggtgtcggccatctgagcagctcccctgcccctcgcagcggctactctacaggtctagcgactctttcgccatccatagagggaggaggcgcggcggagatggtgggcggtggcggcggcgggccgctgcggcgggtgggcaagtacgaggtgggacgcaccatcgaggaaggcaccttcgccaaggtcaagttcgcgcagaacaccgagaccggggaaagcgtcgccatgaaggtgctcgaccgctcctccatcctcaagaacaagatggccgaacagattaagagagaaatatccataatgaagcttgtcaggcatcccaatgtcgttaggctacacgaggttttggcaagccggaagaagatatttataattctggagttcatcactggcggcgagctattcgataaaattattcgtcatgggagactcagtgaagcagatgcacgcagatactttcagcaacttattgatggtgttgatttttgtcacaagaaaggagtctaccatcgagacttaaagcctgaaaatctcctccttgattcccaaggcaatcttaaaatttcagactttggactgagtgcatggcctgctcagggatctttccttctacgtacaacctgtgggactccgaactatgttgccccagaggttctcagtcataagggatataatggcgcacttgctgatacatggtcatgtggagtaattttatatgtattgttagcaggttatcttccatttgatgaagtggacctgactaccctttatggaaagattgagagtgcagaatattcattcccagcctggttttcaggtggtgcgaaatcactgattcgtagaattcttgacccaaatccagagacagacgataatgaggatgcttttgaagatgaaacaggtcctctaacacttaatgcattcgacctaatcattctttcgcaaggattgaatcttgcagcgctctttgaccgcagacaggactgtgacaagcttcaaaatagattcttatcacgcaatccagcaaaggttatcttgtcaagcatggaggttgttgcgcaatcaatgggatttaagacacacattcgcaattataagatgagggtggaaggtctaaatgccgacaagactagccatctctcagttatggttgaagttttcgaagttgctccatcaatcttcatggtagaactacaaagagcagcaggagatacttcagagtataacacgttcgtaaataactactgcagcaaattagatgatatcatctggaaatttccaactgagaagggaaaatcgaggataccccggttatcaaagtctcattcataatctagtgctgtgtgttatcaattactatggacttaagtggatatatttgcagagtgtatcgcaattggattatgatattctaagtgtagctcttcgagtagtatatgtttgtatattcagagtccccatgtacaaagaggccgttttaattgaggtttccgtacctcgattccctgtgcaaagttttcatcgatgttttagactacacatctgtatattttgtcgagagcatcagtttcttagacaccacctatgtatcatgcgtttgttgccatctagtgtcattttgtaagatctaacttgtgatatacttggattgagtggtatggttgaaaagagtgaaagtcctttaaaaatcttagtgaaaaatacaaacttacacaaagttgatagaacatttttgagtta

SEQ ID NO: 37534 - DNA, 2077 bp, Zea Mays
ctgcggtccacttcttcaagttatcccaggctctcaactcccagtagaaaacttcaccggctgcctgcctgcccacagaaattgcgcccggccgccccccattcaccttcaaaaaaggagccaggcttcccatcaacgagggtgtcggccatctgagcagctcccctgcccctcgcagcggctactctacaggtctagcgactctttcgccatccatagagggaggaggcgcggcggagatggtgggcggtggcggcggcgggccgctgcggcgggtgggcaagtacgaggtgggacgcaccatcgaggaaggcaccttcgccaaggtcaagttcgcgcagaacaccgagaccggggaaagcgtcgccatgaaggtgctcgaccgctcctccatcctcaagaacaagatggccgaacagattaagagagaaatatccataatgaagcttgtcaggcatcccaatgtcgttaggctacacgaggttttggcaagccggaagaagatatttataattctggagttcatcactggcggcgagctattcgataaaattattcgtcatgggagactcagtgaagcagatgcacgcagatactttcagcaacttattgatggtgttgatttttgtcacaagaaaggagtctaccatcgagacttaaagcctgaaaatctcctccttgattcccaaggcaatcttaaaatttcagactttggactgagtgcatggcctgctcagggatctttccttctacgtacaacctgtgggactccgaactatgttgccccagaggttctcagtcataagggatataatggcgcacttgctgatacatggtcatgtggagtaattttatatgtattgttagcaggttatcttccatttgatgaagtggacctgactaccctttatggaaagattgagagtgcagaatattcattcccagcctggttttcaggtggtgcgaaatcactgattcgtagaattcttgacccaaatccagagacaggccatgaaatgtttgatcgttgctacaatatgtggtgttttgttgatcaaatatgtttcctgacatggaacagcgaatcaggatagaagagatcagaagtgatgaatggtttcagaaaaattatgaacctatcaaagaaatagaaaatgaggaagtcaatctcgatgatgtcaatgcagcttttgatgatcctgaggacgataatgaggatgcttttgaagatgaaacaggtcctctaacacttaatgcattcgacctaatcattctttcgcaaggattgaatcttgcagcgctctttgaccgcagacaggactgtgacaagcttcaaaatagattcttatcacgcaatccagcaaaggttatcttgtcaagcatggaggttgttgcgcaatcaatgggatttaagacacacattcgcaattataagatgagggtggaaggtctaaatgccgacaagactagccatctctcagttatggttgaagttttcgaagttgctccatcaatcttcatggtagaactacaaagagcagcaggagatacttcagagtataacacgttcgtaaataactactgcagcaaattagatgatatcatctggaaatttccaactgagaagggaaaatcgaggataccccggttatcaaagtctcattcataatctagtgctgtgtgttatcaattactatggacttaagtggatatatttgcagagtgtatcgcaattggattatgatattctaagtgtagctcttcgagtagtatatgtttgtatattcagagtccccatgtacaaagaggccgttttaattgaggtttccgtacctcgattccctgtgcaaagttttcatcgatgttttagactacacatctgtatattttgtcgagagcatcagtttcttagacaccacctatgtatcatgcgtttgttgccatctagtgtcattttgtaagatctaacttgtgatatacttggattgagtggtatggttgaaaagagtgaaagtcctttaaaaatcttagtgaaaaatacaaacttacacaaagttgatagaacatttttgagtta

SEQ ID NO: 37535 - DNA, 3915 bp, Zea Mays
aagccaacaacgaagaagccaacaccacggtgataatgaacttcgtttatcttgccattggagccgggcttgcttcaacatttcaggtatcatgttggataattaccggagaaagacaagcagcacgaatcagagccttgtatctcaaggcaattctaagacaggatattgcattctttgacatggaaatgagcactgggcaagtggttgagaggatggcaggggatacattcctaattcaagatgccatcggagaaaaggttgggaagtccatacaacttctttctacttttattggtggctttattattgcatttgtaaaaggatggctcttggcccttgttatgctctcaagcattcctccaatcgccatcgctggtgcgattgtgtcaaggctgatgacaagactctccactcgcatgcaagcaaaatatggtgatgctgggaatgttgtcgaacagatgcttggagctattagaacggttgtgtcgttcaatggtgagaagcaggctataagaacatataacaagttcatacgaaaagcatatgaatctgctctacaagaaggtgctgtaaatggacttggactaggttccgtaatggcagtcttgttttgcagctatggcttggccgtttggtatggatctagactgatagttgagcgaggatacaatggtggcatggttatctctgtcataatggctgtcatgattggcgcaatgtccttaggtcaggcaacaccatcagtaacagcttttgctgaaggtcaaggagcagcatatagaatgttcaagacaattgaacggaaaccagatattgatatatatgataccacaggtgtcatattggaggacataaagggtgacattgaactgaaggatgtgtacttcagctatcctactaggtctgaacatttggtatttgatggattctcgctgcaagtaccaaatggcacaactatggccctagtgggggagagtggcagtgggaagtccaccgtgatcagtttggtggagagattctacgacccacgggctggacaagttttgatcgacggagttgacattagaaggatgcaccttggatggataagaggaaaaattggtctcgtcagtcaagaaccagtgttgttctcaactacaatcagggaaaacattgcctatggaatggaaaattcaacacttgaagagatcaagagagcaactgagcttgcaaatgctgctaaattcatcgataagttaccaaatggtcttgacacattggttggggaacgtggaactcaactgtctggaggacagaagcagagaatagcaattgctagagcaatcgtaaagaaccctaggatcttactacttgatgaagcaactagcgcattggatatggaatctgagagggtggttcaagaagctctgaatagggtcatgctagaaaggactacgattatcgttgctcatcgcctaagcacagtgaaaaatgctgatgtgatatctgtcctacaacacgggaaggtggttgaacaaggctcacatgtagaactgatgaagaagatacctgaaggtgcttactctcagctgatacatctacaagagacacgccaaggggcagaattttcaagcgttgaccctgatattgtactaacaaatggtattggctctaggtctattaatagcaaaccaagaagccaaagtatctccaggagatcaactagtaaaggatcttcctcgtttgggcacagtggtaggcactccttccctgctccacttggtctacctgatcctatggaactcaatggatctccagatgtggaagagactgttgacaaaacgagcagagctccaaagaaagctccacttggcagactcttgtatctaaacaaaccagaagctcttgtccttgcacttggttctataactgctgcgatgcatggcgttattttcccaatatatggcacattgatctccaccgcaataaaggtgttctatgagccacctgcagaactactgaaggactcgaggttctgggcaagcatgttcgttgcgttgggtgcttgtgcatttgttctgattccagtagagtatttcctattcggattagctggtgggaagcttgtggagcgcgtacgatcactgacattccaaagtttaatgcgccaagagattagctggtttgatgaacctgaacactcaagtggatcaattggtgcaagactatcaaccgatgccatgaacgttaagcggcttgttggggacaatttagcactcaatgtgcagactttatcaactgtcatatcaggcttcacaatagcaacagttgcaaactggaagctggcactgatcatcactgtggtggttccctttgtgggtttccaaggctatgctcagatgaagttccttaaaggtctcaacagaaacgcgaagctcaagtatgaggaagcaagccaagtggccactgacgcggtcggcggcatcagaaccgtagcgtcgttttctggcgagaagaaagcggtggacgcctacgagaggaaatgtgagtctccgataaagcaagggatcagggaaggtgtcgttggtggcctggggttcgggttctcgttcctggcattctacctcacgtatgctctgtgcttctatgtcggtgccaagttcgttgagcaagggacggcgacgtttcctcaggtgttcagggtgagtgtgattctctcatcacacacacttgatcgtttcgacgtctcctcaattgtctagtggctctcaggtcttctttgtattggttctagccaccagtgggatctcgcgaacaagcgcagttggcgcggatagcaccaaggccaatgatgcggccgcgtctgtcttggaaatcctcgatcgaaagtctaagatcgactacagctgcgaggagggcatcaccatcgcaggcgtgagcgtcaggggggagatcgacttccagaacgtgtgcttcaagtatccgctacggccaaatgttcagatcttcaaggatctgtcactaagcattccttctggaaagactgttgcactggtcggggagagcggcagcgggaagtccaccgcgatcgcactgctcgaaaggttctacgatccagactcgggtaaggtcctcttcgacggcgtggagctccgagccctcagagtcagctggctccggcagcaggtcgggctggtctcgcaagagccagtgctgttcaacgacaccatccgcgccaacatagcctacgggaagcagggggaggcgtcggaagaggagatcgtcgccgctgccggagcagccaacgcgcaccagttcgtatcggctctgcccgacgggtacagcacccttgtcggcgagagaggcatccagctgtccggtggccagaagcagcgcgtcgccatcgccagggccgtcgtcaaggaccccaaggtgctcctgctggacgaggcgaccagcgcgctggatgccgagtcggagcgggtcgtgcaggaggcgctggaccaggcggtggtcggtaggaccacggtggtggtagcgcatcgcctgtccaccgtcagaggcgcggacgtcatcgctgtcctcaagaacggggcagtcgccgagaaaggcaggcatgaagacctgatgcgggtgaagggtggaacctatgcttcgcttgttgagctaagctctacttcttcgtgatccccaaataattaattaataaggttagatgatcctcacatggattgggaaaagaattaataaggttgctactcaaagttctacttcttagcctttaatatcaattgggcaattaccaagcttcgcttgttgatatactgaaagttcggtcatcattcaaaagttagaaaatcctcacgtggattggttacgatgtagaaaggttgctactcgaagttatacttttaagttaattcgtaacagaac

SEQ ID NO: 37536 - DNA, 3825 bp, Zea Mays
ctttctccacgggtttccagcaccagactaggtgataatgaacttcgtttatcttgccattggagccgggcttgcttcaacatttcaggtatcatgttggataattaccggagaaagacaagcagcacgaatcagagccttgtatctcaaggcaattctaagacaggatattgcattctttgacatggaaatgagcactgggcaagtggttgagaggatggcaggggatacattcctaattcaagatgccatcggagaaaaggttgggaagtccatacaacttctttctacttttattggtggctttattattgcatttgtaaaaggatggctcttggcccttgttatgctctcaagcattcctccaatcgccatcgctggtgcgattgtgtcaaggctgatgacaagactctccactcgcatgcaagcaaaatatggtgatgctgggaatgttgtcgaacagatgcttggagctattagaacggttgtgtcgttcaatggtgagaagcaggctataagaacatataacaagttcatacgaaaagcatatgaatctgctctacaagaaggtgctgtaaatggacttggactaggttccgtaatggcagtcttgttttgcagctatggcttggccgtttggtatggatctagactgatagttgagcgaggatacaatggtggcatggttatctctgtcataatggctgtcatgattggcgcaatgtccttaggtcaggcaacaccatcagtaacagcttttgctgaaggtcaaggagcagcatatagaatgttcaagacaattgaacggaaaccagatattgatatatatgataccacaggtgtcatattggaggacataaagggtgacattgaactgaaggatgtgtacttcagctatcctactaggtctgaacatttggtatttgatggattctcgctgcaagtaccaaatggcacaactatggccctagtgggggagagtggcagtgggaagtccaccgtgatcagtttggtggagagattctacgacccacgggctggacaagttttgatcgacggagttgacattagaaggatgcaccttggatggataagaggaaaaattggtctcgtcagtcaagaaccagtgttgttctcaactacaatcagggaaaacattgcctatggaatggaaaattcaacacttgaagagatcaagagagcaactgagcttgcaaatgctgctaaattcatcgataagttaccaaatggtcttgacacattggttggggaacgtggaactcaactgtctggaggacagaagcagagaatagcaattgctagagcaatcgtaaagaaccctaggatcttactacttgatgaagcaactagcgcattggatatggaatctgagagggtggttcaagaagctctgaatagggtcatgctagaaaggactacgattatcgttgctcatcgcctaagcacagtgaaaaatgctgatgtgatatctgtcctacaacacgggaaggtggttgaacaaggctcacatgtagaactgatgaagaagatacctgaaggtgcttactctcagctgatacatctacaagagacacgccaaggggcagaattttcaagcgttgaccctgatattgtactaacaaatggtattggctctaggtctattaatagcaaaccaagaagccaaagtatctccaggagatcaactagtaaaggatcttcctcgtttgggcacagtggtaggcactccttccctgctccacttggtctacctgatcctatggaactcaatggatctccagatgtggaagagactgttgacaaaacgagcagagctccaaagaaagctccacttggcagactcttgtatctaaacaaaccagaagctcttgtccttgcacttggttctataactgctgcgatgcatggcgttattttcccaatatatggcacattgatctccaccgcaataaaggtgttctatgagccacctgcagaactactgaaggactcgaggttctgggcaagcatgttcgttgcgttgggtgcttgtgcatttgttctgattccagtagagtatttcctattcggattagctggtgggaagcttgtggagcgcgtacgatcactgacattccaaagtttaatgcgccaagagattagctggtttgatgaacctgaacactcaagtggatcaattggtgcaagactatcaaccgatgccatgaacgttaagcggcttgttggggacaatttagcactcaatgtgcagactttatcaactgtcatatcaggcttcacaatagcaacagttgcaaactggaagctggcactgatcatcactgtggtggttccctttgtgggtttccaaggctatgctcagatgaagttccttaaaggtctcaacagaaacgcgaagctcaagtatgaggaagcaagccaagtggccactgacgcggtcggcggcatcagaaccgtagcgtcgttttctggcgagaagaaagcggtggacgcctacgagaggaaatgtgagtctccgataaagcaagggatcagggaaggtgtcgttggtggcctggggttcgggttctcgttcctggcattctacctcacgtatgctctgtgcttctatgtcggtgccaagttcgttgagcaagggacggcgacgtttcctcaggtgttcaggccaccagtgggatctcgcgaacaagcgcagttggcgcggatagcaccaaggccaatgatgcggccgcgtctgtcttggaaatcctcgatcgaaagtctaagatcgactacagctgcgaggagggcatcaccatcgcaggcgtgagcgtcaggggggagatcgacttccagaacgtgtgcttcaagtatccgctacggccaaatgttcagatcttcaaggatctgtcactaagcattccttctggaaagactgttgcactggtcggggagagcggcagcgggaagtccaccgcgatcgcactgctcgaaaggttctacgatccagactcgggtaaggtcctcttcgacggcgtggagctccgagccctcagagtcagctggctccggcagcaggtcgggctggtctcgcaagagccagtgctgttcaacgacaccatccgcgccaacatagcctacgggaagcagggggaggcgtcggaagaggagatcgtcgccgctgccggagcagccaacgcgcaccagttcgtatcggctctgcccgacgggtacagcacccttgtcggcgagagaggcatccagctgtccggtggccagaagcagcgcgtcgccatcgccagggccgtcgtcaaggaccccaaggtgctcctgctggacgaggcgaccagcgcgctggatgccgagtcggagcgggtcgtgcaggaggcgctggaccaggcggtggtcggtaggaccacggtggtggtagcgcatcgcctgtccaccgtcagaggcgcggacgtcatcgctgtcctcaagaacggggcagtcgccgagaaaggcaggcatgaagacctgatgcgggtgaagggtggaacctatgcttcgcttgttgagctaagctctacttcttcgtgatccccaaataattaattaataaggttagatgatcctcacatggattgggaaaagaattaataaggttgctactcaaagttctacttcttagcctttaatatcaattgggcaattaccaagcttcgcttgttgatatactgaaagttcggtcatcattcaaaagttagaaaatcctcacgtggattggttacgatgtagaaaggttgctactcgaagttatacttttaagttaattcgtaacagaac

SEQ ID NO: 37537 - DNA, 3924 bp, Zea Mays
cccggtagtcttcacccctgccggcggccagcaccagtgtccggcatcctcccctcccccttctatacacatcgcttctttctccacgggtttccagcaccagactaggtgataatgaacttcgtttatcttgccattggagccgggcttgcttcaacatttcaggtatcatgttggataattaccggagaaagacaagcagcacgaatcagagccttgtatctcaaggcaattctaagacaggatattgcattctttgacatggaaatgagcactgggcaagtggttgagaggatggcaggggatacattcctaattcaagatgccatcggagaaaaggttgggaagtccatacaacttctttctacttttattggtggctttattattgcatttgtaaaaggatggctcttggcccttgttatgctctcaagcattcctccaatcgccatcgctggtgcgattgtgtcaaggctgatgacaagactctccactcgcatgcaagcaaaatatggtgatgctgggaatgttgtcgaacagatgcttggagctattagaacggttgtgtcgttcaatggtgagaagcaggctataagaacatataacaagttcatacgaaaagcatatgaatctgctctacaagaaggtgctgtaaatggacttggactaggttccgtaatggcagtcttgttttgcagctatggcttggccgtttggtatggatctagactgatagttgagcgaggatacaatggtggcatggttatctctgtcataatggctgtcatgattggcgcaatgtccttaggtcaggcaacaccatcagtaacagcttttgctgaaggtcaaggagcagcatatagaatgttcaagacaattgaacggaaaccagatattgatatatatgataccacaggtgtcatattggaggacataaagggtgacattgaactgaaggatgtgtacttcagctatcctactaggtctgaacatttggtatttgatggattctcgctgcaagtaccaaatggcacaactatggccctagtgggggagagtggcagtgggaagtccaccgtgatcagtttggtggagagattctacgacccacgggctggacaagttttgatcgacggagttgacattagaaggatgcaccttggatggataagaggaaaaattggtctcgtcagtcaagaaccagtgttgttctcaactacaatcagggaaaacattgcctatggaatggaaaattcaacacttgaagagatcaagagagcaactgagcttgcaaatgctgctaaattcatcgataagttaccaaatggtcttgacacattggttggggaacgtggaactcaactgtctggaggacagaagcagagaatagcaattgctagagcaatcgtaaagaaccctaggatcttactacttgatgaagcaactagcgcattggatatggaatctgagagggtggttcaagaagctctgaatagggtcatgctagaaaggactacgattatcgttgctcatcgcctaagcacagtgaaaaatgctgatgtgatatctgtcctacaacacgggaaggtggttgaacaaggctcacatgtagaactgatgaagaagatacctgaaggtgcttactctcagctgatacatctacaagagacacgccaaggggcagaattttcaagcgttgaccctgatattgtactaacaaatggtattggctctaggtctattaatagcaaaccaagaagccaaagtatctccaggagatcaactagtaaaggatcttcctcgtttgggcacagtggtaggcactccttccctgctccacttggtctacctgatcctatggaactcaatggatctccagatgtggaagagactgttgacaaaacgagcagagctccaaagaaagctccacttggcagactcttgtatctaaacaaaccagaagctcttgtccttgcacttggttctataactgctgcgatgcatggcgttattttcccaatatatggcacattgatctccaccgcaataaaggtgttctatgagccacctgcagaactactgaaggactcgaggttctgggcaagcatgttcgttgcgttgggtgcttgtgcatttgttctgattccagtagagtatttcctattcggattagctggtgggaagcttgtggagcgcgtacgatcactgacattccaaagtttaatgcgccaagagattagctggtttgatgaacctgaacactcaagtggatcaattggtgcaagactatcaaccgatgccatgaacgttaagcggcttgttggggacaatttagcactcaatgtgcagactttatcaactgtcatatcaggcttcacaatagcaacagttgcaaactggaagctggcactgatcatcactgtggtggttccctttgtgggtttccaaggctatgctcagatgaagttccttaaaggtctcaacagaaacgcgaagctcaagtatgaggaagcaagccaagtggccactgacgcggtcggcggcatcagaaccgtagcgtcgttttctggcgagaagaaagcggtggacgcctacgagaggaaatgtgagtctccgataaagcaagggatcagggaaggtgtcgttggtggcctggggttcgggttctcgttcctggcattctacctcacgtatgctctgtgcttctatgtcggtgccaagttcgttgagcaagggacggcgacgtttcctcaggtgttcagggtcttctttgtattggttctagccaccagtgggatctcgcgaacaagcgcagttggcgcggatagcaccaaggccaatgatgcggccgcgtctgtcttggaaatcctcgatcgaaagtctaagatcgactacagctgcgaggagggcatcaccatcgcaggcgtgagcgtcaggggggagatcgacttccagaacgtgtgcttcaagtatccgctacggccaaatgttcagatcttcaaggatctgtcactaagcattccttctggaaagactgttgcactggtcggggagagcggcagcgggaagtccaccgcgatcgcactgctcgaaaggttctacgatccagactcgggtaaggtcctcttcgacggcgtggagctccgagccctcagagtcagctggctccggcagcaggtcgggctggtctcgcaagagccagtgctgttcaacgacaccatccgcgccaacatagcctacgggaagcagggggaggcgtcggaagaggagatcgtcgccgctgccggagcagccaacgcgcaccagttcgtatcggctctgcccgacgggtacagcacccttgtcggcgagagaggcatccagctgtccggtggccagaagcagcgcgtcgccatcgccagggccgtcgtcaaggaccccaaggtgctcctgctggacgaggcgaccagcgcgctggatgccgagtcggagcgggtcgtgcaggaggcgctggaccaggcggtggtcggtaggaccacggtggtggtagcgcatcgcctgtccaccgtcagaggcgcggacgtcatcgctgtcctcaagaacggggcagtcgccgagaaaggcaggcatgaagacctgatgcgggtgaagggtggaacctatgcttcgcttgttgagctaagctctacttcttcgtgatccccaaataattaattaataaggttagatgatcctcacatggattgggaaaagaattaataaggttgctactcaaagttctacttcttagcctttaatatcaattgggcaattaccaagcttcgcttgttgatatactgaaagttcggtcatcattcaaaagttagaaaatcctcacgtggattggttacgatgtagaaaggttgctactcgaagttatacttttaagttaattcgtaacagaac

SEQ ID NO: 37538 - DNA, 899 bp, Zea Mays
ctgggagtttcggccgaaaattctcaaaaataaatctttttttgcaccgagaaccttcagagatacttaaaagaagaggacagtgatccgaggtttccgaggccaagctttttttttctttttttctcgaatacgcaggagggctgcttatcattatattaaagtagagggaaaaggcctaggacaatcggaacacaacacaaaaaaagaacacatcagacgcacacacaaaaaaacacaccaaacacacacaacacaaacacataccaatcacacgacacaccaccaccccagcctaccaagaggctacaagactttcctttctctaaccggggtcaaaaagggagcgcatgctcctggctccagcagaaaaccactgtctcatctcatctttgaatccatcctctaaggtagaaaggcagggtcgagctccgtaaaaaacacacctgtttctctgtttccaaagactccaagccccaaggattatcatactattaaaccccttacttctgcttttaggaatcctagttgaagcatttctccaccattcagaaaaatttgaatctcttctcttaggacccacaaaagagagaccaattggagttaaaatattatgccaaaactgtcttgcgaagacgcgattagatagaatatgttgcacagtttcatcttcttgatcacatagaacacaattttcaggatgattgagcccccttttttgagtctgtcggctgtccaacatttgtggagcatacaatccggatatagtgcttctcaatctgaggtgcaaataactctgtccaacttgacaagagtgggagatcttctttcattggaccaagtataccttctccccactaacagaatgtctttgagatcaaggtcattaacaaatcgac

SEQ ID NO: 37539 - DNA, 513 bp, Zea Mays
tatcaaaagaagctgaaaaaaagccatttgaggtgtttggtacctgcagcttttcactacctcgctcgcttgttgttgatcttgttgccggaagcaaaccggatggagcagtaggacccaacgccggggctacagggggtgcacgcggcgacaactacacgaggtgcgtgcggtggagagagaccgcgagtttcactggtgggggaggggcgacgccggcaacaggggaggcacggcttggtcggcgggggagaagcgatcccagtcttaaacagatagggcaagaaaccctagcaggcagttagggtttgaatgctcagtttcacagcagcagggagaaaggggtgggcatacctgctgggtgatgcttgtgcccggtgaacgatccgatgaagacctaggcaccaagcgtagggcggcggcaggggtgaagcagttgtccccgagagagagaggcgcaagcgatgtgacgaaccctgtttgtttcctcgtatttttttaatcacctagcca

SEQ ID NO: 37540 - DNA, 114 bp, Zea Mays
aggaggcaaagtcgttggagctgacacctgctggtgcccagactgcactagaggaggcacatgagttacactctgtcctgggcctgtactccagggttgcactacaggagggat

SEQ ID NO: 37541 - DNA, 390 bp, Zea Mays
ctcgaaccaccattttgcatgccaacaatagaactggaagtattctccacattgtgcggcaggggagcaccagaaagaacagagtttgatgacccatcatgtgtgctggaagcaattataccaacagcagatgacgactgattagcaggtgcagtagaaggttcaaaggcagcagatctgacaagagcactagtagctattcctgattcttgatcaggttgttgatttgatgccttctctgccaattcacgtgcaacctgagagagagaaaaatcaatgcagcaataatgtattttcaaataaacagagaaaagaagaccaagaaaaaaacctttaactcgtcaggaatagtccattttgattgcttggtcactttgttgaaatagtacc

SEQ ID NO: 37542 - DNA, 219 bp, Zea Mays
ggaataacgttcatcgtcctccagacgttcctgaacttttctccactgagtacttgcctgcaagaatgggaaaaaatcctttatagagctcctgtataaacagattgactttatgagagatcaaagaaataaccttgatgaagtcacatgattctagaaaagctctgtattctgctacatatcttttgtgttcttcagcagccttggctttttcctaca

SEQ ID NO: 37543 - DNA, 783 bp, Zea Mays
gtttcatatggataaatatctaacagcaaatttcccttcttgtaagtatttatgtttattctaataaaaaaacttaaaaataacaactgcatgacacaaacttagaaataacaggtgcaaataatacaaacagagaacagaaaataactacaattaagtaaaaaatttgaaagaaaattgtcttgaaacggtagcatcaagctcactctgctgatatactgatgctaaacacagttacagttgctaaatctgttgtttttgtctagattttagaaccacagttgtatgaatgaacaacaccaaacacgacatccccaatgtttagcttgatttgcatagaatatcaaataccataccttcctagatttcttgcgatcactgctgctatgcctccgagacttcttagcatcgtctttatcatccctctcagagcttacatcatctgtgtcatggtgacgtctcttatgtttcttttctttttctttatctcttttcttatcttttgtaccatgggtgttcaaatcagcaccatcaaactccatttcatctctccttgatcgatccttccctttctccttttctctctcctcccggtggtctctttctttttctttgcgttctttctccttcctttctttctctttctctttcttcttctctttctcctcacgctctttctctctttttgcctaataagagtaaaagttcaggggtggaaaagaaaaatgaaaagaaacatctcataaaaactatagtatgcggcaaacaatgaaggtagtgttg

SEQ ID NO: 37544 - DNA, 1929 bp, Zea Mays
cggaagcaacgaaatgcggaaaatgtactggacgggaacatctcaagcattgcatcagaaaaataacaatccgtcaagtacaacttcaaggacaaagtgttgggtgagaacaattcgcgagtcaggacgctagaatgctaataaaatgatgatacgctgccaactctccccaacaggatgcctgcgtctgaaagcagccagtacttttctgggtacaaagccctacgggtttaagagcagacctggataagctagtaaatgaaaaccataatacaaacacgctgaatcttcaagcccagcaatccttgacaaatttccatagataactaaatcctagtacaatgaacaagccttaacatgacattagcgacaaatcaaacactccatgctctcccaaaagcacatcactcacaaagaaactcgttgcaaactgagcaatctgttacctcagcacagacagcaccatggactttgaaggaaatgaaaatttagcctggtcagctgccagaaggaccaaagaaaggtgtcaagcatgggctggtgttattgctacatccattgccccccagcagtagctggtgttattgctatatccattgccccccagcagtagcatcacaggtgcggcagagcaaaaatccagctggtaggcttcagcccaagtgcgcaactcaacaggcaagagatggcaataaatccatgtgtaacaagactggagatgaatgctacaagtagctgatggttcagtcaaatgtcagtaataaacttcatcaggacataaatagcatatatagttggaaaaatataaataaatcaacggttttgtttatttatttttctgagaataggacaagacagcttgcggttatggctatctaaagttgcatgtccagccaaagttctaaaggataattaaggcacactaacttttcacctcccatgtactgatgtgccaaaataacaaacctacacagtgaagtacaaaggaaaaaaaagagaaggcaaagataaagtgtctaggaaggcaagaaaatattttcataatgtacatggctacaattccaacacccagataaaagttttactactcacaagtcacacctacccaaaccaggacatccacatgaagcaaaccacatggttgaagtgttgcaccttttccagagaataataactcgaccgaggagggaatgaccaccctcccggtataacattaagaagagaccgaaacaatagtcccagccgagaaaatccccgaaccctggcctcaaattactaacggaccggcgtcaaccgaaacaatggcgcacaggacatcgtaacccgagagcgaatgaggcacatcgaggggattttttaaccaagcccgaaattccgcccccgaggggaatcaagcccgggacttggtggtgctactccgaagccttaaccactaggctagaggccctttcgctttccagagaataatatgtgcaactaccctagaatccacacattgattatgcaaaaaaggaaataaacgacaattggtattgaagaaatgtagatatttaaggaaatatttcagaatgtatggaactaaataactataacactagtgattgttacgccaaagcactaataaaaagtcaaaagtaagaaaaataagagcaatggagaacatgacaaggggaagtaattactgacaatctcggtagcaaacagaaagactaatagatctccccatcctctccaagttcaccatcttccagctcatgtgctccatttcttctactactatctcggtcctttttatgtcttttgtgccggttttcactatctgaatctgagccatgtgcatgctgcatgatcaacagtaatcatcttattacacaatttaatcataagcgaataaccatgacaatatttcaggcgattgaagaatagttc

SEQ ID NO: 37545 - DNA, 272 bp, Zea Mays
tggaactaaataactataacactagtgattgttaagccaaagcactaataacaagtcaaaagtaagaaaaataggagcaatggagaacatgacaaggggaagtaattactgacaatctcggtagcaaacagaaagactaatagatctccccatcctctccaagttcaccatcttccagctcatgtgctccatttcttctactactatctcggtcctttttatgtcttttgtgccggttttcactatctgaatctgagccatgtgcatgctgc

SEQ ID NO: 37546 - DNA, 474 bp, Zea Mays
agtccctggaggagaagctcaaatcttccgggataccatatgaagttcacatataccctggatgttcgcatgccttcatgaacacttcgcctgaggcactcaagaggaagaaggggatgggtctgactgatgagaaccaggaagccgtcgacctggcctggtctcgcttctcttcttggatgggccggttcctcggatctgcttgattatgtgccgcgtgatgatgtggagtcaggtcccatgaataaaatagaataaaataaaatgttcagattcaggaaccatgcaaatggactgggctgtacggttctctggatttgcttgtccttctgtttatagttatctacctcagtgtggtttccttattttctgtggatggatgcatattgtggaatagccgtcgatggcttctgacagtaagcagcgacaaggcaactaactgctggccagagttcaccctatcgttttgaattc

SEQ ID NO: 37547 - DNA, 4011 bp, Zea Mays
ctacgttctggatcctgctgcttatatgcaagctcgccttcagttattatgttgagattgctcctttagttgaacctaccaggataatcatgtcactggaaaggccgccttatgagtggcatgagttcttcccaaacttgcggcataatttaggtgttgtggttactgtatgggctccaattgtcatggtgtacttcatggacacacaaatatggtatgccattttctccacaatatgtggtggagtctatggtgcattcagccgcttgggtgagatacgaacccttgggatgttgagatcaagatttgaggcaattccaagagcatttggcaaaaaacttgtacctgatcatggcagtcacttgaaaggagatgaggaggacaaaaacccacccttcgataagtttgctgacatatggaatgcatttattaattcattgcgagaagaggacttactaaacaatagggagaaagatctattggttgttccttcatctggtggtcaaacaagtgtttttcagtggcctcctttccttcttgccagtaagattccaattgcacttgacatggcaaagagtgtcaagaaaaaagatgatgaacttatgaagaggataaagcaggatccttatactgagtatgctgtaatagaatgctacgatacattattagatatcctttacagcattattgttgtacaaagtgataagaaagttgttgatagaatacgtgaaagcatcaaagatagcatccaccggaaatcactcgtgaaagaattccgattggatgaacttcctcaactaagtgctaagtttgataagttgctaaatctactgaaggaatatgatgagaacgatcctgtaaatagaaacacacatattgccaatctgttgcaggatataatggaaatcatcacacaggatattatgaaaaatggaaaaggtatcttgaaggacgagggccaaaaacaacaactgtttgcaaaattaaatctggattcattgaagcatgttgcttggagggagaagtgcattaggcttcaattgttgttgacaacaaaggaatctgccatatatgtaccaacgaacttggaagctcggcgtaggatcaccttttttgcaaactcactttttatgagaatgccaagggcaccacctgtccgtagcatgatgtccttcagtgttttaactccatacttcaaagaggaggtgctcttttcaccagaagatcttcataggaaaaatgaggatggtatatcaatactgttctacctacggaaaatatatccagatgaatttaggaacttccttcagcggatagattttgaagtgaaggatgaagaagaacttaaagataagatggatgagatctgtaattgggcgtcttataggggtcaaactctcaccagaacagtaagaggaatgatgtactacagaaaggcacttgaaatccaatgccttcaagatatgacagatcctgctaaagttgaccgagacagatcaataggatcctaccaagagttgcaatatgatattgaaatggcacaagctattgctgatatcaaattcacttatgttgtctcatgtcaagtttatggcatgcaaaagaaatcaaaggatttaaatgaaaaaaggcgctatcagaatatcctcaatctcatgataatgaacccatcactacgagttgctttcattgaggagatcgaaggtctaaccagaaatggagcaactgagaagacatattgttccgttcttgtcaaaggtggtgaaaagtatgatgaggaaatttaccgcataaagcttcctggcaatccaacagatattggagagggaaaacctgaaaaccaaaatcatgccataatcttcaccaggggagaagcacttcaggccattgatatgaatcaggataattatattgaggaggcgtttaaaatgagaaatgtgctggaggagtttgagagtagaaagtatgggaagagcaaacccactatattaggcttacgtgagcacatttttactggaagtgtttcgtcgctggcttggtttatgtccaatcaagagaccagttttgttactattgggcaaagagttctggcaaatcctctcaaggttcggttccattatggccacccagatatttttgatagactcttccatatcaccagaggaggcataagtaaagcttcaaagactataaatctgagtgaagatatattttcaggttttaattcaaccatgagaggaggaaatgttacacatcacgaatacatgcaagttggtaaggggcgtgatgtggggatgaatcagatttctagcttcgaagctaaggtggccaacggtaacggtgaacaaacattaagtcgtgacatttatcggcttggacgcagatttgacttctacagaatgttatctttctattttactacagttgggttctattttagtagcatggttactgtacttactgtctatgtgtttttatatgggaggctttatctggttatgagtggtctggaaaagtctattatgctggatccacgaaatcagcagaatgtcaaggctctcgaaaatgcactggcttcacagtctattttccagctaggtctgctgcttgtcctccctatggtcatggaagttggcttagagaaagggttccgcacagcattaggagagtttgtaatcatgcagcttcagttggcatctgtgttcttcacattccagcttggcaccaaaacccactactatgggagaacaatactccatggtggtgcaaaatacagaccaacaggtcgtggattcgttgtgtaccatgcaaagtttgctgaaaattaccaagactgttgaggactggacagattggaggaagtggatggataacagagggggaattggcatgtctgtggaacaaagctgggaagcctggtgggtaactgagcaagatcacctcaggaagactagcatccgagcttttgtgttggaaatcatcctttcacttcgatttttgatctaccagtatggcattgtctaccatctgaacatagcagatcaccacaaaagcattatggtatatggagtatcatgggtggttatgctccttgttcttgtagtgctgaagatggtttcaatagggcggcagaaatttggaacagacctacagcttatgttccgcattctcaagggccttctcttccttggttttgtctctgtgatggcagtcctatttgtcgtcttacaccttactatttctgatgtcttcgctagtatccttggatacttgcctactggatggtgtcttcttctgattggacaagcatgctcaccattgattaggaggaccctgctgtgggactccatcatggagctcggaaggtcatacgagaatataatgggtctcgtcctcttcctgccaattggtttcctgtcgtggttccccttcgtctctgaattccagacacggctgctgtttaaccaggcatttagccggggcctccagatctcaaggatccttgctggtcagaaggatgttagcgagttcgagttcaagtgaccaatttcatccctcttgcaagcaaaccaaactcactttcatgtatttgtttacgatgatcgattttgggtgtctgtactctagtatattttcatcacgtttactactataatactgtctgtacttgagaatgttttgcctctgtaaactgacatgtagaatttctgtaatatatttatggaatttgataacttccatccatgcactgaacgctttgaatggaccattattactaaaggggtaacaaatttatcattgtaaggtcaaacatgtttgggctggaagttttgctattcaatactccaaacatgtttgtaagtgttagatactcatttaaggtttggggttttctcactgtaattacctttgcacccatttgtaatgggtctagctcacttaactcaaatttattaatacaatgcacaaccctaatccaaggttagggtttctatacggtatagagctagg

SEQ ID NO: 37548 - DNA, 5029 bp, Zea Mays
gagactgagcaaacgtggtaaggtgagccactcattgtggagaaactacgacgacttgaatgaatatttttggtcaaaaaaatgcttcaaaaaacttggatggccgatggatccaacagctgacttttttgcagaacctaccagagccaagaatgaaactgagcaacatggtcacgtgattaggagaagaagggcatcaaaaacaaattttgttgaagttcgtacatttttgcatatgttcagaagttttgatcgtatgtgggccttctttatattggggttccaggccatggtaatcattgcctggagcccttctgggtcactttcttctatatttgaaccaaatgttttcaaaaatgtattgacaatctttataacagcggcatttctgaacttccttcaagccacgctagagttaattctcaactggaaagcttggaagagcctggagtgctcacaaaggataagatatatcctaaaatttgctgtagctgttgcctggttgataattcttcctactacgtactcaagctctattcaaaatcccacaggccttgtgaagtttctcagcaattggattcaaaatttgcagaatgaatcaatttataattatgctgttgccctttacatgttaccaaacatattcagtgccctgtttttcatgtttctaccaattcgacgggccttagagcgctcaaattctcgcattattaggttccttttatggtggacacagccaaagttatatgttgctcgaggcatgtatgaagacacttgctcacttcttaagtatactacgttctggatcctgctgcttatatgcaagctcgccttcagttattatgttgagattgctcctttagttgaacctaccaggataatcatgtcactggaaaggccgccttatgagtggcatgagttcttcccaaacttgcggcataatttaggtgttgtggttactgtatgggctccaattgtcatggtgtacttcatggacacacaaatatggtatgccattttctccacaatatgtggtggagtctatggtgcattcagccgcttgggtgagatacgaacccttgggatgttgagatcaagatttgaggcaattccaagagcatttggcaaaaaacttgtacctgatcatggcagtcacttgaaaggagatgaggaggacaaaaacccacccttcgataagtttgctgacatatggaatgcatttattaattcattgcgagaagaggacttactaaacaatagggagaaagatctattggttgttccttcatctggtggtcaaacaagtgtttttcagtggcctcctttccttcttgccagtaagattccaattgcacttgacatggcaaagagtgtcaagaaaaaagatgatgaacttatgaagaggataaagcaggatccttatactgagtatgctgtaatagaatgctacgatacattattagatatcctttacagcattattgttgtacaaagtgataagaaagttgttgatagaatacgtgaaagcatcaaagatagcatccaccggaaatcactcgtgaaagaattccgattggatgaacttcctcaactaagtgctaagtttgataagttgctaaatctactgaaggaatatgatgagaacgatcctgtaaatagaaacacacatattgccaatctgttgcaggatataatggaaatcatcacacaggatattatgaaaaatggaaaaggtatcttgaaggacgagggccaaaaacaacaactgtttgcaaaattaaatctggattcattgaagcatgttgcttggagggagaagtgcattaggcttcaattgttgttgacaacaaaggaatctgccatatatgtaccaacgaacttggaagctcggcgtaggatcaccttttttgcaaactcactttttatgagaatgccaagggcaccacctgtccgtagcatgatgtccttcagtgttttaactccatacttcaaagaggaggtgctcttttcaccagaagatcttcataggaaaaatgaggatggtatatcaatactgttctacctacggaaaatatatccagatgaatttaggaacttccttcagcggatagattttgaagtgaaggatgaagaagaacttaaagataagatggatgagatctgtaattgggcgtcttataggggtcaaactctcaccagaacagtaagaggaatgatgtactacagaaaggcacttgaaatccaatgccttcaagatatgacagatcctgctaaagttgaccgagacagatcaataggatcctaccaagagttgcaatatgatattgaaatggcacaagctattgctgatatcaaattcacttatgttgtctcatgtcaagtttatggcatgcaaaagaaatcaaaggatttaaatgaaaaaaggcgctatcagaatatcctcaatctcatgataatgaacccatcactacgagttgctttcattgaggagatcgaaggtctaaccagaaatggagcaactgagaagacatattgttccgttcttgtcaaaggtggtgaaaagtatgatgaggaaatttaccgcataaagcttcctggcaatccaacagatattggagagggaaaacctgaaaaccaaaatcatgccataatcttcaccaggggagaagcacttcaggccattgatatgaatcaggataattatattgaggaggcgtttaaaatgagaaatgtgctggaggagtttgagagtagaaagtatgggaagagcaaacccactatattaggcttacgtgagcacatttttactggaagtgtttcgtcgctggcttggtttatgtccaatcaagagaccagttttgttactattgggcaaagagttctggcaaatcctctcaaggttcggttccattatggccacccagatatttttgatagactcttccatatcaccagaggaggcataagtaaagcttcaaagactataaatctgagtgaagatatattttcaggttttaattcaaccatgagaggaggaaatgttacacatcacgaatacatgcaagttggtaaggggcgtgatgtggggatgaatcagatttctagcttcgaagctaaggtggccaacggtaacggtgaacaaacattaagtcgtgacatttatcggcttggacgcagatttgacttctacagaatgttatctttctattttactacagttgggttctattttagtagcatggttactgtacttactgtctatgtgtttttatatgggaggctttatctggttatgagtggtctggaaaagtctattatgctggatccacgaaatcagcagaatgtcaaggctctcgaaaatgcactggcttcacagtctattttccagctaggtctgctgcttgtcctccctatggtcatggaagttggcttagagaaagggttccgcacagcattaggagagtttgtaatcatgcagcttcagttggcatctgtgttcttcacattccagcttggcaccaaaacccactactatgggagaacaatactccatggtggtgcaaaatacagaccaacaggtcgtggattcgttgtgtaccatgcaaagtttgctgaaaattaccgtatgtactcccgtagccactttgttaaaggactggaactcttgatacttttggttgtatatctagtctatggaagttcctatcgcagctcaaacatatacctatttgtcacctgctccatatggttccttgttgcttcatggctcttcgcgccatttatcttcaatccatcatgctttgaatggcagaagactgttgaggactggacagattggaggaagtggatggataacagagggggaattggcatgtctgtggaacaaagctgggaagcctggtgggtaactgagcaagatcacctcaggaagactagcatccgagcttttgtgttggaaatcatcctttcacttcgatttttgatctaccagtatggcattgtctaccatctgaacatagcagatcaccacaaaagcattatggtatatggagtatcatgggtggttatgctccttgttcttgtagtgctgaagatggtttcaatagggcggcagaaatttggaacagacctacagcttatgttccgcattctcaagggccttctcttccttggttttgtctctgtgatggcagtcctatttgtcgtcttacaccttactatttctgatgtcttcgctagtatccttggatacttgcctactggatggtgtcttcttctgaaaaagaaatgctctagtgtgctgaggctactgcagattggacaagcatgctcaccattgattaggaggaccctgctgtgggactccatcatggagctcggaaggtcatacgagaatataatgggtctcgtcctcttcctgccaattggtttcctgtcgtggttccccttcgtctctgaattccagacacggctgctgtttaaccaggcatttagccggggcctccagatctcaaggatccttgctggtcagaaggatgttagcgagttcgagttcaagtgaccaatttcatccctcttgcaagcaaaccaaactcactttcatgtatttgtttacgatgatcgattttgggtgtctgtactctagtatattttcatcacgtttactactataatactgtctgtacttgagaatgttttgcctctgtaaactgacatgtagaatttctgtaatatatttatggaatttgataacttccatccatgcactgaacgctttgaatggaccattattactaaaggggtaacaaatttatcattgtaaggtcaaacatgtttgggctggaagttttgctattcaatactccaaacatgtttgtaagtgttagatactcatttaaggtttggggttttctcactgtaattacctttgcacccatttgtaatgggtctagctcacttaactcaaatttattaatacaatgcacaaccctaatccaaggttagggtttctatacggtatagagctagg

SEQ ID NO: 37549 - DNA, 5331 bp, Zea Mays
aaatcataatcctggttgggtgtatattatatagaggagttagatggatcaagcccattacaatagtgaaagacagtgttgcgaatcaaagggagcacttgattttgctccttgcaaacattgacatgagacaacagggtactgccgatcatagtgagagacatgttcacatgatacgtagtagcacagtgatatatttgaggaacaaaattttccataattataactcctggtgtcgatacttacatctggagtcaaacattaggatccaaagggatgcccccacacaacagccagagcttctgtacataggactgtatttactgatatggggtgaagcttccaatgttcgcttcatgcctgaatgtctttgctacatctttcaccatatggcaagagatttacatgacataatatctgatacaagccaaggatcatttgagccaccgttccagggagaggggagtgacgatgcatttctgcagctagtgatccaacccatctatagtgttatgcagaaggaagctgcaaggagcaaacgtggtaaggtgagccactcattgtggagaaactacgacgacttgaatgaatatttttggtcaaaaaaatgcttcaaaaaacttggatggccgatggatccaacagctgacttttttgcagaacctaccagagccaagaatgaaactgagcaacatggtcacgtgattaggagaagaagggcatcaaaaacaaattttgttgaagttcgtacatttttgcatatgttcagaagttttgatcgtatgtgggccttctttatattggggttccaggccatggtaatcattgcctggagcccttctgggtcactttcttctatatttgaaccaaatgttttcaaaaatgtattgacaatctttataacagcggcatttctgaacttccttcaagccacgctagagttaattctcaactggaaagcttggaagagcctggagtgctcacaaaggataagatatatcctaaaatttgctgtagctgttgcctggttgataattcttcctactacgtactcaagctctattcaaaatcccacaggccttgtgaagtttctcagcaattggattcaaaatttgcagaatgaatcaatttataattatgctgttgccctttacatgttaccaaacatattcagtgccctgtttttcatgtttctaccaattcgacgggccttagagcgctcaaattctcgcattattaggttccttttatggtggacacagccaaagttatatgttgctcgaggcatgtatgaagacacttgctcacttcttaagtatactacgttctggatcctgctgcttatatgcaagctcgccttcagttattatgttgagattgctcctttagttgaacctaccaggataatcatgtcactggaaaggccgccttatgagtggcatgagttcttcccaaacttgcggcataatttaggtgttgtggttactgtatgggctccaattgtcatggtgtacttcatggacacacaaatatggtatgccattttctccacaatatgtggtggagtctatggtgcattcagccgcttgggtgagatacgaacccttgggatgttgagatcaagatttgaggcaattccaagagcatttggcaaaaaacttgtacctgatcatggcagtcacttgaaaggagatgaggaggacaaaaacccacccttcgataagtttgctgacatatggaatgcatttattaattcattgcgagaagaggacttactaaacaatagggagaaagatctattggttgttccttcatctggtggtcaaacaagtgtttttcagtggcctcctttccttcttgccagtaagattccaattgcacttgacatggcaaagagtgtcaagaaaaaagatgatgaacttatgaagaggataaagcaggatccttatactgagtatgctgtaatagaatgctacgatacattattagatatcctttacagcattattgttgtacaaagtgataagaaagttgttgatagaatacgtgaaagcatcaaagatagcatccaccggaaatcactcgtgaaagaattccgattggatgaacttcctcaactaagtgctaagtttgataagttgctaaatctactgaaggaatatgatgagaacgatcctgtaaatagaaacacacatattgccaatctgttgcaggatataatggaaatcatcacacaggatattatgaaaaatggaaaaggtatcttgaaggacgagggccaaaaacaacaactgtttgcaaaattaaatctggattcattgaagcatgttgcttggagggagaagtgcattaggcttcaattgttgttgacaacaaaggaatctgccatatatgtaccaacgaacttggaagctcggcgtaggatcaccttttttgcaaactcactttttatgagaatgccaagggcaccacctgtccgtagcatgatgtccttcagtgttttaactccatacttcaaagaggaggtgctcttttcaccagaagatcttcataggaaaaatgaggatggtatatcaatactgttctacctacggaaaatatatccagatgaatttaggaacttccttcagcggatagattttgaagtgaaggatgaagaagaacttaaagataagatggatgagatctgtaattgggcgtcttataggggtcaaactctcaccagaacagtaagaggaatgatgtactacagaaaggcacttgaaatccaatgccttcaagatatgacagatcctgctaaagttgaccgagacagatcaataggatcctaccaagagttgcaatatgatattgaaatggcacaagctattgctgatatcaaattcacttatgttgtctcatgtcaagtttatggcatgcaaaagaaatcaaaggatttaaatgaaaaaaggcgctatcagaatatcctcaatctcatgataatgaacccatcactacgagttgctttcattgaggagatcgaaggtctaaccagaaatggagcaactgagaagacatattgttccgttcttgtcaaaggtggtgaaaagtatgatgaggaaatttaccgcataaagcttcctggcaatccaacagatattggagagggaaaacctgaaaaccaaaatcatgccataatcttcaccaggggagaagcacttcaggccattgatatgaatcaggataattatattgaggaggcgtttaaaatgagaaatgtgctggaggagtttgagagtagaaagtatgggaagagcaaacccactatattaggcttacgtgagcacatttttactggaagtgtttcgtcgctggcttggtttatgtccaatcaagagaccagttttgttactattgggcaaagagttctggcaaatcctctcaaggttcggttccattatggccacccagatatttttgatagactcttccatatcaccagaggaggcataagtaaagcttcaaagactataaatctgagtgaagatatattttcaggttttaattcaaccatgagaggaggaaatgttacacatcacgaatacatgcaagttggtaaggggcgtgatgtggggatgaatcagatttctagcttcgaagctaaggtggccaacggtaacggtgaacaaacattaagtcgtgacatttatcggcttggacgcagatttgacttctacagaatgttatctttctattttactacagttgggttctattttagtagcatggttactgtacttactgtctatgtgtttttatatgggaggctttatctggttatgagtggtctggaaaagtctattatgctggatccacgaaatcagcagaatgtcaaggctctcgaaaatgcactggcttcacagtctattttccagctaggtctgctgcttgtcctccctatggtcatggaagttggcttagagaaagggttccgcacagcattaggagagtttgtaatcatgcagcttcagttggcatctgtgttcttcacattccagcttggcaccaaaacccactactatgggagaacaatactccatggtggtgcaaaatacagaccaacaggtcgtggattcgttgtgtaccatgcaaagtttgctgaaaattaccaagactgttgaggactggacagattggaggaagtggatggataacagagggggaattggcatgtctgtggaacaaagctgggaagcctggtgggtaactgagcaagatcacctcaggaagactagcatccgagcttttgtgttggaaatcatcctttcacttcgatttttgatctaccagtatggcattgtctaccatctgaacatagcagatcaccacaaaagcattatggtatatggagtatcatgggtggttatgctccttgttcttgtagtgctgaagatggtttcaatagggcggcagaaatttggaacagacctacagcttatgttccgcattctcaagggccttctcttccttggttttgtctctgtgatggcagtcctatttgtcgtcttacaccttactatttctgatgtcttcgctagtatccttggatacttgcctactggatggtgtcttcttctgattggacaagcatgctcaccattgattaggaggaccctgctgtgggactccatcatggagctcggaaggtcatacgagaatataatgggtctcgtcctcttcctgccaattggtttcctgtcgtggttccccttcgtctctgaattccagacacggctgctgtttaaccaggcatttagccggggcctccagatctcaaggatccttgctggtcagaaggatgttagcgagttcgagttcaagtgaccaatttcatccctcttgcaagcaaaccaaactcactttcatgtatttgtttacgatgatcgattttgggtgtctgtactctagtatattttcatcacgtttactactataatactgtctgtacttgagaatgttttgcctctgtaaactgacatgtagaatttctgtaatatatttatggaatttgataacttccatccatgcactgaacgctttgaatggaccattattactaaaggggtaacaaatttatcattgtaaggtcaaacatgtttgggctggaagttttgctattcaatactccaaacatgtttgtaagtgttagatactcatttaaggtttggggttttctcactgtaattacctttgcacccatttgtaatgggtctagctcacttaactcaaatttattaatacaatgcacaaccctaatccaaggttagggtttctatacggtatagagctagg

SEQ ID NO: 37550 - DNA, 6418 bp, Zea Mays
ctcccctctcttgcccaccttgcttcctcgccaccaccactttccccaccgctgcggcactagtcagtcagcaccagcaccttcgtcaccctgcgcttgtgcgcggcaacaccaacgcgcgccgtcgggatcggcggcaccgctggaaatggcgagcgccggcgccggcccgtcggggccggtgcggtccatatcccaaacggggcggtcgcggacgatggggcgtatgcccacgcgcgccttcaccatacgtccggacggatcctccggtgaggacggcgtcgatatcgtggaggaggagctcgtgccctcgtcgctcgcgcccattgtacccatcctccgcgccgccaacgagatcgaggaggagaacccgcgcgtcgcctacctatgtcgctttactgctttcgagaaggctcatcatatggaccaaaactcaagtggacgaggtgttcggcaattcaaaacatacctcttgcataggcttgaaaaggatgaacatgagacaaagcgcagtcttgctacaactgatgcaagggagatacagaagttctatgcgcagtactgcagaaaatatctagaacaagatcatgataagaggaaaccggaagagatggctagatactatcagattgcgtccgtcctatatgatgttatgaaaactgttacacctggcaaaaatgagtatgatgattatgctaaagatattgaaaacgaaaaagcatccttttcacagtacaatattctaccccttaatatttctgctcgagaacaaccaataatgaaaattcctgagatcaaagcagcagtgaagctccttgagcagataaatggccttccaatgccaaggattgaattaccacaaagctctgacagaaaaacagtgtccgacaaaatggacagacctgtggttaaggatttgcttgattggcttcggcaaacatttggatttcagaaagacagtgttgcgaatcaaagggagcacttgattttgctccttgcaaacattgacatgagacaacagggtactgccgatcatagtgagagacatgttcacatgatacgtagtagcacagtgatatatttgaggaacaaaattttccataattataactcctggtgtcgatacttacatctggagtcaaacattaggatccaaagggatgcccccacacaacagccagagcttctgtacataggactgtatttactgatatggggtgaagcttccaatgttcgcttcatgcctgaatgtctttgctacatctttcaccatgaagcatgtaagcaactagggagcattattgttaaacttcaggagagtcatcaacccaccacaattaagtacatggtttttgaggtgctgcaatgtcctgtggcgcaggggatggcaagagatttacatgacataatatctgatacaagccaaggatcatttgagccaccgttccagggagaggggagtgacgatgcatttctgcagctagtgatccaacccatctatagtgttatgcagaaggaagctgcaaggagcaaacgtggtaaggtgagccactcattgtggagaaactacgacgacttgaatgaatatttttggtcaaaaaaatgcttcaaaaaacttggatggccgatggatccaacagctgacttttttgcagaacctaccagagccaagaatgaaactgagcaacatggtcacgtgattaggagaagaagggcatcaaaaacaaattttgttgaagttcgtacatttttgcatatgttcagaagttttgatcgtatgtggcccttctgggtcactttcttctatatttgaaccaaatgttttcaaaaatgtattgacaatctttataacagcggcatttctgaacttccttcaagccacgctagagttaattctcaactggaaagcttggaagagcctggagtgctcacaaaggataagatatatcctaaaatttgctgtagctgttgcctggttgataattcttcctactacgtactcaagctctattcaaaatcccacaggccttgtgaagtttctcagcaattggattcaaaatttgcagaatgaatcaatttataattatgctgttgccctttacatgttaccaaacatattcagtgccctgtttttcatgtttctaccaattcgacgggccttagagcgctcaaattctcgcattattaggttccttttatggtggacacagccaaagttatatgttgctcgaggcatgtatgaagacacttgctcacttcttaagtatactacgttctggatcctgctgcttatatgcaagctcgccttcagttattatgttgagattgctcctttagttgaacctaccaggataatcatgtcactggaaaggccgccttatgagtggcatgagttcttcccaaacttgcggcataatttaggtgttgtggttactgtatgggctccaattgtcatggtgtacttcatggacacacaaatatggtatgccattttctccacaatatgtggtggagtctatggtgcattcagccgcttgggtgagatacgaacccttgggatgttgagatcaagatttgaggcaattccaagagcatttggcaaaaaacttgtacctgatcatggcagtcacttgaaaggagatgaggaggacaaaaacccacccttcgataagtttgctgacatatggaatgcatttattaattcattgcgagaagaggacttactaaacaatagggagaaagatctattggttgttccttcatctggtggtcaaacaagtgtttttcagtggcctcctttccttcttgccagtaagattccaattgcacttgacatggcaaagagtgtcaagaaaaaagatgatgaacttatgaagaggataaagcaggatccttatactgagtatgctgtaatagaatgctacgatacattattagatatcctttacagcattattgttgtacaaagtgataagaaagttgttgatagaatacgtgaaagcatcaaagatagcatccaccggaaatcactcgtgaaagaattccgattggatgaacttcctcaactaagtgctaagtttgataagttgctaaatctactgaaggaatatgatgagaacgatcctgtaaatagaaacacacatattgccaatctgttgcaggatataatggaaatcatcacacaggatattatgaaaaatggaaaaggtatcttgaaggacgagggccaaaaacaacaactgtttgcaaaattaaatctggattcattgaagcatgttgcttggagggagaagtgcattaggcttcaattgttgttgacaacaaaggaatctgccatatatgtaccaacgaacttggaagctcggcgtaggatcaccttttttgcaaactcactttttatgagaatgccaagggcaccacctgtccgtagcatgatgtccttcagtgttttaactccatacttcaaagaggaggtgctcttttcaccagaagatcttcataggaaaaatgaggatggtatatcaatactgttctacctacggaaaatatatccagatgaatttaggaacttccttcagcggatagattttgaagtgaaggatgaagaagaacttaaagataagatggatgagatctgtaattgggcgtcttataggggtcaaactctcaccagaacagtaagaggaatgatgtactacagaaaggcacttgaaatccaatgccttcaagatatgacagatcctgctaaagttgaccgagacagatcaataggatcctaccaagagttgcaatatgatattgaaatggcacaagctattgctgatatcaaattcacttatgttgtctcatgtcaagtttatggcatgcaaaagaaatcaaaggatttaaatgaaaaaaggcgctatcagaatatcctcaatctcatgataatgaacccatcactacgagttgctttcattgaggagatcgaaggtctaaccagaaatggagcaactgagaagacatattgttccgttcttgtcaaaggtggtgaaaagtatgatgaggaaatttaccgcataaagcttcctggcaatccaacagatattggagagggaaaacctgaaaaccaaaatcatgccataatcttcaccaggggagaagcacttcaggccattgatatgaatcaggataattatattgaggaggcgtttaaaatgagaaatgtgctggaggagtttgagagtagaaagtatgggaagagcaaacccactatattaggcttacgtgagcacatttttactggaagtgtttcgtcgctggcttggtttatgtccaatcaagagaccagttttgttactattgggcaaagagttctggcaaatcctctcaaggttcggttccattatggccacccagatatttttgatagactcttccatatcaccagaggaggcataagtaaagcttcaaagactataaatctgagtgaagatatattttcaggttttaattcaaccatgagaggaggaaatgttacacatcacgaatacatgcaagttggtaaggggcgtgatgtggggatgaatcagatttctagcttcgaagctaaggtggccaacgatttgacttctacagaatgttatctttctattttactacagttgggttctattttagtagcatggttactgtacttactgtctatgtgtttttatatgggaggctttatctggttatgagtggtctggaaaagtctattatgctggatccacgaaatcagcagaatgtcaaggctctcgaaaatgcactggcttcacagtctattttccagctaggtctgctgcttgtcctccctatggtcatggaagttggcttagagaaagggttccgcacagcattaggagagtttgtaatcatgcagcttcagttggcatctgtgttcttcacattccagcttggcaccaaaacccactactatgggagaacaatactccatggtggtgcaaaatacagaccaacaggtcgtggattcgttgtgtaccatgcaaagtttgctgaaaattaccgtatgtactcccgtagccactttgttaaaggactggaactcttgatacttttggttgtatatctagtctatggaagttcctatcgcagctcaaacatatacctatttgtcacctgctccatatggttccttgttgcttcatggctcttcgcgccatttatcttcaatccatcatgctttgaatggcagaagactgttgaggactggacagattggaggaagtggatggataacagagggggaattggcatgtctgtggaacaaagctgggaagcctggtgggtaactgagcaagatcacctcaggaagactagcatccgagcttttgtgttggaaatcatcctttcacttcgatttttgatctaccagtatggcattgtctaccatctgaacatagcagatcaccacaaaagcattatggtatatggagtatcatgggtggttatgctccttgttcttgtagtgctgaagatggtttcaatagggcggcagaaatttggaacagacctacagcttatgttccgcattctcaagggccttctcttccttggttttgtctctgtgatggcagtcctatttgtcgtcttacaccttactatttctgatgtcttcgctagtatccttggatacttgcctactggatggtgtcttcttctgattggacaagcatgctcaccattgattaggaggaccctgctgtgggactccatcatggagctcggaaggtcatacgagaatataatgggtctcgtcctcttcctgccaattggtttcctgtcgtggttccccttcgtctctgaattccagacacggctgctgtttaaccaggcatttagccggggcctccagatctcaaggatccttgctggtcagaaggatgttagcgagttcgagttcaagtgaccaatttcatccctcttgcaagcaaaccaaactcactttcatgtatttgtttacgatgatcgattttgggtgtctgtactctagtatattttcatcacgtttactactataatactgtctgtacttgagaatgttttgcctctgtaaactgacatgtagaatttctgtaatatatttatggaatttgataacttccatccatgcactgaacgctttgaatggaccattattactaaaggggtaacaaatttatcattgtaaggtcaaacatgtttgggctggaagttttgctattcaatactccaaacatgtttgtaagtgttagatactcatttaaggtttggggttttctcactgtaattacctttgcacccatttgtaatgggtctagctcacttaactcaaatttattaatacaatgcacaaccctaatccaaggttagggtttctatacggtatagagctagg

SEQ ID NO: 37551 - DNA, 6393 bp, Zea Mays
ctcccctctcttgcccaccttgcttcctcgccaccaccactttccccaccgctgcggcactagtcagtcagcaccagcaccttcgtcaccctgcgcttgtgcgcggcaacaccaacgcgcgccgtcgggatcggcggcaccgctggaaatggcgagcgccggcgccggcccgtcggggccggtgcggtccatatcccaaacggggcggtcgcggacgatggggcgtatgcccacgcgcgccttcaccatacgtccggacggatcctccggtgaggacggcgtcgatatcgtggaggaggagctcgtgccctcgtcgctcgcgcccattgtacccatcctccgcgccgccaacgagatcgaggaggagaacccgcgcgtcgcctacctatgtcgctttactgctttcgagaaggctcatcatatggaccaaaactcaagtggacgaggtgttcggcaattcaaaacatacctcttgcataggcttgaaaaggatgaacatgagacaaagcgcagtcttgctacaactgatgcaagggagatacagaagttctatgcgcagtactgcagaaaatatctagaacaagatcatgataagaggaaaccggaagagatggctagatactatcagattgcgtccgtcctatatgatgttatgaaaactgttacacctggcaaaaatgagtatgatgattatgctaaagatattgaaaacgaaaaagcatccttttcacagtacaatattctaccccttaatatttctgctcgagaacaaccaataatgaaaattcctgagatcaaagcagcagtgaagctccttgagcagataaatggccttccaatgccaaggattgaattaccacaaagctctgacagaaaaacagtgtccgacaaaatggacagacctgtggttaaggatttgcttgattggcttcggcaaacatttggatttcagaaagacagtgttgcgaatcaaagggagcacttgattttgctccttgcaaacattgacatgagacaacagggtactgccgatcatagtgagagacatgttcacatgatacgtagtagcacagtgatatatttgaggaacaaaattttccataattataactcctggtgtcgatacttacatctggagtcaaacattaggatccaaagggatgcccccacacaacagccagagcttctgtacataggactgtatttactgatatggggtgaagcttccaatgttcgcttcatgcctgaatgtctttgctacatctttcaccatgaagcatgtaagcaactagggagcattattgttaaacttcaggagagtcatcaacccaccacaattaagtacatggtttttgaggtgctgcaatgtcctgtggcgcaggggatggcaagagatttacatgacataatatctgatacaagccaaggatcatttgagccaccgttccagggagaggggagtgacgatgcatttctgcagctagtgatccaacccatctatagtgttatgcagaaggaagctgcaaggagcaaacgtggtaaggtgagccactcattgtggagaaactacgacgacttgaatgaatatttttggtcaaaaaaatgcttcaaaaaacttggatggccgatggatccaacagctgacttttttgcagaacctaccagagccaagaatgaaactgagcaacatggtcacgtgattaggagaagaagggcatcaaaaacaaattttgttgaagttcgtacatttttgcatatgttcagaagttttgatcgtatgtgggccttctttatattggggttccaggccatggtaatcattgcctggagcccttctgggtcactttcttctatatttgaaccaaatgttttcaaaaatgtattgacaatctttataacagcggcatttctgaacttccttcaagccacgctagagttaattctcaactggaaagcttggaagagcctggagtgctcacaaaggataagatatatcctaaaatttgctgtagctgttgcctggttgataattcttcctactacgtactcaagctctattcaaaatcccacaggccttgtgaagtttctcagcaattggattcaaaatttgcagaatgaatcaatttataattatgctgttgccctttacatgttaccaaacatattcagtgccctgtttttcatgtttctaccaattcgacgggccttagagcgctcaaattctcgcattattaggttccttttatggtggacacagccaaagttatatgttgctcgaggcatgtatgaagacacttgctcacttcttaagtatactacgttctggatcctgctgcttatatgcaagctcgccttcagttattatgttgagattgctcctttagttgaacctaccaggataatcatgtcactggaaaggccgccttatgagtggcatgagttcttcccaaacttgcggcataatttaggtgttgtggttactgtatgggctccaattgtcatggtgtacttcatggacacacaaatatggtatgccattttctccacaatatgtggtggagtctatggtgcattcagccgcttgggtgagatacgaacccttgggatgttgagatcaagatttgaggcaattccaagagcatttggcaaaaaacttgtacctgatcatggcagtcacttgaaaggagatgaggaggacaaaaacccacccttcgataagtttgctgacatatggaatgcatttattaattcattgcgagaagaggacttactaaacaatagggagaaagatctattggttgttccttcatctggtggtcaaacaagtgtttttcagtggcctcctttccttcttgccagtaagattccaattgcacttgacatggcaaagagtgtcaagaaaaaagatgatgaacttatgaagaggataaagcaggatccttatactgagtatgctgtaatagaatgctacgatacattattagatatcctttacagcattattgttgtacaaagtgataagaaagttgttgatagaatacgtgaaagcatcaaagatagcatccaccggaaatcactcgtgaaagaattccgattggatgaacttcctcaactaagtgctaagtttgataagttgctaaatctactgaaggaatatgatgagaacgatcctgtaaatagaaacacacatattgccaatctgttgcaggatataatggaaatcatcacacaggatattatgaaaaatggaaaaggtatcttgaaggacgagggccaaaaacaacaactgtttgcaaaattaaatctggattcattgaagcatgttgcttggagggagaaggcttcaattgttgttgacaacaaaggaatctgccatatatgtaccaacgaacttggaagctcggcgtaggatcaccttttttgcaaactcactttttatgagaatgccaagggcaccacctgtccgtagcatgatgtccttcagtgttttaactccatacttcaaagaggaggtgctcttttcaccagaagatcttcataggaaaaatgaggatggtatatcaatactgttctacctacggaaaatatatccagatgaatttaggaacttccttcagcggatagattttgaagtgaaggatgaagaagaacttaaagataagatggatgagatctgtaattgggcgtcttataggggtcaaactctcaccagaacagtaagaggaatgatgtactacagaaaggcacttgaaatccaatgccttcaagatatgacagatcctgctaaagttgaccgagacagatcaataggatcctaccaagagttgcaatatgatattgaaatggcacaagctattgctgatatcaaattcacttatgttgtctcatgtcaagtttatggcatgcaaaagaaatcaaaggatttaaatgaaaaaaggcgctatcagaatatcctcaatctcatgataatgaacccatcactacgagttgctttcattgaggagatcgaaggtctaaccagaaatggagcaactgagaagacatattgttccgttcttgtcaaaggtggtgaaaagtatgatgaggaaatttaccgcataaagcttcctggcaatccaacagatattggagagggaaaacctgaaaaccaaaatcatgccataatcttcaccaggggagaagcacttcaggccattgatatgaatcaggataattatattgaggaggcgtttaaaatgagaaatgtgctggaggagtttgagagtagaaagtatgggaagagcaaacccactatattaggcttacgtgagcacatttttactggaagtgtttcgtcgctggcttggtttatgtccaatcaagagaccagttttgttactattgggcaaagagttctggcaaatcctctcaaggttcggttccattatggccacccagatatttttgatagactcttccatatcaccagaggaggcataagtaaagcttcaaagactataaatctgagtgaagatatattttcaggttttaattcaaccatgagaggaggaaatgttacacatcacgaatacatgcaagttggtaaggggcgtgatgtggggatgaatcagatttctagcttcgaagctaaggtggccaacggttactgtacttactgtctatgtgtttttatatgggaggctttatctggttatgagtggtctggaaaagtctattatgctggatccacgaaatcagcagaatgtcaaggctctcgaaaatgcactggcttcacagtctattttccagctaggtctgctgcttgtcctccctatggtcatggaagttggcttagagaaagggttccgcacagcattaggagagtttgtaatcatgcagcttcagttggcatctgtgttcttcacattccagcttggcaccaaaacccactactatgggagaacaatactccatggtggtgcaaaatacagaccaacaggtcgtggattcgttgtgtaccatgcaaagtttgctgaaaattaccgtatgtactcccgtagccactttgttaaaggactggaactcttgatacttttggttgtatatctagtctatggaagttcctatcgcagctcaaacatatacctatttgtcacctgctccatatggttccttgttgcttcatggctcttcgcgccatttatcttcaatccatcatgctttgaatggcagaagactgttgaggactggacagattggaggaagtggatggataacagagggggaattggcatgtctgtggaacaaagctgggaagcctggtgggtaactgagcaagatcacctcaggaagactagcatccgagcttttgtgttggaaatcatcctttcacttcgatttttgatctaccagtatggcattgtctaccatctgaacatagcagatcaccacaaaagcattatggtatatggagtatcatgggtggttatgctccttgttcttgtagtgctgaagatggtttcaatagggcggcagaaatttggaacagacctacagcttatgttccgcattctcaagggccttctcttccttggttttgtctctgtgatggcagtcctatttgtcgtcttacaccttactatttctgatgtcttcgctagtatccttggatacttgcctactggatggtgtcttcttctgattggacaagcatgctcaccattgattaggaggaccctgctgtgggactccatcatggagctcggaaggtcatacgagaatataatgggtctcgtcctcttcctgccaattggtttcctgtcgtggttccccttcgtctctgaattccagacacggctgctgtttaaccaggcatttagccggggcctccagatctcaaggatccttgctggtcagaaggatgttagcgagttcgagttcaagtgaccaatttcatccctcttgcaagcaaaccaaactcactttcatgtatttgtttacgatgatcgattttgggtgtctgtactctagtatattttcatcacgtttactactataatactgtctgtacttgagaatgttttgcctctgtaaactgacatgtagaatttctgtaatatatttatggaatttgataacttccatccatgcactgaacgctttgaatggaccattattactaaaggggtaacaaatttatcattgtaaggtcaaacatgtttgggctggaagttttgctattcaatactccaaacatgtttgtaagtgttagatactcatttaaggtttggggttttctcactgtaattacctttgcacccatttgtaatgggtctagctcacttaactcaaatttattaatacaatgcacaaccctaatccaaggttagggtttctatacggtatagagctagg

SEQ ID NO: 37552 - DNA, 6550 bp, Zea Mays
ctcccctctcttgcccaccttgcttcctcgccaccaccactttccccaccgctgcggcactagtcagtcagcaccagcaccttcgtcaccctgcgcttgtgcgcggcaacaccaacgcgcgccgtcgggatcggcggcaccgctggaaatggcgagcgccggcgccggcccgtcggggccggtgcggtccatatcccaaacggggcggtcgcggacgatggggcgtatgcccacgcgcgccttcaccatacgtccggacggatcctccggtgaggacggcgtcgatatcgtggaggaggagctcgtgccctcgtcgctcgcgcccattgtacccatcctccgcgccgccaacgagatcgaggaggagaacccgcgcgtcgcctacctatgtcgctttactgctttcgagaaggctcatcatatggaccaaaactcaagtggacgaggtgttcggcaattcaaaacatacctcttgcataggcttgaaaaggatgaacatgagacaaagcgcagtcttgctacaactgatgcaagggagatacagaagttctatgcgcagtactgcagaaaatatctagaacaagatcatgataagaggaaaccggaagagatggctagatactatcagattgcgtccgtcctatatgatgttatgaaaactgttacacctggcaaaaatgagtatgatgattatgctaaagatattgaaaacgaaaaagcatccttttcacagtacaatattctaccccttaatatttctgctcgagaacaaccaataatgaaaattcctgagatcaaagcagcagtgaagctccttgagcagataaatggccttccaatgccaaggattgaattaccacaaagctctgacagaaaaacagtgtccgacaaaatggacagacctgtggttaaggatttgcttgattggcttcggcaaacatttggatttcagaaagacagtgttgcgaatcaaagggagcacttgattttgctccttgcaaacattgacatgagacaacagggtactgccgatcatagtgagagacatgttcacatgatacgtagtagcacagtgatatatttgaggaacaaaattttccataattataactcctggtgtcgatacttacatctggagtcaaacattaggatccaaagggatgcccccacacaacagccagagcttctgtacataggactgtatttactgatatggggtgaagcttccaatgttcgcttcatgcctgaatgtctttgctacatctttcaccatgaagcatgtaagcaactagggagcattattgttaaacttcaggagagtcatcaacccaccacaattaagtacatggtttttgaggtgctgcaatgtcctgtggcgcaggggatggcaagagatttacatgacataatatctgatacaagccaaggatcatttgagccaccgttccagggagaggggagtgacgatgcatttctgcagctagtgatccaacccatctatagtgttatgcagaaggaagctgcaaggagcaaacgtggtaaggtgagccactcattgtggagaaactacgacgacttgaatgaatatttttggtcaaaaaaatgcttcaaaaaacttggatggccgatggatccaacagctgacttttttgcagaacctaccagagccaagaatgaaactgagcaacatggtcacgtgattaggagaagaagggcatcaaaaacaaattttgttgaagttcgtacatttttgcatatgttcagaagttttgatcgtatgtgggccttctttatattggggttccaggccatggtaatcattgcctggagcccttctgggtcactttcttctatatttgaaccaaatgttttcaaaaatgtattgacaatctttataacagcggcatttctgaacttccttcaagccacgctagagttaattctcaactggaaagcttggaagagcctggagtgctcacaaaggataagatatatcctaaaatttgctgtagctgttgcctggttgataattcttcctactacgtactcaagctctattcaaaatcccacaggccttgtgaagtttctcagcaattggattcaaaatttgcagaatgaatcaatttataattatgctgttgccctttacatgttaccaaacatattcagtgccctgtttttcatgtttctaccaattcgacgggccttagagcgctcaaattctcgcattattaggttccttttatggtggacacagccaaagttatatgttgctcgaggcatgtatgaagacacttgctcacttcttaagtaaactacgttctggatcctgctgcttatatgcaagctcgccttcagttattatgttgagattgctcctttagttgaacctaccaggataatcatgtcactggaaaggccgccttatgagtggcatgagttcttcccaaacttgcggcataatttaggtgttgtggttactgtatgggctccaattgtcatggtgtacttcatggacacacaaatatggtatgccattttctccacaatatgtggtggagtctatggtgcattcagccgcttgggtgagatacgaacccttgggatgttgagatcaagatttgaggcaattccaagagcatttggcaaaaaacttgtacctgatcatggcagtcacttgaaaggagatgaggaggacaaaaacccacccttcgataagtttgctgacatatggaatgcatttattaattcattgcgagaagaggacttactaaacaatagggagaaagatctattggttgttccttcatctggtggtcaaacaagtgtttttcagtggcctcctttccttcttgccagtaagattccaattgcacttgacatggcaaagagtgtcaagaaaaaagatgatgaacttatgaagaggataaagcaggatccttatactgagtatgctgtaatagaatgctacgatacattattagatatcctttacagcattattgttgtacaaagtgataagaaagttgttgatagaatacgtgaaagcatcaaagatagcatccaccggaaatcactcgtgaaagaattccgattggatgaacttcctcaactaagtgctaagtttgataagttgctaaatctactgaaggaatatgatgagaacgatcctgtaaatagaaacacacatattgccaatctgttgcaggatataatggaaatcatcacacaggatattatgaaaaatggaaaaggtatcttgaaggacgagggccaaaaacaacaactgtttgcaaaattaaatctggattcattgaagcatgttgcttggagggagaagtgcattaggcttcaattgttgttgacaacaaaggaatctgccatatatgtaccaacgaacttggaagctcggcgtaggatcaccttttttgcaaactcactttttatgagaatgccaagggcaccacctgtccgtagcatgatgtccttcagtgttttaactccatacttcaaagaggaggtgctcttttcaccagaagatcttcataggaaaaatgaggatggtatatcaatactgttctacctacggaaaatatatccagatgaatttaggaacttccttcagcggatagattttgaagtgaaggatgaagaagaacttaaagataagatggatgagatctgtaattgggcgtcttataggggtcaaactctcaccagaacagtaagaggaatgatgtactacagaaaggcacttgaaatccaatgccttcaagatatgacagatcctgctaaagttgaccgagacagatcaataggatcctaccaagagttgcaatatgatattgaaatggcacaagctattgctgatatcaaattcacttatgttgtctcatgtcaagtttatggcatgcaaaagaaatcaaaggatttaaatgaaaaaaggcgctatcagaatatcctcaatctcatgataatgaacccatcactacgagttgctttcattgaggagatcgaaggtctaaccagaaatggagcaactgagaagacatattgttccgttcttgtcaaaggtggtgaaaagtatgatgaggaaatttaccgcataaagcttcctggcaatccaacagatattggagagggaaaacctgaaaaccaaaatcatgccataatcttcaccaggggagaagcacttcaggccattgatatgaatcaggataattatattgaggaggcgtttaaaatgagaaatgtgctggaggagtttgagagtagaaagtatgggaagagcaaacccactatattaggcttacgtgagcacatttttactggaagtgtttcgtcgctggcttggtttatgtccaatcaagagaccagttttgttactattgggcaaagagttctggcaaatcctctcaaggttcggttccattatggccacccagatatttttgatagactcttccatatcaccagaggaggcataagtaaagcttcaaagactataaatctgagtgaagatatattttcaggttttaattcaaccatgagaggaggaaatgttacacatcacgaatacatgcaagttggtaaggggcgtgatgtggggatgaatcagatttctagcttcgaagctaaggtggccaacggtaacggtgaacaaacattaagtcgtgacatttatcggcttggacgcagatttgacttctacagaatgttatctttctattttactacagttgggttctattttagtagcatggttactgtacttactgtctatgtgtttttatatgggaggctttatctggttatgagtggtctggaaaagtctattatgctggatccacgaaatcagcagaatgtcaaggctctcgaaaatgcactggcttcacagtctattttccagctaggtctgctgcttgtcctccctatggtcatggaagttggcttagagaaagggttccgcacagcattaggagagtttgtaatcatgcagcttcagttggcatctgtgttcttcacattccagcttggcaccaaaacccactactatgggagaacaatactccatggtggtgcaaaatacagaccaacaggtcgtggattcgttgtgtaccatgcaaagtttgctgaaaattaccgtatgtactcccgtagccactttgttaaaggactggaactcttgatacttttggttgtatatctagtctatggaagttcctatcgcagctcaaacatatacctatttgtcacctgctccatatggttccttgttgcttcatggctcttcgcgccatttatcttcaatccatcatgctttgaatggcagaagactgttgaggactggacagattggaggaagtggatggataacagagggggaattggcatgtctgtggaacaaagctgggaagcctggtgggtaactgagcaagatcacctcaggaagactagcatccgagcttttgtgttggaaatcatcctttcacttcgatttttgatctaccagtatggcattgtctaccatctgaacatagcagatcaccacaaaagcattatggtatatggagtatcatgggtggttatgctccttgttcttgtagtgctgaagatggtttcaatagggcggcagaaatttggaacagacctacagcttatgttccgcattctcaagggccttctcttccttggttttgtctctgtgatggcagtcctatttgtcgtcttacaccttactatttctgatgtcttcgctagtatccttggatacttgcctactggatggtgtcttcttctgaaaaagaaatgctctagtgtgctgaggctactgcagattggacaagcatgctcaccattgattaggaggaccctgctgtgggactccatcatggagctcggaaggtcatacgagaatataatgggtctcgtcctcttcctgccaattggtttcctgtcgtggttccccttcgtctctgaattccagacacggctgctgtttaaccaggcatttagccggggcctccagatctcaaggatccttgctggtcagaaggatgttagcgagttcgagttcaagtgaccaatttcatccctcttgcaagcaaaccaaactcactttcatgtatttgtttacgatgatcgattttgggtgtctgtactctagtatattttcatcacgtttactactataatactgtctgtacttgagaatgttttgcctctgtaaactgacatgtagaatttctgtaatatatttatggaatttgataacttccatccatgcactgaacgctttgaatggaccattattactaaaggggtaacaaatttatcattgtaaggtcaaacatgtttgggctggaagttttgctattcaatactccaaacatgtttgtaagtgttagatactcatttaaggtttggggttttctcactgtaattacctttgcacccatttgtaatgggtctagctcacttaactcaaatttattaatacaatgcacaaccctaatccaaggttagggtttctatacggtatagagctagg

SEQ ID NO: 37553 - DNA, 6114 bp, Zea Mays
gcgcccaaagccacaaagcgaaaaagcgcgctccacactcagcaccaccactgccgcccgcctcgagccctcctcctgcctggctgcctccctcttaaaacgaagatgccttccccagctcccctctcttgcccaccttgcttcctcgccaccaccactttccccaccgctgcggcactagtcagtcagcaccagcaccttcgtcaccctgcgcttgtgcgcggcaacaccaacgcgcgccgtcgggatcggcggcaccgctggaaatggcgagcgccggcgccggcccgtcggggccggtgcggtccatatcccaaacggggcggtcgcggacgatggggcgtatgcccacgcgcgccttcaccatacgtccggacggatcctccggtgaggacggcgtcgatatcgtggaggaggagctcgtgccctcgtcgctcgcgcccattgtacccatcctccgcgccgccaacgagatcgaggaggagaacccgcgcgtcgcctacctatgtcgctttactgctttcgagaaggctcatcatatggaccaaaactcaagtggacgaggtgttcggcaattcaaaacatacctcttgcataggcttgaaaaggatgaacatgagacaaagcgcagtcttgctacaactgatgcaagggagatacagaagttctatgcgcagtactgcagaaaatatctagaacaagatcatgataagaggaaaccggaagagatggctagatactatcagattgcgtccgtcctatatgatgttatgaaaactgttacacctggcaaaaatgagtatgatgattatgctaaagatattgaaaacgaaaaagcatccttttcacagtacaatattctaccccttaatatttctgctcgagaacaaccaataatgaaaattcctgagatcaaagcagcagtgaagctccttgagcagataaatggccttccaatgccaaggattgaattaccacaaagctctgacagaaaaacagtgtccgacaaaatggacagacctgtggttaaggatttgcttgattggcttcggcaaacatttggatttcagaaagacagtgttgcgaatcaaagggagcacttgattttgctccttgcaaacattgacatgagacaacagggtactgccgatcatagtgagagacatgttcacatgatacgtagtagcacagtgatatatttgaggaacaaaattttccataattataactcctggtgtcgatacttacatctggagtcaaacattaggatccaaagggatgcccccacacaacagccagagcttctgtacataggactgtatttactgatatggggtgaagcttccaatgttcgcttcatgcctgaatgtctttgctacatctttcaccatatggcaagagatttacatgacataatatctgatacaagccaaggatcatttgagccaccgttccagggagaggggagtgacgatgcatttctgcagctagtgatccaacccatctatagtgttatgcagaaggaagctgcaaggagcaaacgtggtaaggtgagccactcattgtggagaaactacgacgacttgaatgaatatttttggtcaaaaaaatgcttcaaaaaacttggatggccgatggatccaacagctgacttttttgcagaacctaccagagccaagaatgaaactgagcaacatggtcacgtgattaggagaagaagggcatcaaaaacaaattttgttgaagttcgtacatttttgcatatgttcagaagttttgatcgtatgtgggccttctttatattggggttccaggccatggtaatcattgcctggagcccttctgggtcactttcttctatatttgaaccaaatgttttcaaaaatgtattgacaatctttataacagcggcatttctgaacttccttcaagccacgctagagttaattctcaactggaaagcttggaagagcctggagtgctcacaaaggataagatatattcagtgccctgtttttcatgtttctaccaattcgacgggccttagagcgctcaaattctcgcattattaggttccttttatggtggacacagccaaagttatatgttgctcgaggcatgtatgaagacacttgctcacttcttaagtatactacgttctggatcctgctgcttatatgcaagctcgccttcagttattatgttgagattgctcctttagttgaacctaccaggataatcatgtcactggaaaggccgccttatgagtggcatgagttcttcccaaacttgcggcataatttaggtgttgtggttactgtatgggctccaattgtcatggtgtacttcatggacacacaaatatggtatgccattttctccacaatatgtggtggagtctatggtgcattcagccgcttgggtgagatacgaacccttgggatgttgagatcaagatttgaggcaattccaagagcatttggcaaaaaacttgtacctgatcatggcagtcacttgaaaggagatgaggaggacaaaaacccacccttcgataagtttgctgacatatggaatgcatttattaattcattgcgagaagaggacttactaaacaatagggagaaagatctattggttgttccttcatctggtggtcaaacaagtgtttttcagtggcctcctttccttcttgccagtaagattccaattgcacttgacatggcaaagagtgtcaagaaaaaagatgatgaacttatgaagaggataaagcaggatccttatactgagtatgctgtaatagaatgctacgatacattattagatatcctttacagcattattgttgtacaaagtgataagaaagttgttgatagaatacgtgaaagcatcaaagatagcatccaccggaaatcactcgtgaaagaattccgattggatgaacttcctcaactaagtgctaagtttgataagttgctaaatctactgaaggaatatgatgagaacgatcctgtaaatagaaacacacatattgccaatctgttgcaggatataatggaaatcatcacacaggatattatgaaaaatggaaaaggtatcttgaaggacgagggccaaaaacaacaactgtttgcaaaattaaatctggattcattgaagcatgttgcttggagggagaagtgcattaggcttcaattgttgttgacaacaaaggaatctgccatatatgtaccaacgaacttggaagctcggcgtaggatcaccttttttgcaaactcactttttatgagaatgccaagggcaccacctgtccgtagcatgatgtccttcagtgttttaactccatacttcaaagaggaggtgctcttttcaccagaagatcttcataggaaaaatgaggatggtatatcaatactgttctacctacggaaaatatatccagatgaatttaggaacttccttcagcggatagattttgaagtgaaggatgaagaagaacttaaagataagatggatgagatctgtaattgggcgtcttataggggtcaaactctcaccagaacagtaagaggaatgatgtactacagaaaggcacttgaaatccaatgccttcaagatatgacagatcctgctaaagttgaccgagacagatcaataggatcctaccaagagttgcaatatgatattgaaatggcacaagctattgctgatatcaaattcacttatgttgtctcatgtcaagtttatggcatgcaaaagaaatcaaaggatttaaatgaaaaaaggcgctatcagaatatcctcaatctcatgataatgaacccatcactacgagttgctttcattgaggagatcgaaggtctaaccagaaatggagcaactgagaagacatattgttccgttcttgtcaaaggtggtgaaaagtatgatgaggaaatttaccgcataaagcttcctggcaatccaacagatattggagagggaaaacctgaaaaccaaaatcatgccataatcttcaccaggggagaagcacttcaggccattgatatgaatcaggataattatattgaggaggcgtttaaaatgagaaatgtgctggaggagtttgagagtagaaagtatgggaagagcaaacccactatattaggcttacgtgagcacatttttactggaagtgtttcgtcgctggcttggtttatgtccaatcaagagaccagttttgttactattgggcaaagagttctggcaaatcctctcaaggttcggttccattatggccacccagatatttttgatagactcttccatatcaccagaggaggcataagtaaagcttcaaagactataaatctgagtgaagatatattttcaggttttaattcaaccatgagaggaggaaatgttacacatcacgaatacatgcaagttggtaaggggcgtgatgtggggatgaatcagatttctagcttcgaagctaaggtggccaacgatttgacttctacagaatgttatctttctattttactacagttgggttctattttagtagcatggttactgtacttactgtctatgtgtttttatatgggaggctttatctggttatgagtggtctggaaaagtctattatgctggatccacgaaatcagcagaatgtcaaggctctcgaaaatgcactggcttcacagtctattttccagctaggtctgctgcttgtcctccctatggtcatggaagttggcttagagaaagggttccgcacagcattaggagagtttgtaatcatgcagcttcagttggcatctgtgttcttcacattccagcttggcaccaaaacccactactatgggagaacaatactccatggtggtgcaaaatacagaccaacaggtcgtggattcgttgtgtaccatgcaaagtttgctgaaaattaccaagactgttgaggactggacagattggaggaagtggatggataacagagggggaattggcatgtctgtggaacaaagctgggaagcctggtgggtaactgagcaagatcacctcaggaagactagcatccgagcttttgtgttggaaatcatcctttcacttcgatttttgatctaccagtatggcattgtctaccatctgaacatagcagatcaccacaaaagcattatggtatatggagtatcatgggtggttatgctccttgttcttgtagtgctgaagatggtttcaatagggcggcagaaatttggaacagacctacagcttatgttccgcattctcaagggccttctcttccttggttttgtctctgtgatggcagtcctatttgtcgtcttacaccttactatttctgatgtcttcgctagtatccttggatacttgcctactggatggtgtcttcttctgattggacaagcatgctcaccattgattaggaggaccctgctgtgggactccatcatggagctcggaaggtcatacgagaatataatgggtctcgtcctcttcctgccaattggtttcctgtcgtggttccccttcgtctctgaattccagacacggctgctgtttaaccaggcatttagccggggcctccagatctcaaggatccttgctggtcagaaggatgttagcgagttcgagttcaagtgaccaatttcatccctcttgcaagcaaaccaaactcactttcatgtatttgtttacgatgatcgattttgggtgtctgtactctagtatattttcatcacgtttactactataatactgtctgtacttgagaatgttttgcctctgtaaactgacatgtagaatttctgtaatatatttatggaatttgataacttccatccatgcactgaacgctttgaatggaccattattactaaaggggtaacaaatttatcattgtaaggtcaaacatgtttgggctggaagttttgctattcaatactccaaacatgtttgtaagtgttagatactcatttaaggtttggggttttctcactgtaattacctttgcacccatttgtaatgggtctagctcacttaactcaaatttattaatacaatgcacaaccctaatccaaggttagggtttctatacggtatagagctagg

SEQ ID NO: 37554 - DNA, 6509 bp, Zea Mays
ggcgcccaaagccacaaagcgaaaaagcgcgctccacactcagcaccaccactgccgcccgcctcgagccctcctcctgcctggctgcctccctcttaaaacgaagatgccttccccagctcccctctcttgcccaccttgcttcctcgccaccaccactttccccaccgctgcggcactagtcagtcagcaccagcaccttcgtcaccctgcgcttgtgcgcggcaacaccaacgcgcgccgtcgggatcggcggcaccgctggaaatggcgagcgccggcgccggcccgtcggggccggtgcggtccatatcccaaacggggcggtcgcggacgatggggcgtatgcccacgcgcgccttcaccatacgtccggacggatcctccggtgaggacggcgtcgatatcgtggaggaggagctcgtgccctcgtcgctcgcgcccattgtacccatcctccgcgccgccaacgagatcgaggaggagaacccgcgcgtcgcctacctatgtcgctttactgctttcgagaaggctcatcatatggaccaaaactcaagtggacgaggtgttcggcaattcaaaacatacctcttgcataggcttgaaaaggatgaacatgagacaaagcgcagtcttgctacaactgatgcaagggagatacagaagttctatgcgcagtactgcagaaaatatctagaacaagatcatgataagaggaaaccggaagagatggctagatactatcagattgcgtccgtcctatatgatgttatgaaaactgttacacctggcaaaaatgagtatgatgattatgctaaagatattgaaaacgaaaaagcatccttttcacagtacaatattctaccccttaatatttctgctcgagaacaaccaataatgaaaattcctgagatcaaagcagcagtgaagctccttgagcagataaatggccttccaatgccaaggattgaattaccacaaagctctgacagaaaaacagtgtccgacaaaatggacagacctgtggttaaggatttgcttgattggcttcggcaaacatttggatttcagaaagacagtgttgcgaatcaaagggagcacttgattttgctccttgcaaacattgacatgagacaacagggtactgccgatcatagtgagagacatgttcacatgatacgtagtagcacagtgatatatttgaggaacaaaattttccataattataactcctggtgtcgatacttacatctggagtcaaacattaggatccaaagggatgcccccacacaacagccagagcttctgtacataggactgtatttactgatatggggtgaagcttccaatgttcgcttcatgcctgaatgtctttgctacatctttcaccatatggcaagagatttacatgacataatatctgatacaagccaaggatcatttgagccaccgttccagggagaggggagtgacgatgcatttctgcagctagtgatccaacccatctatagtgttatgcagaaggaagctgcaaggagcaaacgtggtaaggtgagccactcattgtggagaaactacgacgacttgaatgaatatttttggtcaaaaaaatgcttcaaaaaacttggatggccgatggatccaacagctgacttttttgcagaacctaccagagccaagaatgaaactgagcaacatggtcacgtgattaggagaagaagggcatcaaaaacaaattttgttgaagttcgtacatttttgcatatgttcagaagttttgatcgtatgtgggccttctttatattggggttccaggccatggtaatcattgcctggagcccttctgggtcactttcttctatatttgaaccaaatgttttcaaaaatgtattgacaatctttataacagcggcatttctgaacttccttcaagccacgctagagttaattctcaactggaaagcttggaagagcctggagtgctcacaaaggataagatatatcctaaaatttgctgtagctgttgcctggttgataattcttcctactacgtactcaagctctattcaaaatcccacaggccttgtgaagtttctcagcaattggattcaaaatttgcagaatgaatcaatttataattatgctgttgccctttacatgttaccaaacatattcagtgccctgtttttcatgtttctaccaattcgacgggccttagagcgctcaaattctcgcattattaggttccttttatggtggacacagccaaagttatatgttgctcgaggcatgtatgaagacacttgctcacttcttaagtatactacgttctggatcctgctgcttatatgcaagctcgccttcagttattatgttgagattgctcctttagttgaacctaccaggataatcatgtcactggaaaggccgccttatgagtggcatgagttcttcccaaacttgcggcataatttaggtgttgtggttactgtatgggctccaattgtcatggtgtacttcatggacacacaaatatggtatgccattttctccacaatatgtggtggagtctatggtgcattcagccgcttgggtgagatacgaacccttgggatgttgagatcaagatttgaggcaattccaagagcatttggcaaaaaacttgtacctgatcatggcagtcacttgaaaggagatgaggaggacaaaaacccacccttcgataagtttgctgacatatggaatgcatttattaattcattgcgagaagaggacttactaaacaatagggagaaagatctattggttgttccttcatctggtggtcaaacaagtgtttttcagtggcctcctttccttcttgccagtaagattccaattgcacttgacatggcaaagagtgtcaagaaaaaagatgatgaacttatgaagaggataaagcaggatccttatactgagtatgctgtaatagaatgctacgatacattattagatatcctttacagcattattgttgtacaaagtgataagaaagttgttgatagaatacgtgaaagcatcaaagatagcatccaccggaaatcactcgtgaaagaattccgattggatgaacttcctcaactaagtgctaagtttgataagttgctaaatctactgaaggaatatgatgagaacgatcctgtaaatagaaacacacatattgccaatctgttgcaggatataatggaaatcatcacacaggatattatgaaaaatggaaaaggtatcttgaaggacgagggccaaaaacaacaactgtttgcaaaattaaatctggattcattgaagcatgttgcttggagggagaagtgcattaggcttcaattgttgttgacaacaaaggaatctgccatatatgtaccaacgaacttggaagctcggcgtaggatcaccttttttgcaaactcactttttatgagaatgccaagggcaccacctgtccgtagcatgatgtccttcagtgttttaactccatacttcaaagaggaggtgctcttttcaccagaagatcttcataggaaaaatgaggatggtatatcaatactgttctacctacggaaaatatatccagatgaatttaggaacttccttcagcggatagattttgaagtgaaggatgaagaagaacttaaagataagatggatgagatctgtaattgggcgtcttataggggtcaaactctcaccagaacagtaagaggaatgatgtactacagaaaggcacttgaaatccaatgccttcaagatatgacagatcctgctaaagttgaccgagacagatcaataggatcctaccaagagttgcaatatgatattgaaatggcacaagctattgctgatatcaaattcacttatgttgtctcatgtcaagtttatggcatgcaaaagaaatcaaaggatttaaatgaaaaaaggcgctatcagaatatcctcaatctcatgataatgaacccatcactacgagttgctttcattgaggagatcgaaggtctaaccagaaatggagcaactgagaagacatattgttccgttcttgtcaaaggtggtgaaaagtatgatgaggaaatttaccgcataaagcttcctggcaatccaacagatattggagagggaaaacctgaaaaccaaaatcatgccataatcttcaccaggggagaagcacttcaggccattgatatgaatcaggataattatattgaggaggcgtttaaaatgagaaatgtgctggaggagtttgagagtagaaagtatgggaagagcaaacccactatattaggcttacgtgagcacatttttactggaagtgtttcgtcgctggcttggtttatgtccaatcaagagaccagttttgttactattgggcaaagagttctggcaaatcctctcaaggttcggttccattatggccacccagatatttttgatagactcttccatatcaccagaggaggcataagtaaagcttcaaagactataaatctgagtgaagatatattttcaggttttaattcaaccatgagaggaggaaatgttacacatcacgaatacatgcaagttggtaaggggcgtgatgtggggatgaatcagatttctagcttcgaagctaaggtggccaacgatttgacttctacagaatgttatctttctattttactacagttgggttctattttagtagcatggttactgtacttactgtctatgtgtttttatatgggaggctttatctggttatgagtggtctggaaaagtctattatgctggatccacgaaatcagcagaatgtcaaggctctcgaaaatgcactggcttcacagtctattttccagctaggtctgctgcttgtcctccctatggtcatggaagttggcttagagaaagggttccgcacagcattaggagagtttgtaatcatgcagcttcagttggcatctgtgttcttcacattccagcttggcaccaaaacccactactatgggagaacaatactccatggtggtgcaaaatacagaccaacaggtcgtggattcgttgtgtaccatgcaaagtttgctgaaaattaccgtatgtactcccgtagccactttgttaaaggactggaactcttgatacttttggttgtatatctagtctatggaagttcctatcgcagctcaaacatatacctatttgtcacctgctccatatggttccttgttgcttcatggctcttcgcgccatttatcttcaatccatcatgctttgaatggcagaagactgttgaggactggacagattggaggaagtggatggataacagagggggaattggcatgtctgtggaacaaagctgggaagcctggtgggtaactgagcaagatcacctcaggaagactagcatccgagcttttgtgttggaaatcatcctttcacttcgatttttgatctaccagtatggcattgtctaccatctgaacatagcagatcaccacaaaagcattatggtatatggagtatcatgggtggttatgctccttgttcttgtagtgctgaagatggtttcaatagggcggcagaaatttggaacagacctacagcttatgttccgcattctcaagggccttctcttccttggttttgtctctgtgatggcagtcctatttgtcgtcttacaccttactatttctgatgtcttcgctagtatccttggatacttgcctactggatggtgtcttcttctgaaaaagaaatgctctagtgtgctgaggctactgcagattggacaagcatgctcaccattgattaggaggaccctgctgtgggactccatcatggagctcggaaggtcatacgagaatataatgggtctcgtcctcttcctgccaattggtttcctgtcgtggttccccttcgtctctgaattccagacacggctgctgtttaaccaggcatttagccggggcctccagatctcaaggatccttgctggtcagaaggatgttagcgagttcgagttcaagtgaccaatttcatccctcttgcaagcaaaccaaactcactttcatgtatttgtttacgatgatcgattttgggtgtctgtactctagtatattttcatcacgtttactactataatactgtctgtacttgagaatgttttgcctctgtaaactgacatgtagaatttctgtaatatatttatggaatttgataacttccatccatgcactgaacgctttgaatggaccattattactaaaggggtaacaaatttatcattgtaaggtcaaacatgtttgggctggaagttttgctattcaatactccaaacatgtttgtaagtgttagatactcatttaaggtttggggttttctcactgtaattacctttgcacccatttgtaatgggtctagctcacttaactcaaatttattaatacaatgcacaaccctaatccaaggttagggtttctatacggtatagagctagg

SEQ ID NO: 37555 - DNA, 1447 bp, Zea Mays
ctcccctctcttgcccaccttgcttcctcgccaccaccactttccccaccgctgcggcactagtcagtcagcaccagcaccttcgtcaccctgcgcttgtgcgcggcaacaccaacgcgcgccgtcgggatcggcggcaccgctggaaatggcgagcgccggcgccggcccgtcggggccggtgcggtccatatcccaaacggggcggtcgcggacgatggggcgtatgcccacgcgcgccttcaccatacgtccggacggatcctccggtgaggacggcgtcgatatcgtggaggaggagctcgtgccctcgtcgctcgcgcccattgtacccatcctccgcgccgccaacgagatcgaggaggagaacccgcgcgtcgcctacctatgtcgctttactgctttcgagaaggctcatcatatggaccaaaactcaagtggacgaggtgttcggcaattcaaaacatacctcttgcataggcttgaaaaggatgaacatgagacaaagcgcagtcttgctacaactgatgcaagggagatacagaagttctatgcgcagtactgcagaaaatatctagaacaagatcatgataagaggaaaccggaagagatggctagatactatcagattgcgtccgtcctatatgatgttatgaaaactgttacacctggcaaaaatgagtatgatgattatgctaaagatattgaaaacgaaaaagcatccttttcacagtacaatattctaccccttaatatttctgctcgagaacaaccaataatgaaaattcctgagatcaaagcagcagtgaagctccttgagcagataaatggccttccaatgccaaggattgaattaccacaaagctctgacagaaaaacagtgtccgacaaaatggacagacctgtggttaaggatttgcttgattggcttcggcaaacatttggatttcagaaagacagtgttgcgaatcaaagggagcacttgattttgctccttgcaaacattgacatgagacaacagggtactgccgatcatagtgagagacatgttcacatgatacgtagtagcacagtgatatatttgaggaacaaaattttccataattataactcctggtgtcgatacttacatctggagtcaaacattaggatccaaagggatgcccccacacaacagccagagcttctgtacataggactgtatttactgatatggggtgaagcttccaatgttcgcttcatgcctgaatgtctttgctacatctttcaccatatggcaagagatttacatgacataatatctgatacaagccaaggatcatttgagccaccgttccagggagaggggagtgacgatgcatttctgcagctagtgatccaacccatctatagtgttatgcagaaggctttcaatgctatgaaacttctctatgttatctttaaatga

SEQ ID NO: 37556 - DNA, 3173 bp, Zea Mays
gtcccctcctcttgagtcttgacgaaagagagacagggaaagagggagaggcaagagtcgcagcctcgcagctctagacccagaccgcctccgcctccgccggtgatcgagtcgcgtcggcgctacattcaagctagaagacaataagcttcggcattcggaagccatgttcggctccaccaatccatttgggcagtcatccacaagcccatttggtaacaacaactcgtttggaactccccagggatttggccagtcttccactgctgccaacaatccctttgccccaaaaccatttggcagcccgaccacgccttttggggcacagactggaagctcgctctttgcaactacatctactggtgccttcggtcagcagcaatccgctcccgcatttggcacaacatccactggtgcctttggtcagcagcaatccactcccacgtttggcaccccatcctcctctcagttcgggagctctacaccagccttcggtgcatcccccactcctgcctttggtgccacatcctctgggtctttgttcggacagaagccaagttttgggggttttggatcatctcctagccagtcaagtccttttggtagcacgttccagcaaacacaaccaacatttggaacgacgccggcatttggtaccatgactactcctgcatttggtacaagtacaccagcctttggcaccacaactgcaccagccttcggtgccacgactaccccagcatttggttcaacatcaacatctttattcggtgcttctagcaccccagtgtttggttctacagcctttggcacatctgctactggttttggaacttcagggactacagcattcggtgtgagtagtactactacaggttttggatcttcaagcacaccttcatttggcacatcagctagcgtgttcggttttggttcttcaccatcttttggacaaacaacagtttcttctggcagcactccctttggaacaactccttcaccctttggtgcaccagttcctgcatttggctcgcagacagcagcaccagcttttggacaacctcagtttgctaatcaagctggaggaaccagaataaaaccttattctcaaacaccagatgttgacagtgctactagtggtactcagcctgctgcaaaacttgattccatatcggcaatgcctgaatacaaagacaagagtcatgaagaattgaggtgggaagactaccagcgtggagataagggtggaccaaacacttctggaactcaagcagtggcacctagctttccgtcactaatacaacagaatgctccaaacccattttcgacaagcaatccattttcaacaaacaatccatttgctcctaagcctgctccaactattacttcaccattcaacacctcatttaacaatgcatcagttacaagttcgagcccattcacatcatcccctagtaccacaatgtttgggcaaacaggtgtttctacactttcagcaagtaattcgccatcattgtttggaaataccaatccagctcctgttacatcatcattatttgccacatcagtgacaaataatccaagtccattcggcactggctcattattcgctaacactcaatcagccccattatttccctcagcatttgctcaaccgacatcaagtacaccggctttctcctctggcagcctatttggctcaactaatccgggcagtctgtttagcagcagcggtccttcacttttttcaacaccaacatttcaaccatcggcccctgctcaaacttcgaacttattctccttccaacctccaattcaaccagcttctacaggtggattccctggtttttccaatactacaaaccaagccttgatgggacagccaactcctaccctgtccagtatggtcatgcagcctgctcctgtttcaaatccatttgggatgcttccagcaatgcctcacatgtccattggaaatggtggatcttcaccttcagttcaatatggaatatcaagtttgccggttgtggagaagcttcttccaagtagatcattgtccatggcgtttcctaggcatttggcacagagaaggataaaactgctgccgagaaaatataatccaatatctgatggcaagtttcttctgttattcatataggttccattctttgctgatgatgaagaatctccagcaacaccaaaggcagacgctttttttgtccctagagagaacccaaggaatctggtaattcgtccaattgagcagtggccttcgcggagagaaactgaccgacaattgactgtgaagaatgctactgatttgaacaaatatgaagatgcttccattgaaagtgagcgtggtaagtctgcctctgccatgtcaccaagcagcaggcctcctgcagtggaaaatgacaatcagcatgaggctagggccatggctcaacatgggaatgggaatgctacttcagtcgagaggttattgcctaagcttccacgtgcagattacttcacagagcctagtatagaggagcttgcggccaaagaacgtgcggaggcaggctactgcggtcgagtgagggactttgttgtggggcgacatggctacggcagcatcatttttcttggggagacggacgtgaggtgcctggatctggagtcaatagtggagtttaacaaccgggaggtggttgtttacaaggacgacagcaagaagccccctgtgggtgaggggctgaacaaggctgcggaggtgactctactgaacatcaagtgcgtaaataagaagactggggaggagtactgtgaggggacaagggtggagaggtacagggagatgctgatgaagaaggcggaggagcagggcgcggagtttgtgtcctttgatgctgccaagggagagtggaagttcagggtgaagcatttcagcgcctatgggctcccttgttgttaagtattctgtttgttttgatggagcagtgataactaagttgcacgctttacgctcttgtcaaatagtatcatgcttgattctgttgtgctgctttgtacaatgttgctgctgttaaaatgcttgcaaattgcactgctctgctgctgagaacgtattctaattataagacgttttagtttttctaaacacatgattttttccctaaacacatgaattttgc

SEQ ID NO: 37557 - DNA, 3127 bp, Zea Mays
gtcccctcctcttgagtcttgacgaaagagagacagggaaagagggagaggcaagagtcgcagcctcgcagctctagacccagaccgcctccgcctccgccggtgatcgagtcgcgtcggcgctacattcaagctagaagacaataagcttcggcattcggaagccatgttcggctccaccaatccatttgggcagtcatccacaagcccatttggtaacaacaactcgtttggaactccccagggatttggccagtcttccactgctgccaacaatccctttgccccaaaaccatttggcagcccgaccacgccttttggggcacagactggaagctcgctctttgcaactacatctactggtgccttcggtcagcagcaatccgctcccgcatttggcacaacatccactggtgcctttggtcagcagcaatccactcccacgtttggcaccccatcctcctctcagttcgggagctctacaccagccttcggtgcatcccccactcctgcctttggtgccacatcctctgggtctttgttcggacagaagccaagttttgggggttttggatcatctcctagccagtcaagtccttttggtagcacgttccagcaaacacaaccaacatttggaacgacgccggcatttggtaccatgactactcctgcatttggtacaagtacaccagcctttggcaccacaactgcaccagccttcggtgccacgactaccccagcatttggttcaacatcaacatctttattcggtgcttctagcaccccagtgtttggttctacagcctttggcacatctgctactggttttggaacttcagggactacagcattcggtgtgagtagtactactacaggttttggatcttcaagcacaccttcatttggcacatcagctagcgtgttcggttttggttcttcaccatcttttggacaaacaacagtttcttctggcagcactccctttggaacaactccttcaccctttggtgcaccagttcctgcatttggctcgcagacagcagcaccagcttttggacaacctcagtttgctaatcaagctggaggaaccagaataaaaccttattctcaaacaccagatgttgacagtgctactagtggtactcagcctgctgcaaaacttgattccatatcggcaatgcctgaatacaaagacaagagtcatgaagaattgaggtgggaagactaccagcgtggagataagggtggaccaaacacttctggaactcaagcagtggcacctagctttccgtcactaatacaacagaatgctccaaacccattttcgacaagcaatccattttcaacaaacaatccatttgctcctaagcctgctccaactattacttcaccattcaacacctcatttaacaatgcatcagttacaagttcgagcccattcacatcatcccctagtaccacaatgtttgggcaaacaggtgtttctacactttcagcaagtaattcgccatcattgtttggaaataccaatccagctcctgttacatcatcattatttgccacatcagtgacaaataatccaagtccattcggcactggctcattattcgctaacactcaatcagccccattatttccctcagcatttgctcaaccgacatcaagtacaccggctttctcctctggcagcctatttggctcaactaatccgggcagtctgtttagcagcagcggtccttcacttttttcaacaccaacatttcaaccatcggcccctgctcaaacttcgaacttattctccttccaacctccaattcaaccagcttctacaggtggattccctggtttttccaatactacaaaccaagccttgatgggacagccaactcctaccctgtccagtatggtcatgcagcctgctcctgtttcaaatccatttgggatgcttccagcaatgcctcacatgtccattggaaatggtggatcttcaccttcagttcaatatggaatatcaagtttgccggttgtggagaagcttcttccaagtagatcattgtccatggcgtttcctaggcatttggcacagagaaggataaaactgctgccgagaaaatataatccaatatctgatggcaagaatctccagcaacaccaaaggcagacgctttttttgtccctagagagaacccaaggaatctggtaattcgtccaattgagcagtggccttcgcggagagaaactgaccgacaattgactgtgaagaatgctactgatttgaacaaatatgaagatgcttccattgaaagtgagcgtggtaagtctgcctctgccatgtcaccaagcagcaggcctcctgcagtggaaaatgacaatcagcatgaggctagggccatggctcaacatgggaatgggaatgctacttcagtcgagaggttattgcctaagcttccacgtgcagattacttcacagagcctagtatagaggagcttgcggccaaagaacgtgcggaggcaggctactgcggtcgagtgagggactttgttgtggggcgacatggctacggcagcatcatttttcttggggagacggacgtgaggtgcctggatctggagtcaatagtggagtttaacaaccgggaggtggttgtttacaaggacgacagcaagaagccccctgtgggtgaggggctgaacaaggctgcggaggtgactctactgaacatcaagtgcgtaaataagaagactggggaggagtactgtgaggggacaagggtggagaggtacagggagatgctgatgaagaaggcggaggagcagggcgcggagtttgtgtcctttgatgctgccaagggagagtggaagttcagggtgaagcatttcagcgcctatgggctcccttgttgttaagtattctgtttgttttgatggagcagtgataactaagttgcacgctttacgctcttgtcaaatagtatcatgcttgattctgttgtgctgctttgtacaatgttgctgctgttaaaatgcttgcaaattgcactgctctgctgctgagaacgtattctaattataagacgttttagtttttctaaacacatgattttttccctaaacacatgaattttgc

SEQ ID NO: 37558 - DNA, 3084 bp, Zea Mays
gtcccctcctcttgagtcttgacgaaagagagacagggaaagagggagaggcaagagtcgcagcctcgcagctctagacccagaccgcctccgcctccgccggtgatcgagtcgcgtcggcgctacattcaagctagaagacaataagcttcggcattcggaagccatgttcggctccaccaatcggatttggccagtcttccactgctgccaacaatccctttgccccaaaaccatttggcagcccgaccacgccttttggggcacagactggaagctcgctctttgcaactacatctactggtgccttcggtcagcagcaatccgctcccgcatttggcacaacatccactggtgcctttggtcagcagcaatccactcccacgtttggcaccccatcctcctctcagttcgggagctctacaccagccttcggtgcatcccccactcctgcctttggtgccacatcctctgggtctttgttcggacagaagccaagttttgggggttttggatcatctcctagccagtcaagtccttttggtagcacgttccagcaaacacaaccaacatttggaacgacgccggcatttggtaccatgactactcctgcatttggtacaagtacaccagcctttggcaccacaactgcaccagccttcggtgccacgactaccccagcatttggttcaacatcaacatctttattcggtgcttctagcaccccagtgtttggttctacagcctttggcacatctgctactggttttggaacttcagggactacagcattcggtgtgagtagtactactacaggttttggatcttcaagcacaccttcatttggcacatcagctagcgtgttcggttttggttcttcaccatcttttggacaaacaacagtttcttctggcagcactccctttggaacaactccttcaccctttggtgcaccagttcctgcatttggctcgcagacagcagcaccagcttttggacaacctcagtttgctaatcaagctggaggaaccagaataaaaccttattctcaaacaccagatgttgacagtgctactagtggtactcagcctgctgcaaaacttgattccatatcggcaatgcctgaatacaaagacaagagtcatgaagaattgaggtgggaagactaccagcgtggagataagggtggaccaaacacttctggaactcaagcagtggcacctagctttccgtcactaatacaacagaatgctccaaacccattttcgacaagcaatccattttcaacaaacaatccatttgctcctaagcctgctccaactattacttcaccattcaacacctcatttaacaatgcatcagttacaagttcgagcccattcacatcatcccctagtaccacaatgtttgggcaaacaggtgtttctacactttcagcaagtaattcgccatcattgtttggaaataccaatccagctcctgttacatcatcattatttgccacatcagtgacaaataatccaagtccattcggcactggctcattattcgctaacactcaatcagccccattatttccctcagcatttgctcaaccgacatcaagtacaccggctttctcctctggcagcctatttggctcaactaatccgggcagtctgtttagcagcagcggtccttcacttttttcaacaccaacatttcaaccatcggcccctgctcaaacttcgaacttattctccttccaacctccaattcaaccaggtggattccctggtttttccaatactacaaaccaagccttgatgggacagccaactcctaccctgtccagtatggtcatgcagcctgctcctgtttcaaatccatttgggatgcttccagcaatgcctcacatgtccattggaaatggtggatcttcaccttcagttcaatatggaatatcaagtttgccggttgtggagaagcttcttccaagtagatcattgtccatggcgtttcctaggcatttggcacagagaaggataaaactgctgccgagaaaatataatccaatatctgatggcaaggttccattctttgctgatgatgaagaatctccagcaacaccaaaggcagacgctttttttgtccctagagagaacccaaggaatctggtaattcgtccaattgagcagtggccttcgcggagagaaactgaccgacaattgactgtgaagaatgctactgatttgaacaaatatgaagatgcttccattgaaagtgagcgtggtaagtctgcctctgccatgtcaccaagcagcaggcctcctgcagtggaaaatgacaatcagcatgaggctagggccatggctcaacatgggaatgggaatgctacttcagtcgagaggttattgcctaagcttccacgtgcagattacttcacagagcctagtatagaggagcttgcggccaaagaacgtgcggaggcaggctactgcggtcgagtgagggactttgttgtggggcgacatggctacggcagcatcatttttcttggggagacggacgtgaggtgcctggatctggagtcaatagtggagtttaacaaccgggaggtggttgtttacaaggacgacagcaagaagccccctgtgggtgaggggctgaacaaggctgcggaggtgactctactgaacatcaagtgcgtaaataagaagactggggaggagtactgtgaggggacaagggtggagaggtacagggagatgctgatgaagaaggcggaggagcagggcgcggagtttgtgtcctttgatgctgccaagggagagtggaagttcagggtgaagcatttcagcgcctatgggctcccttgttgttaagtattctgtttgttttgatggagcagtgataactaagttgcacgctttacgctcttgtcaaatagtatcatgcttgattctgttgtgctgctttgtacaatgttgctgctgttaaaatgcttgcaaattgcactgctctgctgctgagaacgtattctaattataagacgttttagtttttctaaacacatgattttttccctaaacacatgaattttgc

SEQ ID NO: 37559 - DNA, 3498 bp, Zea Mays
cttcgtcccctcctcttgagtcttgacgaaagagagacagggaaagagggagaggcaagagtcgcagcctcgcagctctagacccagaccgcctccgcctccgccggtgatcgagtcgcgtcggcgctacattcaagctagaagacaataagcttcggcattcggaagccatgttcggctccaccaatccatttgggcagtcatccacaagcccatttggtaacaacaactcgtttggaactccccagggatttggccagtcttccactgctgccaacaatccctttgccccaaaaccatttggcagcccgaccacgccttttggggcacagactggaagctcgctctttgcaactacatctactggtgccttcggtcagcagcaatccgctcccgcatttggcacaacatccactggtgcctttggtcagcagcaatccactcccacgtttggcaccccatcctcctctcagttcgggagctctacaccagccttcggtgcatcccccactcctgcctttggtgccacatcctctgggtctttgttcggacagaagccaagttttgggggttttggatcatctcctagccagtcaagtccttttggtagcacgttccagcaaacacaaccaacatttggaacgacgccggcatttggtaccatgactactcctgcatttggtacaagtacaccagcctttggcaccacaactgcaccagccttcggtgccacgactaccccagcatttggttcaacatcaacatctttattcggtgcttctagcaccccagtgtttggttctacagcctttggcacatctgctactggttttggaacttcagggactacagcattcggtgtgagtagtactactacaggttttggatcttcaagcacaccttcatttggcacatcagctagcgtgttcggttttggttcttcaccatcttttggacaaacaacagtttcttctggcagcactccctttggaacaactccttcaccctttggtgcaccagttcctgcatttggctcgcagacagcagcaccagcttttggacaacctcagtttgctaatcaagctggaggaaccagaataaaaccttattctcaaacaccagatgttgacagtgctactagtggtactcagcctgctgcaaaacttgattccatatcggcaatgcctgaatacaaagacaagagtcatgaagaattgaggtgggaagactaccagcgtggagataagggtggaccaaacacttctggaactcaagcagtggcacctagctttccgtcactaatacaacagaatgctccaaacccattttcgacaagcaatccattttcaacaaacaatccatttgctcctaagcctgctccaactattacttcaccattcaacacctcatttaacaatgcatcagttacaagttcgagcccattcacatcatcccctagtaccacaatgtttgggcaaacaggtgtttctacactttcagcaagtaattcgccatcattgtttggaaataccaatccagctcctgttacatcatcattatttgccacatcagtgacaaataatccaagtccattcggcactggctcattattcgctaacactcaatcagccccattatttccctcagcatttgctcaaccgacatcaagtacaccggctttctcctctggcagcctatttggctcaactaatccgggcagtctgtttagcagcagcggtccttcacttttttcaacaccaacatttcaaccatcggcccctgctcaaacttcgaacttattctccttccaacctccaattcaaccagcttctacaggtggattccctggtttttccaatactacaaaccaagccttgatgggacagccgtatgatcttctgctacttttcaaatgcacaccattattcctttcctatttagtaatttcttttgatgttttaaaacgctgatgagttataacaaggtgaaggaaaaacaatattatgatcagtctaatgtggagaatggtgtaggcaaagaagggaaaaaaccttgatggttcatggagactagcttatatttgatgccatgagactgctggattgttattttatatctgtagtctaagagcatggttttggcatagatcataattcagaaatgagtttttggcaatgattcctgtttttttttcttttaacatggtctatcctgctgcatttttacccagaactcctaccctgtccagtatggtcatgcagcctgctcctgtttcaaatccatttgggatgcttccagcaatgcctcacatgtccattggaaatggtggatcttcaccttcagttcaatatggaatatcaagtttgccggttgtggagaagcttcttccaagtagatcattgtccatggcgtttcctaggcatttggcacagagaaggataaaactgctgccgagaaaatataatccaatatctgatggcaaggttccattctttgctgatgatgaagaatctccagcaacaccaaaggcagacgctttttttgtccctagagagaacccaaggaatctggtaattcgtccaattgagcagtggccttcgcggagagaaactgaccgacaattgactgtgaagaatgctactgatttgaacaaatatgaagatgcttccattgaaagtgagcgtggtaagtctgcctctgccatgtcaccaagcagcaggcctcctgcagtggaaaatgacaatcagcatgaggctagggccatggctcaacatgggaatgggaatgctacttcagtcgagaggttattgcctaagcttccacgtgcagattacttcacagagcctagtatagaggagcttgcggccaaagaacgtgcggaggcaggctactgcggtcgagtgagggactttgttgtggggcgacatggctacggcagcatcatttttcttggggagacggacgtgaggtgcctggatctggagtcaatagtggagtttaacaaccgggaggtggttgtttacaaggacgacagcaagaagccccctgtgggtgaggggctgaacaaggctgcggaggtgactctactgaacatcaagtgcgtaaataagaagactggggaggagtactgtgaggggacaagggtggagaggtacagggagatgctgatgaagaaggcggaggagcagggcgcggagtttgtgtcctttgatgctgccaagggagagtggaagttcagggtgaagcatttcagcgcctatgggctcccttgttgttaagtattctgtttgttttgatggagcagtgataactaagttgcacgctttacgctcttgtcaaatagtatcatgcttgattctgttgtgctgctttgtacaatgttgctgctgttaaaatgcttgcaaattgcactgctctgctgctgagaacgtattctaattataagacgttttagtttttctaaacacatgattttttccctaaacacatgaattttgc

SEQ ID NO: 37560 - DNA, 2661 bp, Zea Mays
cttcgtcccctcctcttgagtcttgacgaaagagagacagggaaagagggagaggcaagagtcgcagcctcgcagctctagacccagaccgcctccgcctccgccggtgatcgagtcgcgtcggcgctacattcaagctagaagacaataagcttcggcattcggaagccatgttcggctccaccaatccatttgggcagtcatccacaagcccatttggtaacaacaactcgtttggaactccccagggatttggccagtcttccactgctgccaacaatccctttgccccaaaaccatttggcagcccgaccacgccttttggggcacagactggaagctcgctctttgcaactacatctactggtgccttcggtcagcagcaatccgctcccgcatttggcacaacatccactggtgcctttggtcagcagcaatccactcccacgtttggcaccccatcctcctctcagttcgggagctctacaccagccttcggtgcatcccccactcctgcctttggtgccacatcctctggctcgcagacagcagcaccagcttttggacaacctcagtttgctaatcaagctggaggaaccagaataaaaccttattctcaaacaccagatgttgacagtgctactagtggtactcagcctgctgcaaaacttgattccatatcggcaatgcctgaatacaaagacaagagtcatgaagaattgaggtgggaagactaccagcgtggagataagggtggaccaaacacttctggaactcaagcagtggcacctagctttccgtcactaatacaacagaatgctccaaacccattttcgacaagcaatccattttcaacaaacaatccatttgctcctaagcctgctccaactattacttcaccattcaacacctcatttaacaatgcatcagttacaagttcgagcccattcacatcatcccctagtaccacaatgtttgggcaaacaggtgtttctacactttcagcaagtaattcgccatcattgtttggaaataccaatccagctcctgttacatcatcattatttgccacatcagtgacaaataatccaagtccattcggcactggctcattattcgctaacactcaatcagccccattatttccctcagcatttgctcaaccgacatcaagtacaccggctttctcctctggcagcctatttggctcaactaatccgggcagtctgtttagcagcagcggtccttcacttttttcaacaccaacatttcaaccatcggcccctgctcaaacttcgaacttattctccttccaacctccaattcaaccagcttctacaggtggattccctggtttttccaatactacaaaccaagccttgatgggacagccaactcctaccctgtccagtatggtcatgcagcctgctcctgtttcaaatccatttgggatgcttccagcaatgcctcacatgtccattggaaatggtggatcttcaccttcagttcaatatggaatatcaagtttgccggttgtggagaagcttcttccaagtagatcattgtccatggcgtttcctaggcatttggcacagagaaggataaaactgctgccgagaaaatataatccaatatctgatggcaaggttccattctttgctgatgatgaagaatctccagcaacaccaaaggcagacgctttttttgtccctagagagaacccaaggaatctggtaattcgtccaattgagcagtggccttcgcggagagaaactgaccgacaattgactgtgaagaatgctactgatttgaacaaatatgaagatgcttccattgaaagtgagcgtggtaagtctgcctctgccatgtcaccaagcagcaggcctcctgcagtggaaaatgacaatcagcatgaggctagggccatggctcaacatgggaatgggaatgctacttcagtcgagaggttattgcctaagcttccacgtgcagattacttcacagagcctagtatagaggagcttgcggccaaagaacgtgcggaggcaggctactgcggtcgagtgagggactttgttgtggggcgacatggctacggcagcatcatttttcttggggagacggacgtgaggtgcctggatctggagtcaatagtggagtttaacaaccgggaggtggttgtttacaaggacgacagcaagaagccccctgtgggtgaggggctgaacaaggctgcggaggtgactctactgaacatcaagtgcgtaaataagaagactggggaggagtactgtgaggggacaagggtggagaggtacagggagatgctgatgaagaaggcggaggagcagggcgcggagtttgtgtcctttgatgctgccaagggagagtggaagttcagggtgaagcatttcagcgcctatgggctcccttgttgttaagtattctgtttgttttgatggagcagtgataactaagttgcacgctttacgctcttgtcaaatagtatcatgcttgattctgttgtgctgctttgtacaatgttgctgctgttaaaatgcttgcaaattgcactgctctgctgctgagaacgtattctaattataagacgttttagtttttctaaacacatgattttttccctaaacacatgaattttgc

SEQ ID NO: 37561 - DNA, 3145 bp, Zea Mays
cttcgggcttcgtcccctcctcttgagtcttgacgaaagagagacagggaaagagggagaggcaagagtcgcagcctcgcagctctagacccagaccgcctccgcctccgccggtgatcgagtcgcgtcggcgctacattcaagctagaagacaataagcttcggcattcggaagccatgttcggctccaccaatccatttgggcagtcatccacaagcccatttggtaacaacaactcgtttggaactccccagggatttggccagtcttccactgctgccaacaatccctttgccccaaaaccatttggcagcccgaccacgccttttggggcacagactggaagctcgctctttgcaactacatctactggtgccttcggtcagcagcaatccgctcccgcatttggcacaacatccactggtgcctttggtcagcagcaatccactcccacgtttggcaccccatcctcctctcagttcgggagctctacaccagccttcggtgcatcccccactcctgcctttggtgccacatcctctgggtctttgttcggacagaagccaagttttgggggttttggatcatctcctagccagtcaagtccttttggtagcacgttccagcaaacacaaccaacatttggaacgacgccggcatttggtaccatgactactcctgcatttggtacaagtacaccagcctttggcaccacaactgcaccagccttcggtgccacgactaccccagcatttggttcaacatcaacatctttattcggtgcttctagcaccccagtgtttggttctacagcctttggcacatctgctactggttttggaacttcagggactacagcattcggtgtgagtagtactactacaggttttggatcttcaagcacaccttcatttggcacatcagctagcgtgttcggttttggttcttcaccatcttttggacaaacaacagtttcttctggcagcactccctttggaacaactccttcaccctttggtgcaccagttcctgcatttggctcgcagacagcagcaccagcttttggacaacctcagtttgctaatcaagctggaggaaccagaataaaaccttattctcaaacaccagatgttgacagtgctactagtggtactcagcctgctgcaaaacttgattccatatcggcaatgcctgaatacaaagacaagagtcatgaagaattgaggtgggaagactaccagcgtggagataagggtggaccaaacacttctggaactcaagcagtggcacctagctttccgtcactaatacaacagaatgctccaaacccattttcgacaagcaatccattttcaacaaacaatccatttgctcctaagcctgctccaactattacttcaccattcaacacctcatttaacaatgcatcagttacaagttcgagcccattcacatcatcccctagtaccacaatgtttgggcaaacaggtgtttctacactttcagcaagtaattcgccatcattgtttggaaataccaatccagctcctgttacatcatcattatttgccacatcagtgacaaataatccaagtccattcggcactggctcattattcgctaacactcaatcagccccattatttccctcagcatttgctcaaccgacatcaagtacaccggctttctcctctggcagcctatttggctcaactaatccgggcagtctgtttagcagcagcggtccttcacttttttcaacaccaacatttcaaccatcggcccctgctcaaacttcgaacttattctccttccaacctccaattcaaccagcttctacaggtggattccctggtttttccaatactacaaaccaagccttgatgggacagcctatggtcatgcagcctgctcctgtttcaaatccatttgggatgcttccagcaatgcctcacatgtccattggaaatggtggatcttcaccttcagttcaatatggaatatcaagtttgccggttgtggagaagcttcttccaagtagatcattgtccatggcgtttcctaggcatttggcacagagaaggataaaactgctgccgagaaaatataatccaatatctgatggcaaggttccattctttgctgatgatgaagaatctccagcaacaccaaaggcagacgctttttttgtccctagagagaacccaaggaatctggtaattcgtccaattgagcagtggccttcgcggagagaaactgaccgacaattgactgtgaagaatgctactgatttgaacaaatatgaagatgcttccattgaaagtgagcgtggtaagtctgcctctgccatgtcaccaagcagcaggcctcctgcagtggaaaatgacaatcagcatgaggctagggccatggctcaacatgggaatgggaatgctacttcagtcgagaggttattgcctaagcttccacgtgcagattacttcacagagcctagtatagaggagcttgcggccaaagaacgtgcggaggcaggctactgcggtcgagtgagggactttgttgtggggcgacatggctacggcagcatcatttttcttggggagacggacgtgaggtgcctggatctggagtcaatagtggagtttaacaaccgggaggtggttgtttacaaggacgacagcaagaagccccctgtgggtgaggggctgaacaaggctgcggaggtgactctactgaacatcaagtgcgtaaataagaagactggggaggagtactgtgaggggacaagggtggagaggtacagggagatgctgatgaagaaggcggaggagcagggcgcggagtttgtgtcctttgatgctgccaagggagagtggaagttcagggtgaagcatttcagcgcctatgggctcccttgttgttaagtattctgtttgttttgatggagcagtgataactaagttgcacgctttacgctcttgtcaaatagtatcatgcttgattctgttgtgctgctttgtacaatgttgctgctgttaaaatgcttgcaaattgcactgctctgctgctgagaacgtattctaattataagacgttttagtttttctaaacacatgattttttccctaaacacatgaattttgc

SEQ ID NO: 37562 - DNA, 2149 bp, Zea Mays
gtcccctcctcttgagtcttgacgaaagagagacagggaaagagggagaggcaagagtcgcagcctcgcagctctagacccagaccgcctccgcctccgccggtgatcgagtcgcgtcggcgctacattcaagctagaagacaataagcttcggcattcggaagccatgttcggctccaccaatccatttgggcagtcatccacaagcccatttggtaacaacaactcgtttggaactccccagggatttggccagtcttccactgctgccaacaatccctttgccccaaaaccatttggcagcccgaccacgccttttggggcacagactggaagctcgctctttgcaactacatctactggtgccttcggtcagcagcaatccgctcccgcatttggcacaacatccactggtgcctttggtcagcagcaatccactcccacgtttggcaccccatcctcctctcagttcgggagctctacaccagccttcggtgcatcccccactcctgcctttggtgccacatcctctgggtctttgttcggacagaagccaagttttgggggttttggatcatctcctagccagtcaagtccttttggtagcacgttccagcaaacacaaccaacatttggaacgacgccggcatttggtaccatgactactcctgcatttggtacaagtacaccagcctttggcaccacaactgcaccagccttcggtgccacgactaccccagcatttggttcaacatcaacatctttattcggtgcttctagcaccccagtgtttggttctacagcctttggcacatctgctactggttttggaacttcagggactacagcattcggtgtgagtagtactactacaggttttggatcttcaagcacaccttcatttggcacatcagctagcgtgttcggttttggttcttcaccatcttttggacaaacaacagtttcttctggcagcactccctttggaacaactccttcaccctttggtgcaccagttcctgcatttggctcgcagacagcagcaccagcttttggacaacctcagtttgctaatcaagctggaggaaccagaataaaaccttattctcaaacaccagatgttgacagtgctactagtggtactcagcctgctgcaaaacttgattccatatcggcaatgcctgaatacaaagacaagagtcatgaagaattgaggtgggaagactaccagcgtggagataagggtggaccaaacacttctggaactcaagcagtggcacctagctttccgtcactaatacaacagaatgctccaaacccattttcgacaagcaatccattttcaacaaacaatccatttgctcctaagcctgctccaactattacttcaccattcaacacctcatttaacaatgcatcagttacaagttcgagcccattcacatcatcccctagtaccacaatgtttgggcaaacaggtgtttctacactttcagcaagtaattcgccatcattgtttggaaataccaatccagctcctgttacatcatcattatttgccacatcagtgacaaataatccaagtccattcggcactggctcattattcgctaacactcaatcagccccattatttccctcagcatttgctcaaccgacatcaagtacaccggctttctcctctggcagcctatttggctcaactaatccgggcagtctgtttagcagcagcggtccttcacttttttcaacaccaacatttcaaccatcggcccctgctcaaacttcgaacttattctccttccaacctccaattcaaccaggtggattccctggtttttccaatactacaaaccaagccttgatgggacagccaactcctaccctgtccagtatggtcatgcagcctgctcctgtttcaaatccatttgggatgcttccagcaatgcctcacatgtccattggaaatggtggatcttcaccttcagttcaatatggaatatcaagtttgccggttgtggagaagcttcttccaagtagatcattgtccatggcgtttcctaggcatttggcacagagaaggataaaactgctgccgagaaaatataatccaatatctgatggcaagtttcttctgttattcatatag

SEQ ID NO: 37563 - DNA, 2344 bp, Zea Mays
gtcccctcctcttgagtcttgacgaaagagagacagggaaagagggagaggcaagagtcgcagcctcgcagctctagacccagaccgcctccgcctccgccggtgatcgagtcgcgtcggcgctacattcaagctagaagacaataagcttcggcattcggaagccatgttcggctccaccaatccatttgggcagtcatccacaagcccatttggtaacaacaactcgtttggaactccccagggatttggccagtcttccactgctgccaacaatccctttgccccaaaaccatttggcagcccgaccacgccttttggggcacagactggaagctcgctctttgcaactacatctactggtgccttcggtcagcagcaatccgctcccgcatttggcacaacatccactggtgcctttggtcagcagcaatccactcccacgtttggcaccccatcctcctctcagttcgggagctctacaccagccttcggtgcatcccccactcctgcctttggtgccacatcctctgggtctttgttcggacagaagccaagttttgggggttttggatcatctcctagccagtcaagtccttttggtagcacgttccagcaaacacaaccaacatttggaacgacgccggcatttggtaccatgactactcctgcatttggtacaagtacaccagcctttggcaccacaactgcaccagccttcggtgccacgactaccccagcatttggttcaacatcaacatctttattcggtgcttctagcaccccagtgtttggttctacagcctttggcacatctgctactggttttggaacttcagggactacagcattcggtgtgagtagtactactacaggttttggatcttcaagcacaccttcatttggcacatcagctagcgtgttcggttttggttcttcaccatcttttggacaaacaacagtttcttctggcagcactccctttggaacaactccttcaccctttggtgcaccagttcctgcatttggctcgcagacagcagcaccagcttttggacaacctcagtttgctaatcaagctggaggaaccagaataaaaccttattctcaaacaccagatgttgacagtgctactagtggtactcagcctgctgcaaaacttgattccatatcggcaatgcctgaatacaaagacaagagtcatgaagaattgaggtgggaagactaccagcgtggagataagggtggaccaaacacttctggaactcaagcagtggcacctagctttccgtcactaatacaacagaatgctccaaacccattttcgacaagcaatccattttcaacaaacaatccatttgctcctaagcctgctccaactattacttcaccattcaacacctcatttaacaatgcatcagttacaagttcgagcccattcacatcatcccctagtaccacaatgtttgggcaaacaggtgtttctacactttcagcaagtaattcgccatcattgtttggaaataccaatccagctcctgttacatcatcattatttgccacatcagtgacaaataatccaagtccattcggcactggctcattattcgctaacactcaatcagccccattatttccctcagcatttgctcaaccgacatcaagtacaccggctttctcctctggcagcctatttggctcaactaatccgggcagtctgtttagcagcagcggtccttcacttttttcaacaccaacatttcaaccatcggcccctgctcaaacttcgaacttattctccttccaacctccaattcaaccagcttctacaggtggattccctggtttttccaatactacaaaccaagccttgatgggacagccgtatgatcttctgctacttttcaaatgcacaccattattcctttcctatttagtaatttcttttgatgttttaaaacgctgatgagttataacaaggtgaaggaaaaacaatattatgatcagtctaatgtggagaatggtgtaggcaaagaagggaaaaaaccttgatggttcatggagactagcttatatttgatgccatgagactgctggattgttattttatatctgtagtctaagagcatggttttggcatagatcataattcagaaatgagtttttggcaatgattcctgtttttttttcttttaacatggtctatcctgctgcatttttacccagaactcctaccctgtccagtatggtcatgcagcctgctcctgtttcaaatccatttgggatgcttccagcaatgcctcacatgtccattggaaatgagaaggtggacagtagagatagg

SEQ ID NO: 37564 - DNA, 1702 bp, Zea Mays
caacagttggctagctttgtggtttgttggagctgtataagttgcaacaaccaaggcaattctcaactaatttcccattctgaatttggtctcttgcctgcattcttcaagattcagttgtctgcgtcagtttacccaattttacagccaagccaaccatctagtatttctctttgcctcgtgttggtgttggccaggagggagcgggagagcatgaagcaacgatttccaagcagcagcacgcgttccaagtctgaggcagctgtgcaaacgcgggcatcaagagcaccatcgcccaaagtcaatcctgctactccaggtccaggcccaggggtgaaggccagaccaagatcggctgccgccgccgccgccgccaccaccatggcagcgacgaggaggcagcctgccgtgcctatgcccgtgtggaagtcggagacggcagaggaggaggtggtgcggctgcgcggggaggttgatgccttgcagaaagaggtgcagcgtctgctccgcctcaacgcagagctccggaccaaccatgacgctgcagccagcaacagatcacaacctcccagcaagatttcggcttccggagtagtcgttgcaccgccgccgccgccgcccccgccgccaccgccaccgccaccgcacctaaagcagcgaggagtccgtttcccttcagctccgagcacaagcccggcgagcaaggccactgcgctggtcgacatgtacaactcgctgcaggccagcaacaagccgtcaaagcgcacagacaaaagtagcagccatagcagcatcgttgacgagctgcagaaccgctccaggcacttgctagcgacgtggaaacaaaagccgagttcatcaactatctcatcgacagaatccacactagtacctacaccggcgtggaacaagtactcacctttgtggactggctggaccaacaactctcgactctgactgatgagtcagccgtcttgaagcacttcaactggcctgagaggaaagccgatgcgcttcgtgaagcggcatctgaataccgacacatcaactgtcttctaacagagatctcttcctccttaagaagagacgaagacgatggtggtagcagtagcactctcaggaagatttcaagcttgctagataaattggagaagagcatgagcagactggtggatctaaggagatcggcgatgccgtcctacaaagagttgaggattccaacgaactggatgcttgattcagggatggcctcaaagatgagattggcatcggtgagtcttgcgaaactgtataccaagacagtcctcaaggaactggatgcaagtgggacgacggggaacaaggctgctctggttgctcagagcgtgcgcttcacctacagagtccaccagtttgctgggggccttgactgcgaagcaatgcatgcctttgaagagctaagaaggcgggttcagttgctctctcaataaccctattcatctctgtcttcttcttattataacagtatatgtcagatcaagtcttgtcggaaatggagagggggaaaatcatgctgtggtttctcatcgtgtatggaaaatctggttatccactgattttatttctctgatccatgtcaagtacatttggagtcggtactggtttctacagtgttttgtctctatagactgcagctgtagcagtccgaacagctgactttaag

SEQ ID NO: 37565 - DNA, 2881 bp, Zea Mays
ttgtcgcctcgccgcttctccacctcccgtctcgtctgcaactgcaactccacctcggccgtcggccttctcatcctcgtcaccaccggccacggccggcctccaccaccgcctgcccaccgctcgctactcttgtctcccctccccccaagtggaagaagaatcgggctgttgctcactcagagctctctcagtgaggcgggcctcactagtcactagccttgctgttatgccttccccgccgctcgccagagtccaccgccaccggacaggaagcaccacctagttcctgaccctgatgcccatggcaccggaccaccccttcgatgccttcgtcgccgcagcccgtggcgccgtagcccaccttcacctccccgtcatccacatccctggatccaattccagtccccatcccaactccaagcagcacaagggactcgaggtcgactgcctgctccacctccacgtcctcgtcaccaacttcctccacaagcccctcaagtcattcgccaggtgcttcaggcccaagcgacgggcagacacacactccccgccgctccaccaggagcccagcaatggcaccaccccgcaaaagcaactggagttcctgctctgcattgcgttcgacgccttcgcccacaacctccacgcgctggatgacgcctgcaagcacaaaggcgaggaatttgctgccgctacccgacagttggagcaatttgtggttctcaggaaggtaatcgatgggaagagggccgatttcgatgggttcctttccaatctgggctttgcaaaggttggggcaccgccaccgccagcaagcatcgtgggtggtgcgtcccctgtcccagcatcagcaccagtcagcaatcaggaggatggtgccgtgattggaaacggcgagggggtggacagtgctagtggtacacaacagcaggcacagaaattgcctgcccggttgcttaacattcctttgtcgaatgtggagcgtctgcggtctacgctttctgcagtttcactgacggagctcattgaattagtcccgctgctggtgagcagatcatcgacatcggcagatgcacatcctgacaagaagaagcttttctcagtgcaagatttcttcagatatgcagaaattgaaggaaagcgattctttgaagagttggacagagatggtgatggccaagtcactctagaagatctcgaaattgcaacgaggaagaggcggttaccaaggaggtatgctcgagaattgttccgccgtacaagaagcaacttcttttcgaaatcaattgggtggaagcaatttttatccttgatggaacagaaggaagcaaccattctccgagcgtataccacgttgtgtttgagcaagtctggaacacttcacaaaagtcaaattttgacttctttgaaaggtgctggacttccagccaatgaagataatgccgctgccatgctacgttatctaaatgctgattcagaaggatcaatctcatatggccatttccgcaacttcatgcttctacttccttcggaacgtcttgaggatgatcctcggaacatttggtttgaagcagccaccgttgttgctgtccccccacctatagaaatatctgcaggaagtgttttgaagtctgctttagctggaggtcttgcaagtgcgctttctacctctctgctgcatcctattgattcaatgaagacacgtgtccaagcatctacactctcatttcctgagctcatttcaaagcttccacaaattgggcttcgaggattgtatcgaggttctatcccagcaattctcggccagttttcaagccatggtttgaggacaggaatctttgaagcaagcaagcttgtattaattaatgtagctccaacacttccagagattcaggtgcaatcaattgcatccttctgcagcacagtcctagggactgcagtccggatcccttgtgaggttcttaagcaacgtttgcaggctggaatattcaacaatgtaggggaggcgattgttggcaccatgcgacaagatggcccaaagggtttttttcgcggcactggggccacactgtgtcgcgaggttcctttctatgttgctggaatgtgcctctatgcagaagctaagaagcacagcatgttttgaggagagacttggaagcatgggaaatagtggcagttggagcattgtctggaggacttgcggcaatagtaaccactccctttgacgtgatgaagactaggatgatgactgcccctccaggcacaccagtgtctatgcagatgataatcttctccatccttcgaaatgagggtccacttggactctttaagggcgcgatcccccgcttcttctggatcgctcctcttggagcaatgaattttgcaggctatgagcttgccaagaaggcgatgatcaaagatgagaacagttccagtgagtcaacaaaagagaacttgccaagaaatcagtgatcaaggatgagtgtgaatctagggcgtcaatacaggacaagaaaaccatgatggataccacaggataatctaacgtttacctggttaacatctatggtgcaaagaaattgaaaccatggaacagtttttttttgtgtgtgtgttcatgtagcagagaagcaacagaacatctgccttttttgatacttgaatctaattttgggttgccgcgtctttttgcccctctaggaattccattcccataggccttgagatggttgtatagtatacagtacatgagagagacagatgcacatgctggagctgttgctcttttgtttgttatttgacgatgatccatagccttcctggttaaacatgatgtaaatttgctcttgtacttaccctgatgaggacagttggcttt

SEQ ID NO: 37566 - DNA, 2430 bp, Zea Mays
atccattcttgcatcacaaagcacacttattgctgtttttggatggtcatacactgtacagtataccgcaaaaagctttcagctttcaagagctaatagagaaattctgcagcaagctgaatgcaatattcaggtttggtgtatccttctcagtgacaaagtaccttttaggatgcactggcctttacactctgacatgcaagttaatggtatttatgttagggtggttaacaggcaacccacacaaaagttaggggccaatggtagagacgatggtccactattaacagattacctgaaggagggacctaacaagatttctctatcaagaaatgacactcgtactttctgtttgggtatcagaattgccaagaggagatctctagaacaggtcctaaatttggtgccaaaggaacaagatggtgaaaacttcgatgacgcccttgcacgtgtgcgtcgctgtgttggtggtggagctgaggcaaataatgcagacagtgatagtgatatcgaagttgtggctgattttgtctctgtgaatcttcggtgccctatgactgcttcaaggatacagatcgctggtaggttcaagtcctgtgctcacatgggctgctttgatttagaagcttttattgaaataaaccaacgttcccggaagtggcaatgcccaatatgcctgaagaattactctctagagaacataataattgatccttatttcaatcgcatcacttctttgatcaaaagctgcggagatgatacatctgaaattgatgtcaaacctgatggttcctggagagttaagggcagacctaaactgaaggaccttacacagtggcatctaccagatggtactctctctctgtccacagatacagcagccaaacctggaatgtgcattgtaaagcacgaggtcaaagaagagccattgtctgaagaggtgggatgtcatcttaagttgggacttaggaaaaaaagcaatggccagtgggaaattagcaagagagtggatgctgatctggtgccgtcttctggtaacgaccatgaccattcaggacacgatgaaaacaaaaactgcatcactcactcaagcaatattgatgatacaaacattgcagatgaaggttataatttagagccagcaacaaatggttatcccatgacccatgtccatgatcttgactcttcatccgcagacgaaaatggtcctccagcatcgacagggcaggatatagtagttttgagtgactcggatgatgatgctatcatggtgttgtctcccggtgctgtgaactgtggctcgatgcataacactggaaatctgtttccacccaacacacctgaaaatttaggagtgtgtagtggagaaactggtggatgccccaaggagacatcattccttgcattaaaagaagattttggtgatccggggttgtcattttgggaaagtcatggtagtccccgagatgcttctacttcccagatccccgatgccagtacaaaggcagtagataatccaggtgaagtggacaactaccctgccaatgatcaatctaagcaagggcaagtttctggggctgattttggagtagcagcaaatccggtgccattggaagatgggcatgatagcgcactgcaaccttgttcaatgagtgaaagagatagtgccatgggtcttgctagcctgggagcggatactcaatcatgtgttgatgtccattctgacaattggacatctgtcagcattagtggccgtgatgaagttttaactgctgccaaaattgcatctaggaaaaggagcaatcctggagacagaatagaagatttagatgcttcacttgtgggaagcccaaaccaagatgagtgcagcggagggagatgttcagttcgaccgagattgatactagagatttcctcagattctgattagcacacatttgtgttggctgatgcctgcatgacttggagaaaaggaagggggtggatgtgatgctgtctaacgcggtcagcgaactggcaagcagctagaggcctctcctctatcctgtaattggagatcccatctctgttaggtggtagaacgtgacaccaggagcaacatatagagtggcataatagagctgaaccatatatacatgcagtgtaggcaattttgtaccatatatgtcatgaaccgaggtggcagttagttgatgtaaatatgctccctctctgtttttctatattattggctgaaaggagaggggaggatgcatgcttagtccggcctggttatttatcatttatttatgatatataatgaaaacggagtaccaggtaggtcgcagcggtagagaggtgcaaatctaatctaatcttgtgtcagacagggtcttcaaatcatatctttacttatgtttaagatttttattaatttaggggtgtttgaaa

SEQ ID NO: 37567 - DNA, 2889 bp, Zea Mays
cttcaagacccgattccactcgcgtgtctgcccgccggccagacctcgaggaaacaaggccttacttccttgattacatggcgtcgccggacgaccccgtgctctccgcttgcaaggacctagtggacagagttatggcagtgttgttgagccagcaagatcaagcctttgaaacgaatggcttaccaaaggcaaaatcagcggtgaaaatagtggaggacacatttagaaaaatgcaagaccctacaaatactgttgcagtctcaaggagccacgaattaggagacagtgttacgtgtaaaaagaaaccggatgattctgctcaggcagttaaggttcgttgcccttgtggtgactccaagccaaatgattccatgattaagtgtattgatccacaatgcaacatatggcaacatgttggctgcgtcgtcatacccgatactgagaaatccgcggacaatatttctcctgaattaccttcctgcttttattgtgaagtgtgccgacttagcagggctgatcctttttgggtcactgtgaaccatctgttactccctatcttaataggaccctctactgtagcagcagacgggtttggtgtatccttctcagtgacaaagtaccttttaggatgcactggcctttacactctgacatgcaagttaatggtatttatgttagggtggttaacaggcaacccacacaaaagttaggggccaatggtagagacgatggtccactattaacagattacctgaaggagggacctaacaagatttctctatcaagaaatgacactcgtactttctgtttgggtatcagaattgccaagaggagatctctagaacaggtcctaaatttggtgccaaaggaacaagatggtgaaaacttcgatgacgcccttgcacgtgtgcgtcgctgtgttggtggtggagctgaggcaaataatgcagacagtgatagtgatatcgaagttgtggctgattttgtctctgtgaatcttcggtgccctatgactgcttcaaggatacagatcgctggtaggttcaagtcctgtgctcacatgggctgctttgatttagaagcttttattgaaataaaccaacgttcccggaagtggcaatgcccaatatgcctgaagaattactctctagagaacataataattgatccttatttcaatcgcatcacttctttgatcaaaagctgcggagatgatacatctgaaattgatgtcaaacctgatggttcctggagagttaagggcagacctaaactgaaggaccttacacagtggcatctaccagatggtactctctctctgtccacagatacagcagccaaacctggaatgtgcattgtaaagcacgaggtcaaagaagagccattgtctgaagaggtgggatgtcatcttaagttgggacttaggaaaaaaagcaatggccagtgggaaattagcaagagagtggatgctgatctggtgccgtcttctggtaacgaccatgaccattcaggacacgatgaaaacaaaaactgcatcactcactcaagcaatattgatgatacaaacattgcagatgaaggttataatttagagccagcaacaaatggttatcccatgacccatgtccatgatcttgactcttcatccgcagacgaaaatggtcctccagcatcgacagggcaggatatagtagttttgagtgactcggatgatgatgctatcatggtgttgtctcccggtgctgtgaactgtggctcgatgcataacactggaaatctgtttccacccaacacacctgaaaatttaggagtgtgtagtggagaaactggtggatgccccaaggagacatcattccttgcattaaaagaagattttggtgatccggggttgtcattttgggaaagtcatggtagtccccgagatgcttctacttcccagatccccgatgccagtacaaaggcagtagataatccaggtgaagtggacaactaccctgccaatgatcaatctaagcaagggcaagtttctggggctgattttggagtagcagcaaatccggtgccattggaagatgggcatgatagcgcactgcaaccttgttcaatgagtgaaagagatagtgccatgggtcttgctagcctgggagcggatactcaatcatgtgttgatgtccattctgacaattggacatctgtcagcattagtggccgtgatgaagttttaactgctgccaaaattgcatctaggaaaaggagcaatcctggagacagaatagaagatttagatgcttcacttgtgggaagcccaaaccaagatgagtgcagcggagggagatgttcagttcgaccgagattgatactagagatttcctcagattctgattagcacacatttgtgttggctgatgcctgcatgacttggagaaaaggaagggggtggatgtgatgctgtctaacgcggtcagcgaactggcaagcagctagaggcctctcctctatcctgtaattggagatcccatctctgttaggtggtagaacgtgacaccaggagcaacatatagagtggcataatagagctgaaccatatatacatgcagtgtaggcaattttgtaccatatatgtcatgaaccgaggtggcagttagttgatgtaaatatgctccctctctgtttttctatattattggctgaaaggagaggggaggatgcatgcttagtccggcctggttatttatcatttatttatgatatataatgaaaacggagtaccaggtaggtcgcagcggtagagaggtgcaaatctaatctaatcttgtgtcagacagggtcttcaaatcatatctttacttatgtttaagatttttattaatttaggggtgtttgaaa

SEQ ID NO: 37568 - DNA, 2977 bp, Zea Mays
cttcaagacccgattccactcgcgtgtctgcccgccggccagacctcgaggaaacaaggccttacttccttgattacatggcgtcgccggacgaccccgtgctctccgcttgcaaggacctagtggacagagttatggcagtgttgttgagccagcaagatcaagcctttgaaacgaatggcttaccaaaggcaaaatcagcggtgaaaatagtggaggacacatttagaaaaatgcaagaccctacaaatactgttgcagtctcaaggagccacgaattaggagacagtgttacgtgtaaaaagaaaccggatgattctgctcaggcagttaaggttcgttgcccttgtggtgactccaagccaaatgattccatgattaagtgtattgatccacaatgcaacatatggcaacatgttggctgcgtcgtcatacccgatactgagaaatccgcggacaatatttctcctgaattaccttcctgcttttattgtgaagtgtgccgacttagcagggctgatcctttttgggtcactgtgaaccatctgttactccctatcttaataggaccctctactgtagcagcagacgggtcatacactgtacagtataccgcaaaaagctttcagctttcaagagctaatagagaaattctgcagcaagctgaatgcaatattcaggtttggtgtatccttctcagtgacaaagtaccttttaggatgcactggcctttacactctgacatgcaagttaatggtatttatgttagggtggttaacaggcaacccacacaaaagttaggggccaatggtagagacgatggtccactattaacagattacctgaaggagggacctaacaagatttctctatcaagaaatgacactcgtactttctgtttgggtatcagaattgccaagaggagatctctagaacaggtcctaaatttggtgccaaaggaacaagatggtgaaaacttcgatgacgcccttgcacgtgtgcgtcgctgtgttggtggtggagctgaggcaaataatgcagacagtgatagtgatatcgaagttgtggctgattttgtctctgtgaatcttcggtgccctatgactgcttcaaggatacagatcgctggtaggttcaagtcctgtgctcacatgggctgctttgatttagaagcttttattgaaataaaccaacgttcccggaagtggcaatgcccaatatgcctgaagaattactctctagagaacataataattgatccttatttcaatcgcatcacttctttgatcaaaagctgcggagatgatacatctgaaattgatgtcaaacctgatggttcctggagagttaagggcagacctaaactgaaggaccttacacagtggcatctaccagatggtactctctctctgtccacagatacagcagccaaacctggaatgtgcattgtaaagcacgaggtcaaagaagagccattgtctgaagaggtgggatgtcatcttaagttgggacttaggaaaaaaagcaatggccagtgggaaattagcaagagagtggatgctgatctggtgccgtcttctggtaacgaccatgaccattcaggacacgatgaaaacaaaaactgcatcactcactcaagcaatattgatgatacaaacattgcagatgaaggttataatttagagccagcaacaaatggttatcccatgacccatgtccatgatcttgactcttcatccgcagacgaaaatggtcctccagcatcgacagggcaggatatagtagttttgagtgactcggatgatgatgctatcatggtgttgtctcccggtgctgtgaactgtggctcgatgcataacactggaaatctgtttccacccaacacacctgaaaatttaggagtgtgtagtggagaaactggtggatgccccaaggagacatcattccttgcattaaaagaagattttggtgatccggggttgtcattttgggaaagtcatggtagtccccgagatgcttctacttcccagatccccgatgccagtacaaaggcagtagataatccaggtgaagtggacaactaccctgccaatgatcaatctaagcaagggcaagtttctggggctgattttggagtagcagcaaatccggtgccattggaagatgggcatgatagcgcactgcaaccttgttcaatgagtgaaagagatagtgccatgggtcttgctagcctgggagcggatactcaatcatgtgttgatgtccattctgacaattggacatctgtcagcattagtggccgtgatgaagttttaactgctgccaaaattgcatctaggaaaaggagcaatcctggagacagaatagaagatttagatgcttcacttgtgggaagcccaaaccaagatgagtgcagcggagggagatgttcagttcgaccgagattgatactagagatttcctcagattctgattagcacacatttgtgttggctgatgcctgcatgacttggagaaaaggaagggggtggatgtgatgctgtctaacgcggtcagcgaactggcaagcagctagaggcctctcctctatcctgtaattggagatcccatctctgttaggtggtagaacgtgacaccaggagcaacatatagagtggcataatagagctgaaccatatatacatgcagtgtaggcaattttgtaccatatatgtcatgaaccgaggtggcagttagttgatgtaaatatgctccctctctgtttttctatattattggctgaaaggagaggggaggatgcatgcttagtccggcctggttatttatcatttatttatgatatataatgaaaacggagtaccaggtaggtcgcagcggtagagaggtgcaaatctaatctaatcttgtgtcagacagggtcttcaaatcatatctttacttatgtttaagatttttattaatttaggggtgtttgaaa

SEQ ID NO: 37569 - DNA, 3078 bp, Zea Mays
actgcttctcttcaagacccgattccactcgcgtgtctgcccgccggccagacctcgaggaaacaaggccttacttccttgattacatggcgtcgccggacgaccccgtgctctccgcttgcaagaaaaacttgagccacttcagaataaaagagctcaaggatgttctacaccaacttggactttcaaagcaaggaaagaagcaggacctagtggacagagttatggcagtgttgttgagccagcaagatcaaggcattaatgaaatcttggcaaactatcgcttgttgcttcctgtttcaagaaaaatgcaagaccctacaaatactgttgcagtctcaaggagccacgaattaggagacagtgttacgtgtaaaaagaaaccggatgattctgctcaggcagttaaggttcgttgcccttgtggtgactccaagccaaatgattccatgattaagtgtattgatccacaatgcaacatatggcaacatgttggctgcgtcgtcatacccgatactgagaaatccgcggacaatatttctcctgaattaccttcctgcttttattgtgaagtgtgccgacttagcagggctgatcctttttgggtcactgtgaaccatctgttactccctatcttaataggaccctctactgtagcagcagacgggtcatacactgtacagtataccgcaaaaagctttcagctttcaagagctaatagagaaattctgcagcaagctgaatgcaatattcaggtttggtgtatccttctcagtgacaaagtaccttttaggatgcactggcctttacactctgacatgcaagttaatggtatatgcagtggcttattatgtatagtatttatgttagggtggttaacaggcaacccacacaaaagttaggggccaatggtagagacgatggtccactattaacagattacctgaaggagggacctaacaagatttctctatcaagaaatgacactcgtactttctgtttgggtatcagaattgccaagaggagatctctagaacaggtcctaaatttggtgccaaaggaacaagatggtgaaaacttcgatgacgcccttgcacgtgtgcgtcgctgtgttggtggtggagctgaggcaaataatgcagacagtgatagtgatatcgaagttgtggctgattttgtctctgtgaatcttcggtgccctatgactgcttcaaggatacagatcgctggtaggttcaagtcctgtgctcacatgggctgctttgatttagaagcttttattgaaataaaccaacgttcccggaagtggcaatgcccaatatgcctgaagaattactctctagagaacataataattgatccttatttcaatcgcatcacttctttgatcaaaagctgcggagatgatacatctgaaattgatgtcaaacctgatggttcctggagagttaagggcagacctaaactgaaggaccttacacagtggcatctaccagatggtactctctctctgtccacagatacagcagccaaacctggaatgtgcattgtaaagcacgaggtcaaagaagagccattgtctgaagaggtgggatgtcatcttaagttgggacttaggaaaaaaagcaatggccagtgggaaattagcaagagagtggatgctgatctggtgccgtcttctggtaacgaccatgaccattcaggacacgatgaaaacaaaaactgcatcactcactcaagcaatattgatgatacaaacattgcagatgaaggttataatttagagccagcaacaaatggttatcccatgacccatgtccatgatcttgactcttcatccgcagacgaaaatggtcctccagcatcgacagggcaggatatagtagttttgagtgactcggatgatgatgctatcatggtgttgtctcccggtgctgtgaactgtggctcgatgcataacactggaaatctgtttccacccaacacacctgaaaatttaggagtgtgtagtggagaaactggtggatgccccaaggagacatcattccttgcattaaaagaagattttggtgatccggggttgtcattttgggaaagtcatggtagtccccgagatgcttctacttcccagatccccgatgccagtacaaaggcagtagataatccaggtgaagtggacaactaccctgccaatgatcaatctaagcaagggcaagtttctggggctgattttggagtagcagcaaatccggtgccattggaagatgggcatgatagcgcactgcaaccttgttcaatgagtgaaagagatagtgccatgggtcttgctagcctgggagcggatactcaatcatgtgttgatgtccattctgacaattggacatctgtcagcattagtggccgtgatgaagttttaactgctgccaaaattgcatctaggaaaaggagcaatcctggagacagaatagaagatttagatgcttcacttgtgggaagcccaaaccaagatgagtgcagcggagggagatgttcagttcgaccgagattgatactagagatttcctcagattctgattagcacacatttgtgttggctgatgcctgcatgacttggagaaaaggaagggggtggatgtgatgctgtctaacgcggtcagcgaactggcaagcagctagaggcctctcctctatcctgtaattggagatcccatctctgttaggtggtagaacgtgacaccaggagcaacatatagagtggcataatagagctgaaccatatatacatgcagtgtaggcaattttgtaccatatatgtcatgaaccgaggtggcagttagttgatgtaaatatgctccctctctgtttttctatattattggctgaaaggagaggggaggatgcatgcttagtccggcctggttatttatcatttatttatgatatataatgaaaacggagtaccaggtaggtcgcagcggtagagaggtgcaaatctaatctaatcttgtgtcagacagggtcttcaaatcatatctttacttatgtttaagatttttattaatttaggggtgtttgaaa

SEQ ID NO: 37570 - DNA, 3076 bp, Zea Mays
gggggcgccactgcttctcttcaagacccgattccactcgcgtgtctgcccgccggccagacctcgaggaaacaaggccttacttccttgattacatggcgtcgccggacgaccccgtgctctccgcttgcaagaaaaacttgagccacttcagaataaaagagctcaaggatgttctacaccaacttggactttcaaagcaaggaaagaagcaggacctagtggacagagttatggcagtgttgttgagccagcaagatcaagcctttgaaacgaatggcttaccaaaggcaaaatcagcggtgaaaatagtggaggacacatttagaaaaatgcaagaccctacaaatactgttgcagtctcaaggagccacgaattaggagacagtgttacgtgtaaaaagaaaccggatgattctgctcaggcagttaaggttcgttgcccttgtggtgactccaagccaaatgattccatgattaagtgtattgatccacaatgcaacatatggcaacatgttggctgcgtcgtcatacccgatactgagaaatccgcggacaatatttctcctgaattaccttcctgcttttattgtgaagtgtgccgacttagcagggctgatcctttttgggtcactgtgaaccatctgttactccctatcttaataggaccctctactgtagcagcagacgggtcatacactgtacagtataccgcaaaaagctttcagctttcaagagctaatagagaaattctgcagcaagctgaatgcaatattcaggtttggtgtatccttctcagtgacaaagtaccttttaggatgcactggcctttacactctgacatgcaagttaatggtatttatgttagggtggttaacaggcaacccacacaaaagttaggggccaatggtagagacgatggtccactattaacagattacctgaaggagggacctaacaagatttctctatcaagaaatgacactcgtactttctgtttgggtatcagaattgccaagaggagatctctagaacaggtcctaaatttggtgccaaaggaacaagatggtgaaaacttcgatgacgcccttgcacgtgtgcgtcgctgtgttggtggtggagctgaggcaaataatgcagacagtgatagtgatatcgaagttgtggctgattttgtctctgtgaatcttcggtgccctatgactgcttcaaggatacagatcgctggtaggttcaagtcctgtgctcacatgggctgctttgatttagaagcttttattgaaataaaccaacgttcccggaagtggcaatgcccaatatgcctgaagaattactctctagagaacataataattgatccttatttcaatcgcatcacttctttgatcaaaagctgcggagatgatacatctgaaattgatgtcaaacctgatggttcctggagagttaagggcagacctaaactgaaggaccttacacagtggcatctaccagatggtactctctctctgtccacagatacagcagccaaacctggaatgtgcattgtaaagcacgaggtcaaagaagagccattgtctgaagaggtgggatgtcatcttaagttgggacttaggaaaaaaagcaatggccagtgggaaattagcaagagagtggatgctgatctggtgccgtcttctggtaacgaccatgaccattcaggacacgatgaaaacaaaaactgcatcactcactcaagcaatattgatgatacaaacattgcagatgaaggttataatttagagccagcaacaaatggttatcccatgacccatgtccatgatcttgactcttcatccgcagacgaaaatggtcctccagcatcgacagggcaggatatagtagttttgagtgactcggatgatgatgctatcatggtgttgtctcccggtgctgtgaactgtggctcgatgcataacactggaaatctgtttccacccaacacacctgaaaatttaggagtgtgtagtggagaaactggtggatgccccaaggagacatcattccttgcattaaaagaagattttggtgatccggggttgtcattttgggaaagtcatggtagtccccgagatgcttctacttcccagatccccgatgccagtacaaaggcagtagataatccaggtgaagtggacaactaccctgccaatgatcaatctaagcaagggcaagtttctggggctgattttggagtagcagcaaatccggtgccattggaagatgggcatgatagcgcactgcaaccttgttcaatgagtgaaagagatagtgccatgggtcttgctagcctgggagcggatactcaatcatgtgttgatgtccattctgacaattggacatctgtcagcattagtggccgtgatgaagttttaactgctgccaaaattgcatctaggaaaaggagcaatcctggagacagaatagaagatttagatgcttcacttgtgggaagcccaaaccaagatgagtgcagcggagggagatgttcagttcgaccgagattgatactagagatttcctcagattctgattagcacacatttgtgttggctgatgcctgcatgacttggagaaaaggaagggggtggatgtgatgctgtctaacgcggtcagcgaactggcaagcagctagaggcctctcctctatcctgtaattggagatcccatctctgttaggtggtagaacgtgacaccaggagcaacatatagagtggcataatagagctgaaccatatatacatgcagtgtaggcaattttgtaccatatatgtcatgaaccgaggtggcagttagttgatgtaaatatgctccctctctgtttttctatattattggctgaaaggagaggggaggatgcatgcttagtccggcctggttatttatcatttatttatgatatataatgaaaacggagtaccaggtaggtcgcagcggtagagaggtgcaaatctaatctaatcttgtgtcagacagggtcttcaaatcatatctttacttatgtttaagatttttattaatttaggggtgtttgaaa

SEQ ID NO: 37571 - DNA, 3099 bp, Zea Mays
ctgttggcttggctagcgctttcgtcttcctccgctccactcgatgcacgcacgtggagaagaacaccgccgccgccgccagcgctaccgggttttcgcagcaaaaaaataaaaaaaggaaaaggagagggtggggtgtaggcaggggggggggggggggggggggggcgccactgcttctcttcaagacccgattccactcgcgtgtctgcccgccggccagacctcgaggaaacaaggccttacttccttgattacatggcgtcgccggacgaccccgtgctctccgcttgcaagaaaaacttgagccacttcagaataaaagagctcaaggatgttctacaccaacttggactttcaaagcaaggaaagaagcaggacctagtggacagagttatggcagtgttgttgagccagcaagatcaagcctttgaaacgaatggcttaccaaaggcaaaatcagcggtgaaaatagtggaggacacatttagaaaaatgcaagaccctacaaatactgttgcagtctcaaggagccacgaattaggagacagtgttacgtgtaaaaagaaaccggatgattctgctcaggcagttaaggttcgttgcccttgtggtgactccaagccaaatgattccatgattaagtttttgggtcactgtgaaccatctgttactccctatcttaataggaccctctactgtagcagcagacgggtcatacactgtacagtataccgcaaaaagctttcagctttcaagagctaatagagaaattctgcagcaagctgaatgcaatattcaggtttggtgtatccttctcagtgacaaagtaccttttaggatgcactggcctttacactctgacatgcaagttaatggtatttatgttagggtggttaacaggcaacccacacaaaagttaggggccaatggtagagacgatggtccactattaacagattacctgaaggagggacctaacaagatttctctatcaagaaatgacactcgtactttctgtttgggtatcagaattgccaagaggagatctctagaacaggtcctaaatttggtgccaaaggaacaagatggtgaaaacttcgatgacgcccttgcacgtgtgcgtcgctgtgttggtggtggagctgaggcaaataatgcagacagtgatagtgatatcgaagttgtggctgattttgtctctgtgaatcttcggtgccctatgactgcttcaaggatacagatcgctggtaggttcaagtcctgtgctcacatgggctgctttgatttagaagcttttattgaaataaaccaacgttcccggaagtggcaatgcccaatatgcctgaagaattactctctagagaacataataattgatccttatttcaatcgcatcacttctttgatcaaaagctgcggagatgatacatctgaaattgatgtcaaacctgatggttcctggagagttaagggcagacctaaactgaaggaccttacacagtggcatctaccagatggtactctctctctgtccacagatacagcagccaaacctggaatgtgcattgtaaagcacgaggtcaaagaagagccattgtctgaagaggtgggatgtcatcttaagttgggacttaggaaaaaaagcaatggccagtgggaaattagcaagagagtggatgctgatctggtgccgtcttctggtaacgaccatgaccattcaggacacgatgaaaacaaaaactgcatcactcactcaagcaatattgatgatacaaacattgcagatgaaggttataatttagagccagcaacaaatggttatcccatgacccatgtccatgatcttgactcttcatccgcagacgaaaatggtcctccagcatcgacagggcaggatatagtagttttgagtgactcggatgatgatgctatcatggtgttgtctcccggtgctgtgaactgtggctcgatgcataacactggaaatctgtttccacccaacacacctgaaaatttaggagtgtgtagtggagaaactggtggatgccccaaggagacatcattccttgcattaaaagaagattttggtgatccggggttgtcattttgggaaagtcatggtagtccccgagatgcttctacttcccagatccccgatgccagtacaaaggcagtagataatccaggtgaagtggacaactaccctgccaatgatcaatctaagcaagggcaagtttctggggctgattttggagtagcagcaaatccggtgccattggaagatgggcatgatagcgcactgcaaccttgttcaatgagtgaaagagatagtgccatgggtcttgctagcctgggagcggatactcaatcatgtgttgatgtccattctgacaattggacatctgtcagcattagtggccgtgatgaagttttaactgctgccaaaattgcatctaggaaaaggagcaatcctggagacagaatagaagatttagatgcttcacttgtgggaagcccaaaccaagatgagtgcagcggagggagatgttcagttcgaccgagattgatactagagatttcctcagattctgattagcacacatttgtgttggctgatgcctgcatgacttggagaaaaggaagggggtggatgtgatgctgtctaacgcggtcagcgaactggcaagcagctagaggcctctcctctatcctgtaattggagatcccatctctgttaggtggtagaacgtgacaccaggagcaacatatagagtggcataatagagctgaaccatatatacatgcagtgtaggcaattttgtaccatatatgtcatgaaccgaggtggcagttagttgatgtaaatatgctccctctctgtttttctatattattggctgaaaggagaggggaggatgcatgcttagtccggcctggttatttatcatttatttatgatatataatgaaaacggagtaccaggtaggtcgcagcggtagagaggtgcaaatctaatctaatcttgtgtcagacagggtcttcaaatcatatctttacttatgtttaagatttttattaatttaggggtgtttgaaa

SEQ ID NO: 37572 - DNA, 2392 bp, Zea Mays
atggcgtcgccggacgaccccgtgctctccgcttgcaagaaaaacttgagccacttcagaataaaagagctcaaggatgttctacaccaacttggactttcaaagcaaggaaagaagcaggacctagtggacagagttatggcagtgttgttgagccagcaagatcaaggcattaatgaaatcttggcaaactatcgcttgttgcttcctgtttcaagaaaaatgcaagaccctacaaatactgttgcagtctcaaggagccacgaattaggagacagtgttacgtgtaaaaagaaaccggatgattctgctcaggcagttaaggttcgttgcccttgtggtgactccaagccaaatgattccatgattaagtgtattgatccacaatgcaacatatggcaacatgttggctgcgtcgtcatacccgatactgagaaatccgcggacaatatttctcctgaattaccttcctgcttttattgtgaagtgtgccgacttagcagggctgatcctttttgggtcactgtgaaccatctgttactccctatcttaataggaccctctactgtagcagcagacgggtcatacactgtacagtataccgcaaaaagctttcagctttcaagagctaatagagaaattctgcagcaagctgaatgcaatattcaggtttggtgtatccttctcagtgacaaagtaccttttaggatgcactggcctttacactctgacatgcaagttaatggtatttatgttagggtggttaacaggcaacccacacaaaagttaggggccaatggtagagacgatggtccactattaacagattacctgaaggagggacctaacaagatttctctatcaagaaatgacactcgtactttctgtttgggtatcagaattgccaagaggagatctctagaacaggtcctaaatttggtgccaaaggaacaagatggtgaaaacttcgatgacgcccttgcacgtgtgcgtcgctgtgttggtggtggagctgaggcaaataatgcagacagtgatagtgatatcgaagttgtggctgattttgtctctgtgaatcttcggtgccctatgactgcttcaaggatacagatcgctggtaggttcaagtcctgtgctcacatgggctgctttgatttagaagcttttattgaaataaaccaacgttcccggaagtggcaatgcccaatatgcctgaagaattactctctagagaacataataattgatccttatttcaatcgcatcacttctttgatcaaaagctgcggagatgatacatctgaaattgatgtcaaacctgatggttcctggagagttaagggcagacctaaactgaaggaccttacacagtggcatctaccagatggtactctctctctgtccacagatacagcagccaaacctggaatgtgcattgtaaagcacgaggtcaaagaagagccattgtctgaagaggtgggatgtcatcttaagttgggacttaggaaaaaaagcaatggccagtgggaaattagcaagagagtggatgctgatctggtgccgtcttctggtaacgaccatgaccattcaggacacgatgaaaacaaaaactgcatcactcactcaagcaatattgatgatacaaacattgcagatgaaggttataatttagagccagcaacaaatggttatcccatgacccatgtccatgatcttgactcttcatccgcagacgaaaatggtcctccagcatcgacagggcaggatatagtagttttgagtgactcggatgatgatgctatcatggtgttgtctcccggtgctgtgaactgtggctcgatgcataacactggaaatctgtttccacccaacacacctgaaaatttaggagtgtgtagtggagaaactggtggatgccccaaggagacatcattccttgcattaaaagaagattttggtgatccggggttgtcattttgggaaagtcatggtagtccccgagatgcttctacttcccagatccccgatgccagtacaaaggcagtagataatccaggtgaagtggacaactaccctgccaatgatcaatctaagcaagggcaagtttctggggctgattttggagtagcagcaaatccggtgccattggaagatgggcatgatagcgcactgcaaccttgttcaatgagtgaaagagatagtgccatgggtcttgctagcctgggagcggatactcaatcatgtgttgatgtccattctgacaattggacatctgtcagcattagtggccgtgatgaagttttaactgctgccaaaattgcatctaggaaaaggagcaatcctggagacagaatagaagatttagatgatgattttgaatctgcgcccattg

SEQ ID NO: 37573 - DNA, 1046 bp, Zea Mays
atggcgtcgccggacgaccccgtgctctccgcttgcaagaaaaacttgagccacttcagaataaaagagctcaaggatgttctacaccaacttggactttcaaagcaaggaaagaagcaggacctagtggacagagttatggcagtgttgttgagccagcaagatcaaggcattaatgaaatcttggcaaactatcgcttgttgcttcctgtttcaagaaaaatgcaagaccctacaaatactgttgcagtctcaaggagccacgaattaggagacagtgttacgtgtaaaaagaaaccggatgattctgctcaggcagttaaggttcgttgcccttgtggtgactccaagccaaatgattccatgattaagtgtattgatccacaatgcaacatatggcaacatgttggctgcgtcgtcatacccgatactgagaaatccgcggacaatatttctcctgaattaccttcctgcttttattgtgaagtgtgccgacttagcagggctgatcctttttgggtcactgtgaaccatctgttactccctatcttaataggaccctctactgtagcagcagacgggtttggtgtatccttctcagtgacaaagtaccttttaggatgcactggcctttacactctgacatgcaagttaatggtatttatgttagggtggttaacaggcaacccacacaaaagttaggggccaatggtagagacgatggtccactattaacagattacctgaaggagggacctaacaagatttctctatcaagaaatgacactcgtactttctgtttgggtatcagaattgccaagaggagatctctagaacaggtcctaaatttggtgccaaaggaacaagatggtgaaaacttcgatgacgcccttgcacgtgtgcgtcgctgtgttggtggtggagctgaggcaaataatgcagacagtgatagtgatatcgaagttgtggctgattttgtctctgtgaatcttcggtgccctgtaagcaatctggttattactgtggatgctttagatcctcaatga

SEQ ID NO: 37574 - DNA, 1143 bp, Zea Mays
cttctcttcaagacccgattccactcgcgtgtctgcccgccggccagacctcgaggaaacaaggccttacttccttgattacatggcgtcgccggacgaccccgtgctctccgcttgcaagaaaaacttgagccacttcagaataaaagagctcaaggatgttctacaccaacttggactttcaaagcaaggaaagaagcaggacctagtggacagagttatggcagtgttgttgagccagcaagatcaagcctttgaaacgaatggcttaccaaaggcaaaatcagcggtgaaaatagtggaggacacatttagaaaaatgcaagaccctacaaatactgttgcagtctcaaggagccacgaattaggagacagtgttacgtgtaaaaagaaaccggatgattctgctcaggcagttaaggttcgttgcccttgtggtgactccaagccaaatgattccatgattaagtgtattgatccacaatgcaacatatggcaacatgttggctgcgtcgtcatacccgatactgagaaatccgcggacaatatttctcctgaattaccttcctgcttttattgtgaagtgtgccgacttagcagggctgatcctttttgggtcactgtgaaccatctgttactccctatcttaataggaccctctactgtagcagcagacgggtttggtgtatccttctcagtgacaaagtaccttttaggatgcactggcctttacactctgacatgcaagttaatggtatttatgttagggtggttaacaggcaacccacacaaaagttaggggccaatggtagagacgatggtccactattaacagattacctgaaggagggacctaacaagatttctctatcaagaaatgacactcgtactttctgtttgggtatcagaattgccaagaggagatctctagaacaggtcctaaatttggtgccaaaggaacaagatggtgaaaacttcgatgacgcccttgcacgtgtgcgtcgctgtgttggtggtggagctgaggcaaataatgcagacagtgatagtgatatcgaagttgtggctgattttgtctctgtgaatcttcggtgccctgtaagcaatctggttattactgtggatgctttagatcctcaatga

SEQ ID NO: 37575 - DNA, 3208 bp, Zea Mays
ctgcagaaatggacctttgttatgggccgtaacgaagcccacatcctatccgacaggcagaagcagagcacccccaccactcgcctccaccgcacgcaagcagacgtcccaccgtccccatggccaccatggcttccaccgccaccgctgctgcttctctccgcctcgccttccctctcctctccgcgccggcttcctcctcgtcgtactccaatacccttcgcttccctctccgccgccgcagctcctgccgccccctcgccgtcgccgccttcaagaagctctccgaggcgtcccccgtgcccatccctcaggagcccacccaacccctcctggtcgacgaagacgccctgcctcctaaggccggggtctacggcgtctacgacgccgccggcgagctgcagttcgtcgggatttcgcgcaacgtgagggccagcgtcgagggccaccgccggaaggtccccgccaacctctgcgcctccgtcaaggtcgcagtatcagatgaggaggcaccagatcgatctgcccttaacaatgcctggaaatcatggatggaagaacacatagcggccacgggcaaggcgccaccagggaacgttgcaggaaaccacacctgggttggtgccccccagcggcccccggacctgcgtctgacgcctggacgccacgtccagctgacggttccgctggagcagctgatagaccggctggtgaaggagaacagggtggtggccttcatcaaaggatcaaggagcgctccccagtgcgggttctcgcagagggtggtgggtatcctggaagcgcacgccgcggatttcgtgaccgtggatgtgctcgacgaggagcacaaccacgggctgagagaaaccctcaaggcttacagcagctggccgacgttccctcaggtcttcgtcggaggggagctcgtgggaggctgcgatatcatttcgtccatggctgagagaggggagcttgccgccctattgattcagaaatgaagacttgatttagtacagcgacttggaataaatgtttgcttccatgggtgactgatccgttgcttgcacacgtagcatgccatccaagttggtatctgtggctttcggcaaggaaagaaagaaaccgttgctctgcgtctggacagtccggtatcgatttaattatatatatatatatatatatatatatatatatatatttatatacttattagaataaaattaaaacatgtgcatgcaaatgtcagcagtgtacgatggacgtggtacgtcccaaattgaaaagcaaagcatgtggtgtggtgtgggtggttgaattggatggttggtttgcctgctggtgctgtttataagtagaagtagccggccgcaagagacgccgcgcctggagacggcacgcgcacacacacacacacacacacacatattttgagaacggagagggagcgagcctcttacgttacgccttccgttcacgtcctagcaaatcaaaccaattccatctctctctttctctctctctccccgatccatcttgtccaactcctcgatcggccgttcatatgtttatgcgttagcaaaccaattcccattccattactccggcggcggccgcaccaccgccaaaaaccaatgcagatgacggcggatcaggaatcggcggccaaggcgacggaggacgacacgatgagcggccggcggcgggtggacgacgaccacgaccacgacgtcgtcttcgacgccgggaaaccgccgccgttccgcatcggcgacgtgcgggcggcggtgccggagcactgctggcgcaagaacccctggcggtcgctgtggtacgtggcgcgggacgtggcggtggtggcggcgctgggcgcggcggcggcgggcatggacagttgggcggtgtggccgctgtactgggcggcgcaggggaccatgttctgggcgctcttcgtgctgggacacgactgcttctcggacagcgcgacgctcaacagcgtcgtgggccatctccttcactccttcatcctcgtcccttaccatggatggaggatcagccacagaacacaccatcagaaccacggccacatccacagggacgagtcatggcacccgatcacggagaagctgtaccggcaactagagccacgcaccaagaagctgagattcacggtgcccttcccgctgctcgcattccccgtctacctcttgtacaggagccccggcaagtcgggctcccacttccttcccagcagcgacctgttcagccccaaggagaagagcgacgtcatggtgtcaaccacctgctggtgcatcatgctcgcctccctcctcgccatggcgtgcgcgttcggcccactccaggtgctcaagatgtacggcatcccatacctggtgttcgtgatgtggcttgacctggtgacgtacctgcaccaccatgggcaccatcagcttcctctcccctggtaccgcggccaggagtggagctacctgcgcggcggcctcaccacggtggacagggactacggctggatcaacaacgtccaccacgacatcggcacccacgtcattcatcacctcttcccgcagatcccgcactaccatctcgtcgaagctaccaaggcagccaagccggtgctggggcgatactaccgggagccgcacaagtcagggccgcttccacttcacctcctcgtcgtgctcctcaggagcctcagagtcgaccacttcgtcagcgaccacggggatgtcgtctactaccaaaccgaccatgacttgaacactagcagtgctcatcgctgggccaaccaaaaccaccataagcaaaaataatggtttctcaaacacagagacggcctgatggttgctgttgttattgctccaaggactcacagtacaatatataggcatgcgtatgagaaagccaaataattaaagagaagggagggatcctctagctgaagcaatcaattaattacagtatcccactagatcgagtttgctaagcattactcctactatatacaatatgtactgttgcttgtattaattagctagatgttgtgttggagccttggatgatgaaactaaaggatgagccactgaaatttgtaccatttgttcggaacttcatttatatggctactgatgatatatcacatctacacagttttaggatgatcacatctagagtaaaatgcataatcaatctc

SEQ ID NO: 37576 - DNA, 3220 bp, Zea Mays
ctgcagaaatggacctttgttatgggccgtaacgaagcccacatcctatccgacaggcagaagcagagcacccccaccactcgcctccaccgcacgcaagcagacgtcccaccgtccccatggccaccatggcttccaccgccaccgctgctgcttctctccgcctcgccttccctctcctctccgcgccggcttcctcctcgtcgtactccaatacccttcgcttccctctccgccgccgcagctcctgccgccccctcgccgtcgccgccttcaagaagctctccgaggcgtcccccgtgcccatccctcaggagcccacccaacccctcctggtcgacgaagacgccctgcctcctaaggccggggtctacggcgtctacgacgccgccggcgagctgcagttcgtcgggatttcgcgcaacgtgagggccagcgtcgagggccaccgccggaaggtccccgccaacctctgcgcctccgtcaaggtcgcagtatcagatgaggaggcaccagatcgatctgcccttaacaatgcctggaaatcatggatggaagaacacatagcggccacgggcaaggcgccaccagggaacgttgcaggaaaccacacctgggttggtgccccccagcggcccccggacctgcgtctgacgcctggacgccacgtccagctgacggttccgctggagcagctgatagaccggctggtgaaggagaacagggtggtggccttcatcaaaggatcaaggagcgctccccagtgcgggttctcgcagagggtggtgggtatcctggaagcgcacgccgcggatttcgtgaccgtggatgtgctcgacgaggagcacaaccacgggctgagagaaaccctcaaggcttacagcagctggccgacgttccctcaggtcttcgtcggaggggagctcgtgggaggctgcgatatcatttcgtccatggctgagagaggggagcttgccgccctattgattcagaaatgaagacttgatttagtacagcgacttggaataaatgtttgcttccatgggtgactgatccgttgcttgcacacgtagcatgccatccaagttggtatctgtggctttcggcaaggaaagaaagaaaccgttgctctgcgtctggacagtccggtatcgatttaattatatatatatatatatatatatatatatatatatatttatatacttattagaataaaattaaaacatgtgcatgcaaatgtcagcagtgtacgatggacgtggtacgtcccaaattgaaaagcaaagcatgtggtgtggtgtgggtggttgaattggatggttggtttgcctgctggtgctgtttataagtagaagtagccggccgcaagagacgccgcgcctggagacggcacgcgcacacacacacacacacacacacatattttgagaacggagagggagcgagcctcttacgttacgccttccgttcacgtcctagcaaatcaaaccaattccatctctctctttctctctctctccccgatccatcttgtccaactcctcgatcggccgttcatatgtttatgcgttagcaaaccaattcccattccattactccggcggcggccgcaccaccgccaaaaaccaatgcagatgacggcggatcaggaatcggcggccaaggcgacggaggacgacacgatgagcggccggcggcgggtggacgacgaccacgaccacgacgtcgtcttcgacgccgggaaaccgccgccgttccgcatcggcgacgtgcgggcggcggtgccggagcactgctggcgcaagaacccctggcggtcgctgtggtacgtggcgcgggacgtggcggtggtggcggcgctgggcgcggcggcggcgggcatggacagttgggcggtgtggccgctgtactgggcggcgcaggggaccatgttctgggcgctcttcgtgctgggacacgactgtggccatggcagcttctcggacagcgcgacgctcaacagcgtcgtgggccatctccttcactccttcatcctcgtcccttaccatggatggaggatcagccacagaacacaccatcagaaccacggccacatccacagggacgagtcatggcacccgatcacggagaagctgtaccggcaactagagccacgcaccaagaagctgagattcacggtgcccttcccgctgctcgcattccccgtctacctcttgtacaggagccccggcaagtcgggctcccacttccttcccagcagcgacctgttcagccccaaggagaagagcgacgtcatggtgtcaaccacctgctggtgcatcatgctcgcctccctcctcgccatggcgtgcgcgttcggcccactccaggtgctcaagatgtacggcatcccatacctggtgttcgtgatgtggcttgacctggtgacgtacctgcaccaccatgggcaccatcagcttcctctcccctggtaccgcggccaggagtggagctacctgcgcggcggcctcaccacggtggacagggactacggctggatcaacaacgtccaccacgacatcggcacccacgtcattcatcacctcttcccgcagatcccgcactaccatctcgtcgaagctaccaaggcagccaagccggtgctggggcgatactaccgggagccgcacaagtcagggccgcttccacttcacctcctcgtcgtgctcctcaggagcctcagagtcgaccacttcgtcagcgaccacggggatgtcgtctactaccaaaccgaccatgacttgaacactagcagtgctcatcgctgggccaaccaaaaccaccataagcaaaaataatggtttctcaaacacagagacggcctgatggttgctgttgttattgctccaaggactcacagtacaatatataggcatgcgtatgagaaagccaaataattaaagagaagggagggatcctctagctgaagcaatcaattaattacagtatcccactagatcgagtttgctaagcattactcctactatatacaatatgtactgttgcttgtattaattagctagatgttgtgttggagccttggatgatgaaactaaaggatgagccactgaaatttgtaccatttgttcggaacttcatttatatggctactgatgatatatcacatctacacagttttaggatgatcacatctagagtaaaatgcataatcaatctc

SEQ ID NO: 37577 - DNA, 2328 bp, Zea Mays
caacatcgtgacaagatggagattaggaagttatggccttcttgacaggctacctagttttgtttgcattgcaaaatacgagacaagatggagatgagcatgcaccttgtgagtatgtgcggcatacttgctgtgctcgggtgcgccgacgaggccaagggcagcagcaagaggtcccgggtgctggagctgtcgcggcggctgaagcaccggggccccgactggagcggcctccggcaggtgggcgactgctacctctctcaccagcgcctcgccatcatcgacccggcctctggcgaccagcccctctacaacgaggaccagtcggtggtcgtcgccgtcaacggcgagatctacaaccacctggacctcaggagccgcctcgccggcgcaggccacagcttcaggaccggcagcgactgcgaggtcatcgcgcacctgtacgaggagcatggagaagagttcgtggacatgctggacggcgtcttctccttcgtgctgctggacactcgccatggcgaccgcgcgggcagcagcttcttcatggctgctcgcgacgccatcggtgtgacgcccctctacatcggatggggagtcgatgggtcggtgtggatttcgtcggagatgaaggccctgcacgacgagtgtgagcacttcgagatcttccctccggggcatctctactccagcaacaccggcggattcagcaggtggtacaaccctccttggtacgacgacgacgacgacgaggaggccgtcgtcaccccctccgtcccctacgacccgctggcgctaaggaaggcgttcgagaaggccgtggtgaagcggctgatgacagacgtcccgttcggcgtcctgctctccggcgggctggactcgtcgctggtggcgaccgtcgccgtgcgccacctcgcccggacagaggccgccaggcgctggggcaccaagctccactccttctgcgtgggcctggaggggtcccctgacctcaaggcggccagggaggtggcggagtacctgggcaccctgcaccatgagttccacttcactgttcaggacggcatcgacgccatcgaggacgtgatctaccacacggagacgtacgacgtcaccacgatcagggcgagcacgcccatgttcctcatgtcgcgcaagatcaagtcgctcggggtcaagatggtcatctccggcgagggctccgacgagctcttcggaggctacctctacttccacaaggcgcccaacaaggaggagttgcaccgagagacgtgtaggaaggttaaggctctgcatcagtacgactgcctgagagccaacaaggcgacatcagcttggggcctggaggctcgcgtcccgttcctggacaaggagttcatcaatgcggccatgagcatcgatcctgagtggaagatgcctgatcttggaaggattgagaagtgggtgctgaggaaggcattcgacgacgaggagcagccattcctgcccaagcatatcctctacagacagaaggagcagttcagtgacggcgttgggtacagctggatcgatggcctgaaggctcatgcaacatcaaatgtgactgacaagatgctgtcaaatgcaaagttcatcttcccacacaacactccgaccaccaaggaggcctactactacaggatggtcttcgagaggttcttcccacagaaatctgctatcctgacggtacctggtgggccaagtgtggcgtgcagcacagccaaggccatcgagtgggacgcacaatggtcaggaaatctggacccctcgggaagggcggcactgggcgtccatctcgccgcctacgaacaccaacatgatcccgagcatgtcccggcggccattgcagcaggaagcggcaagaagccaaggacgattagggtggcaccgcctggcgttgccatcgagggatagacgacgacgcatatataagcttcctacttttgtttcaatgcatgcatgctatgtatctgtgtccaccggctgtctagccttatcatcatcactgtctgcaacaaattaataatcaagtggtatggggtacctacgtttaatgtatacggagtattgtattgcttgtgtgtggtatgcttaggttggccgtgagtaagggattacaagtattcgatatcgggtgtttctataggttgaagtgctcataaagggctccctatcctctatggtcatgtttgtaatagtttttttttctaaagagcttttctatgaatttggattcctgataatctaaccgtcacgggaatctaaatatcgtagggtttgcggtggaggaagatgaaagggtatgcacgattc

SEQ ID NO: 37578 - DNA, 2459 bp, Zea Mays
ctggcttccggtttctacagtttttttaaggagctactcccttttttctagaaagagctcatcaaagagctttctctttgggtagatttttttaagaagctgttaaaggagccatattaaaggagcaacatcgtgacaagatggagattaggaagttatggccttcttgacaggctacctagttttgtttgcattgcaaaatacgagacaagatggagatgagcatgcaccttgtgagtatgtgcggcatacttgctgtgctcgggtgcgccgacgaggccaagggcagcagcaagaggtcccgggtgctggagctgtcgcggcggctgaagcaccggggccccgactggagcggcctccggcaggtgggcgactgctacctctctcaccagcgcctcgccatcatcgacccggcctctggcgaccagcccctctacaacgaggaccagtcggtggtcgtcgccgtcaacggcgagatctacaaccacctggacctcaggagccgcctcgccggcgcaggccacagcttcaggaccggcagcgactgcgaggtcatcgcgcacctgtacgaggagcatggagaagagttcgtggacatgctggacggcgtcttctccttcgtgctgctggacactcgccatggcgaccgcgcgggcagcagcttcttcatggctgctcgcgacgccatcggtgtgacgcccctctacatcggatggggagtcgatgggtcggtgtggatttcgtcggagatgaaggccctgcacgacgagtgtgagcacttcgagatcttccctccggggcatctctactccagcaacaccggcggattcagcaggtggtacaaccctccttggtacgacgacgacgacgacgaggaggccgtcgtcaccccctccgtcccctacgacccgctggcgctaaggaaggcgttcgagaaggccgtggtgaagcggctgatgacagacgtcccgttcggcgtcctgctctccggcgggctggactcgtcgctggtggcgaccgtcgccgtgcgccacctcgcccggacagaggccgccaggcgctggggcaccaagctccactccttctgcgtgggcctggaggggtcccctgacctcaaggcggccagggaggtggcggagtacctgggcaccctgcaccatgagttccacttcactgttcaggacggcatcgacgccatcgaggacgtgatctaccacacggagacgtacgacgtcaccacgatcagggcgagcacgcccatgttcctcatgtcgcgcaagatcaagtcgctcggggtcaagatggtcatctccggcgagggctccgacgagctcttcggaggctacctctacttccacaaggcgcccaacaaggaggagttgcaccgagagacgtgtaggaaggttaaggctctgcatcagtacgactgcctgagagccaacaaggcgacatcagcttggggcctggaggctcgcgtcccgttcctggacaaggagttcatcaatgcggccatgagcatcgatcctgagtggaagatggtccagcctgatcttggaaggattgagaagtgggtgctgaggaaggcattcgacgacgaggagcagccattcctgcccaagcatatcctctacagacagaaggagcagttcagtgacggcgttgggtacagctggatcgatggcctgaaggctcatgcaacatcaaatgtgactgacaagatgctgtcaaatgcaaagttcatcttcccacacaacactccgaccaccaaggaggcctactactacaggatggtcttcgagaggttcttcccacagaaatctgctatcctgacggtacctggtgggccaagtgtggcgtgcagcacagccaaggccatcgagtgggacgcacaatggtcaggaaatctggacccctcgggaagggcggcactgggcgtccatctcgccgcctacgaacaccaacatgatcccgagcatgtcccggcggccattgcagcaggaagcggcaagaagccaaggacgattagggtggcaccgcctggcgttgccatcgagggatagacgacgacgcatatataagcttcctacttttgtttcaatgcatgcatgctatgtatctgtgtccaccggctgtctagccttatcatcatcactgtctgcaacaaattaataatcaagtggtatggggtacctacgtttaatgtatacggagtattgtattgcttgtgtgtggtatgcttaggttggccgtgagtaagggattacaagtattcgatatcgggtgtttctataggttgaagtgctcataaagggctccctatcctctatggtcatgtttgtaatagtttttttttctaaagagcttttctatgaatttggattcctgataatctaaccgtcacgggaatctaaatatcgtagggtttgcggtggaggaagatgaaagggtatgcacgattc

SEQ ID NO: 37579 - DNA, 1416 bp, Zea Mays
cgccggcagtggcaccgagcacgagacgaacagacctctaaaacctagcagaggcccgcgccgccgccgccaaccgcgacgaggaaggaagcaggaacgcgatgccgaagtcgaagcgcaaccgcccagtgaccttatcgaagaccaagaagaagccaggtttagagcgcaagggcaaagtagtcgccgagataaaagatgctgtcgacaaatacagcagcgcctatgtttttacctacgataacatgaggaatcagaagctcaaggacctcagggagcagctcaagtcttcgagcaggatttttctcgctggaaagaaggttatgcagatagcgctggggcgttcgcctgctgatgaagctaaaacaggcctccacaaactttccaagttccttcaaggcaactctggtctgttattcaccaatcttccaagggatgatgttgagaggatgtttcgagaattcgaggagcatgattttgcaaggacaggaagtactgctatcgatacggtattctagttttgcttttcatgtatatccctggtctggtttcttcaaatagactggctaggaaaaccatgttctgctgaccaatgtcaagtttaggctcttggtgttaatgtattaccagtatatactgatactatcacgcacacagtggtaacagtactttgacaatggcacttatttgtagtagctctgtagtgccattttcggtttcttgtataatgagtttcaccaaatttacaacattttacaaacaacatctacaattcctcaggttgagcttaaggaaggccctctggaacagttcacacatgagatggagccatttctacgcaagcaaggacttccagttcgcttgaacaaaggtgttgtagagttggttgcagaccatgtagtttgtgaggaaggaaagcccctttcgccagaagcagcgcagactctgcggctgcttgggatacaaatggcgacattccgtctataccttgtgtgtcgctggtcgggcgatgactttgaagtttacaaagaaggcttgatgcacctaggagctgatgaatcctcttaagcttttgtttcctgtatacacaaagggctcacttgctgtctttgctgggacagcttttggtaactgtgcgtgtggccatgtaccagggagtattggaagttagaaagatacaatctgcaggaaaaaaatgctagtgtatttcttcattctgccccatatttactcaactgttgaaaggtgtaagctgatttgaatatcgtatcagcattagttaagaggttgattgatatcatattcttgtaatgatagaatattctattggaaaccataaccctaactagagttttggggttccctattaatagggagaaaacaaatataggttgggccaagcccattataggtgta

SEQ ID NO: 37580 - DNA, 4242 bp, Zea Mays
caaccgagggctcggatgttagattcattgtgcacatacactctctgggtcatcaacgggcggcttcatcgaggcgtagaggtcgtgctcgacatagctgtcgtagacgacgagaggaggatgcgtggactccaccacctccacctgcggctgtgggtccttcaactcgatggtgctggacaccgtcgcggtagacgtctgtgacctctgtgacgaccgacttcccaccacggcgaccgcatcgtgggagactcctccaccgagacggagtagagcgacggcggtggcagcggcaggaggtcaaggatatacgtctgtaaaccgcggacggggctcgggcgtgcgcagcggctgcaggtctcgccagcgtcggcgtcggcgaggtcgccgccatgggcgcgcggccgtgtggtcacagtcacagtggtcggagtgtgattggttggaaatcgaacgcgatgcgggccttccttttgggctcggtgggccgtgagtcccattttgtttgggcggcaaaggaaacaaaattgatcctactcatcatattcgtttggcttcaacggtcaggatttggcttccactccatgggcctttcgctcgacaagctcatcaaagccgccgccgccgccgccgtcgcctcagctcgctccggctgcctctgcctcccctgcctctgaggatttgcttggggagagacttattatgagattcgcgggttggtacctgaagatcgcggcggtaggggcctccattggcgccgccatggagctcttcatgatccacacgggcttctacgagaaggtaactgtcttggagtcagaaaaacgagcttgggaaagcagtccagaggcccaagcaatgagagaagctctcaatccatggcgcaagcatgatgaacaagaacaacagaagtagtcaagatttatgtgtcttgtcgagtgtctgtgcccccccatccgtagacccatgaatgaggtactattagtgtcaatcttctgcatttggtgaacaatctacatttttttatgtacttccctaaaagtgctggatgcctagacggtaccctccagaaggcgctgaagggctatgtgaaacggttacaggttgtgtgtttttttccgctggagcaaaaataataatctaaggggaaaatttgtaaaataagactgatttcttgtatgatatattaacattaaaacagcaaattatgggtataggaatgggtggaagttgtattcttttctctacaataattgaatgctctgtggattgctcacttaaagctttttcagctatggctcacctgagtagtacgccccaggcgttcttgtaaaatttagaaactggctgtgtgattttgtggtgcttgaacaacttatgacacccctatttgaagcattagtgcctccttggcacagactgaaggagaagttttcacatttaattttaggcagaaagctgaaatgctagtcagattcaatcctgaagtcctgcatgctgtaatcattataagtgttacataaaaaacagtaattatggagcatttggcacacaactccattccactggcaacaacagtctaactctaaactgatttcatgctatcctgggtaaacggagtgttcgttctgtactttaacatttcagctataaagctgttaattactgttccatcttggtctcgtcctgtcaagtatttgcattcacatcctccagctgtaaccctcagatgaagtaatatgaatgggatcctttttgtacaagctactcattttcacatattttttgtaacccgtttcagctagaactatcaactaaccaaaattttatacaagctagcggtgattacaacagtaagtttctctgtcaactactttaactggaaacttggtgaaggtgcttacaacttgaccgactagcagcagtggcataagctggctttgttcttatgaatagaactatgcttgatgctaaccccagaaatgtgatgcaagcccacacgacgaaggtggttgagtagcacttcacccctatgcacacagtcatggtgtcaacaatgccagtgcggttatccactactgtcatcttttggccatttgcatcgtataccatggcagcaatctgcccatagaggagtgagccaagcgggatattggtgataaggatgttgtgattcaccccaacgctatttggtccaaagagctccgaggtcactgacactgctgcagcaaagatgaaccctgagcttaggccaattagcgctgttcctgctaccagggtgcttccatcttgtttgttccacataaggaaaaaggccattggcatggggaccaatgcagcagcaagccaccctgtgcgagcaagtgacaccttcctgtggacaaattttagttaggaagcatgagatatgatgatatatatgtatgcatataaagcaaaacagatacctgtgaaggaggtcaggtagtgcagagagaagacggccgaagaaggagcaggatgagtagacggcaaggagcatggtgagctgtgactgctggtgcaatgactgagcaatctgacccaagttgttgctgtataccaggccaacagtggctccacagaagtaggctgtgtagtagagccagaagtccacacaccgaatgagcttctttgcactgtgttcttcaccgagcgtcgccaggcggcccttgacctgcacctggttctcctttggcttttgcatcatggcattggactccatctgactgatgaggagtggcttatgtgggtcatcatatgcagggtcagggccatctgagcaactggagcaggcagggatgatgagaggaagggcgaggaggaccatggcacctgtgaggatgacccacgcagtagagctggttgcggtgaaagatccaaagaccaccagatatatgccggtgatgaatgcgaggatgtagaggccgaggaagacgcggccgtcatgcccgggcgcactttggatgtggccctcatttttgtggcagaggaggatcgctgggagtgcaaggacagagacggcgagagggaggattgcattgaggaggaggtagacagctggggagaaaggggagagcgcgttggcaaagagagtgtagaaggcagcgctgagcccgttgaagcttatggagagggagagggctagggagcggctgctcgcagagaagctgcggatgcagagaacaaagcagactgtgttgaaccagcagatgctgcaccctgctatcaagcagaacaagaacacctgcagggggggcaacatgtgaatcagaggagtttggtcagacaattaagttcgatataagtaagttgcatgttgttgtcttgacagttgaacctctgttgtcttttttttttatcttgacttaaatctgtttgaggatagtgcttgcaatcagtttgtcaaaagaataaagacaggttgcttgcttgctgctagaggttgtctaatatggaatgcattgtacataatcatgcatctggggatacgtaacggcagcgtgattctaatttgtgtgctgtaatgtcatatattcctccgtgctgcttcttgaaggaaggtgtcaaaagaaggctagttttgtagtggctggatgatgcagctgtgacttgtgagactggaacggcatgccgtaggccggtgaggatgccgatgttgtggtatctagctgattgtgattgcgatgtgtgtttgtcgttgtgatggcagactggtatcttttgctgcgttggaataatatgtggtcgctgttttttaggattaattgggcacacctatcaacgaacaagatatttggtgtgcaggtgggtcactcatctagcagtcaaaagcagagaaggggcagactggtaggaggaaagcagagttcagccggttgcagatgacatccaattcagagtttctgttggttggtttgttgatgatgaatgttcttaactttttgctggatactccgctgatttattatagtgtccccatctcatgtcacgtcatttaagctcggtcctttgtttggatttttttaaagaaattgtttggtgtctgatttttttaaaaaaagatgatttgaaacaatattattatactatcaacgtcaactaaaacaaatcaattgttcttttggtttgtctttgtaccatggtatatcattttgttcctgaatgcagaaaccattgtaaactataattgtctttgtgccaactttaatcagattttagcgg

SEQ ID NO: 37581 - DNA, 1438 bp, Zea Mays
caaccgagggctcggatgttagattcattgtgcacatacactctctgggtcatcaacgggcggcttcatcgaggcgtagaggtcgtgctcgacatagctgtcgtagacgacgagaggaggatgcgtggactccaccacctccacctgcggctgtgggtccttcaactcgatggtgctggacaccgtcgcggtagacgtctgtgacctctgtgacgaccgacttcccaccacggcgaccgcatcgtgggagactcctccaccgagacggagtagagcgacggcggtggcagcggcaggaggtcaaggatatacgtctgtaaaccgcggacggggctcgggcgtgcgcagcggctgcaggtctcgccagcgtcggcgtcggcgaggtcgccgccatgggcgcgcggccgtgtggtcacagtcacagtggtcggagtgtgattggttggaaatcgaacgcgatgcgggccttccttttgggctcggtgggccgtgagtcccattttgtttgggcggcaaaggaaacaaaattgatcctactcatcatattcgtttggcttcaacggtcaggatttggcttccactccatgggcctttcgctcgacaagctcatcaaagccgccgccgccgccgccgtcgcctcagctcgctccggctgcctctgcctcccctgcctctgaggatttgcttggggagagacttattatgagattcgcgggttggtacctgaagatcgcggcggtaggggcctccattggcgccgccatggagctcttcatgatccacacgggcttctacgagaaggtaactgtcttggagtcagaaaaacgagcttgggaaagcagtccagaggcccaagcaatgagagaagctctcaatccatggcgcaagcatgatgaacaagaacaacagaagtagtcaagatttatgtgtcttgtcgagtgtctgtgcccccccatccgtagacccatgaatgaggattaattgggcacacctatcaacgaacaagatatttggtgtgcaggtgggtcactcatctagcagtcaaaagcagagaaggggcagactggtaggaggaaagcagagttcagccggttgcagatgacatccaattcagagtttctgttggttggtttgttgatgatgaatgttcttaactttttgctggatactccgctgatttattatagtgtccccatctcatgtcacgtcatttaagctcggtcctttgtttggatttttttaaagaaattgtttggtgtctgatttttttaaaaaaagatgatttgaaacaatattattatactatcaacgtcaactaaaacaaatcaattgttcttttggtttgtctttgtaccatggtatatcattttgttcctgaatgcagaaaccattgtaaactataattgtctttgtgccaactttaatcagattttagcgg

SEQ ID NO: 37582 - DNA, 3788 bp, Zea Mays
caaccgagggctcggatgttagattcattgtgcacatacactctctgggtcatcaacgggcggcttcatcgaggcgtagaggtcgtgctcgacatagctgtcgtagacgacgagaggaggatgcgtggactccaccacctccacctgcggctgtgggtccttcaactcgatggtgctggacaccgtcgcggtagacgtctgtgacctctgtgacgaccgacttcccaccacggcgaccgcatcgtgggagactcctccaccgagacggagtagagcgacggcggtggcagcggcaggaggtcaaggatatacgtctgtaaaccgcggacggggctcgggcgtgcgcagcggctgcaggtctcgccagcgtcggcgtcggcgaggtcgccgccatgggcgcgcggccgtgtggtcacagtcacagtggtcggagtgtgattggttggaaatcgaacgcgatgcgggccttccttttgggctcggtgggccgtgagtcccattttgtttgggcggcaaaggaaacaaaattgatcctactcatcatattcgtttggcttcaacggtcaggatttggcttccactccatgggcctttcgctcgacaagctcatcaaagccgccgccgccgccgccgtcgcctcagctcgctccggctgcctctgcctcccctgcctctgaggatttgcttggggagagacttattatgagattcgcgggttggtacctgaagatcgcggcggtaggggcctccattggcgccgccatggagctcttcatgatccacacgggcttctacgagaaggtaactgtcttggagtcagaaaaacgagcttgggaaagcagtccagaggcccaagcaatgagagaagctctcaatccatggcgcaagcatgatgaacaagaacaacagaagtagtcaagatttatgtgtcttgtcgagtgtctgtgcccccccatccgtagacccatgaatgaggtactattagtgtcaatcttctgcatttggtgaacaatctacatttttttatgtacttccctaaaagtgctggatgcctagacggtaccctccagaaggcgctgaagggctatgtgaaacggttacaggttgtgtgtttttttccgctggagcaaaaataataatctaaggggaaaatttgtaaaataagactgatttcttgtatgatatattaacattaaaacagcaaattatgggtataggaatgggtggaagttgtattcttttctctacaataattgaatgctctgtggattgctcacttaaagctttttcagctatggctcacctgagtagtacgccccaggcgttcttgtaaaatttagaaactggctgtgtgattttgtggtgcttgaacaacttatgacacccctatttgaagcattagtgcctccttggcacagactgaaggagaagttttcacatttaattttaggcagaaagctgaaatgctagtcagattcaatcctgaagtcctgcatgctgtaatcattataagtgttacataaaaaacagtaattatggagcatttggcacacaactccattccactggcaacaacagtctaactctaaactgatttcatgctatcctgggtaaacggagtgttcgttctgtactttaacatttcagctataaagctgttaattactgttccatcttggtctcgtcctgtcaagtatttgcattcacatcctccagctgtaaccctcagatgaagtaatatgaatgggatcctttttgtacaagctactcattttcacatattttttgtaacccgtttcagctagaactatcaactaaccaaaattttatacaagctagcggtgattacaacagtaagtttctctgtcaactactttaactggaaacttggtgaaggtgcttacaacttgaccgactagcagcagtggcataagctggctttgttcttatgaatagaactatgcttgatgctaaccccagaaatgtgatgcaagcccacacgacgaaggtggttgagtagcacttcacccctatgcacacagtcatggtgtcaacaatgccagtgcggttatccactactgtcatcttttggccatttgcatcgtataccatggcagcaatctgcccatagaggagtgagccaagcgggatattggtgataaggatgttgtgattcaccccaacgctatttggtccaaagagctccgaggtcactgacactgctgcagcaaagatgaaccctgagcttaggccaattagcgctgttcctgctaccagggtgcttccatcttgtttgttccacataaggaaaaaggccattggcatggggaccaatgcagcagcaagccaccctgtgcgagcaagtgacaccttcctgtggacaaattttagttaggaagcatgagatatgatgatatatatgtatgcatataaagcaaaacagatacctgtgaaggaggtcaggtagtgcagagagaagacggccgaagaaggagcaggatgagtagacggcaaggagcatggtgagctgtgactgctggtgcaatgactgagcaatctgacccaagttgttgctgtataccaggccaacagtggctccacagaagtaggctgtgtagtagagccagaagtccacacaccgaatgagcttctttgcactgtgttcttcaccgagcgtcgccaggcggcccttgacctgcacctggttctcctttggcttttgcatcatggcattggactccatctgactgatgaggagtggcttatgtgggtcatcatatgcagggtcagggccatctgagcaactggagcaggcagggatgatgagaggaagggcgaggaggaccatggcacctgtgaggatgacccacgcagtagagctggttgcggtgaaagatccaaagaccaccagatatatgccggtgatgaatgcgaggatgtagaggccgaggaagacgcggccgtcatgcccgggcgcactttggatgtggccctcatttttgtggcagaggaggatcgctgggagtgcaaggacagagacggcgagagggaggattgcattgaggaggaggtagacagctggggagaaaggggagagcgcgttggcaaagagagtgtagaaggcagcgctgagcccgttgaagcttatggagagggagagggctagggagcggctgctcgcagagaagctgcggatgcagagaacaaagcagactgtgttgaaccagcagatgctgcaccctgctatcaagcagaacaagaacacctgcagggggggcaacatgtgaatcagaggagtttggtcagacaattaagttcgatataagattaattgggcacacctatcaacgaacaagatatttggtgtgcaggtgggtcactcatctagcagtcaaaagcagagaaggggcagactggtaggaggaaagcagagttcagccggttgcagatgacatccaattcagagtttctgttggttggtttgttgatgatgaatgttcttaactttttgctggatactccgctgatttattatagtgtccccatctcatgtcacgtcatttaagctcggtcctttgtttggatttttttaaagaaattgtttggtgtctgatttttttaaaaaaagatgatttgaaacaatattattatactatcaacgtcaactaaaacaaatcaattgttcttttggtttgtctttgtaccatggtatatcattttgttcctgaatgcagaaaccattgtaaactataattgtctttgtgccaactttaatcagattttagcgg

SEQ ID NO: 37583 - DNA, 1493 bp, Zea Mays
gttttttataatacatgacgagagtctaacataggggtatgttaaaccctcagattaaggacatcacggtctagctaacatccctgaccgattctcctaatcaaccgagggctcggatgttagattcattgtgcacatacactctctgggtcatcaacgggcggcttcatcgaggcgtagaggtcgtgctcgacatagctgtcgtagacgacgagaggaggatgcgtggactccaccacctccacctgcggctgtgggtccttcaactcgatggtgctggacaccgtcgcggtagacgtctgtgacctctgtgacgaccgacttcccaccacggcgaccgcatcgtgggagactcctccaccgagacggagtagagcgacggcggtggcagcggcaggaggtcaaggatatacgtctgtaaaccgcggacggggctcgggcgtgcgcagcggctgcaggtctcgccagcgtcggcgtcggcgaggtcgccgccatgggcgcgcggccgtgtggtcacagtcacagtggtcggagtgtgattggttggaaatcgaacgcgatgcgggccttccttttgggctcggtgggccgtgagtcccattttgtttgggcggcaaaggaaacaaaattgatcctactcatcatattcgtttggcttcaacggtcaggatttggcttccactccatgggcctttcgctcgacaagctcatcaaagccgccgccgccgccgccgtcgcctcagctcgctccggctgcctctgcctcccctgcctctgaggatttgcttggggagagacttattatgagattcgcgggttggtacctgaagatcgcggcggtaggggcctccattggcgccgccatggagctcttcatgatccacacgggcttctacgagaaggtaactgtcttggagtcagaaaaacgagcttgggaaagcagtccagaggcccaagcaatgagagaagctctcaatccatggcgcaagcatgatgaacaagaacaacagaagtagtcaagatttatgtgtcttgtcgagtgtctgtgcccccccatccgtagacccatgaatgaggtgggtcactcatctagcagtcaaaagcagagaaggggcagactggtaggaggaaagcagagttcagccggttgcagatgacatccaattcagagtttctgttggttggtttgttgatgatgaatgttcttaactttttgctggatactccgctgatttattatagtgtccccatctcatgtcacgtcatttaagctcggtcctttgtttggatttttttaaagaaattgtttggtgtctgatttttttaaaaaaagatgatttgaaacaatattattatactatcaacgtcaactaaaacaaatcaattgttcttttggtttgtctttgtaccatggtatatcattttgttcctgaatgcagaaaccattgtaaactataattgtctttgtgccaactttaatcagattttagcgg

SEQ ID NO: 37584 - DNA, 780 bp, Zea Mays
atcactgtcagtaaggtccaactcttccaagtgagaacagtgcttcccaatcagttggagtgctccactggaaacatggctacaagactccatcctcagagagatgagggaagtgcacgaactagttatggccgctagtgaaaacatcagtaatactgcgacaacaggtaatgtccagcttcagcaggttctttagccttgacacaacaaaagagagttctgtatctgtcactccagatgacttgctaagacttagctcccttaaagaaacacaagaggtcccaatggcttttagtccattggccatgatttgcagccttccagcttcagggcctgcagtttaggaagcttctggaagtttctcaccatagaaggagtaacctgatacatgaagggtgtagattaagctgtgagggctcaggtcatgccaaggtgatacaataatatgaccagatggttagctacttacaggacagcagtatgaaagatccagttccaatagattgggtaccgacttcaggatggatgaaactcctacatcggtgatattctgacactgagacatatcaagcacctgcaaccgtgcaagcatgcaagttcagttaagtaataaacggagctttgtgctactatcaaacacttcttttgtgtgatctatcaaaaatacatattttagtacaggtgaccagttcagacaaggcatcttcatagttcagaacctaacagtgtaagatcaaatagaaaataatatagtggcgtttcgaatgaatgtaatgtttg

SEQ ID NO: 37585 - DNA, 1216 bp, Zea Mays
gttagaatatgataacagaaaagctttcatgggaagaacaatttggcaagtggcgactgtgatgagtcagtaaaaccttccaaaattaatggttctactcagaaacatcaatcagatatgccaccaccaccagctcgaccccctcagaacaataatttcactggaaaggagaaacaaccagtccctgttgcaagagcagacgatgatgacatttttgttggagatggagttgactatacagttcctaacgaggaaatgagtcagagccctgtttctgatatggatgaatccccacataaccatcagaagcagtccaatttcattgaacccatgtatggccctgtaccaccatctgaacctgctcaagcttggcaacagccgaatgggtatgatgctgttcaagcccagatggcagctgctggatatcaaggtgactggtcaagctatgtgtatgcagaacagcagttgggttatccagagcagtacgtgcagcaaagcacacaggaatatgatgtgttagctgaccccagtatatcacaggatccgaggttcatgactcaggcagacaaggatcggggtttaggttctgttttcaaacgtgacgatcaaaggcttaatcagctgagggaaaaggacgaacgggagagagatccaaattttatttcagatagttactcagagtgttatcctggttaccaggagtataataatgagatcgcaggaagcgatgatgaagatgatttatcgaagatggatatgggtggacgggcgaagggccgtcttcacaggtgggacttcgagactgaagaggagtgggccaagtacaacgatcagaaagaagccatgccgaaggctgccttccagttcggggtgaagatgcaggacggcaggaaaaccaggaagcagaacaaggaccagaagctgacgaatgacctccacaagatcaacaagattctggctaggaagaagggcgagaaagatggggcggaagatggcggtcactacgatgatgatttacctagctcaaagaaacagcgtggctgaagcagtcatttttttgtttttgtttctcctgctcgtactgtaggcaggcgaacattctatgaagagtcacagtgtcatgtttagctggcagctgtatcctgctgcgtttgtttaaggtgtcctggtaggaaatatgttgatgctattgagccgaaaccatggaaggaatgtg

SEQ ID NO: 37586 - DNA, 1457 bp, Zea Mays
ctcatttatacttacagacatggcattatgtataaatatccatagcattgtaagaaattgattttttttgtttataccagtgtttttaaggcgtcacctaggtgacgcctaggcgtccaggcgctcatataattctaggcgccttgcctgcctaggcgttaaggcggtggtccagctcctcacctcaccgaggaggtagtaaccaatgacattccaacaactcttcataggagcaaagctgattgcccagttcaagaggagatggtaactgtaagtgtggatggttctgtacttgacaggattgctaaaattatgacgtaccttcggcttggatcatcagggaaggttttgaagaaaaagaaaaaggagagagatataaaagggaagaacaatttggcaagtggcgactgtgatgagtcagtaaaaccttccaaaattaatggttctactcagaaacatcaatcagatatgccaccaccaccagctcgaccccctcagaacaataatttcactggaaaggagaaacaaccagtccctgttgcaagagcagacgatgatgacatttttgttggagatggagttgactatacagttcctaacgaggaaatgagtcagagccctgtttctgatatggatgaatccccacataaccatcagaagcagtccaatttcattgaacccatgtatggccctgtaccaccatctgaacctgctcaagcttggcaacagccgaatgggtatgatgctgttcaagcccagatggcagctgctggatatcaaggatccgaggttcatgactcaggcagacaaggatcggggtttaggttctgttttcaaacgtgacgatcaaaggcttaatcagctgagggaaaaggacgaacgggagagagatccaaattttatttcagatagttactcagagtgttatcctggttaccaggagtataataatgagatcgcaggaagcgatgatgaagatgatttatcgaagatggatatgggtggacgggcgaagggccgtcttcacaggtgggacttcgagactgaagaggagtgggccaagtacaacgatcagaaagaagccatgccgaaggctgccttccagttcggggtgaagatgcaggacggcaggaaaaccaggaagcagaacaaggaccagaagctgacgaatgacctccacaagatcaacaagattctggctaggaagaagggcgagaaagatggggcggaagatggcggtcactacgatgatgatttacctagctcaaagaaacagcgtggctgaagcagtcatttttttgtttttgtttctcctgctcgtactgtaggcaggcgaacattctatgaagagtcacagtgtcatgtttagctggcagctgtatcctgctgcgtttgtttaaggtgtcctggtaggaaatatgttgatgctattgagccgaaaccatggaaggaatgtg

SEQ ID NO: 37587 - DNA, 1693 bp, Zea Mays
gccgaggaagccaatgccttggattcagtggcacatcgctatttggctgtgaacttatgatgtgatttggagcatacacatctggtcaagggcctgggctatgctctacttcacaaagtacggagtgaaattgaaaagaaacctgaggcagaggatgggaaggatgcaaagtcaagggcaacaaaagaagatcaggcagtctccttccgcactgcaactgcaaagtctgtctaccagtggatcataaagcctcaaagcataattaaagagaatgaattgtttcttcctggtcggatgtcatttatttacaacttggaggaggtagtaaccaatgacattccaacaactcttcataggagcaaagctgattgcccagttcaagaggagatggtaactgtaagtgtggatggttctgtacttgacaggattgctaaaattatgacgtaccttcggcttggatcatcagggaaggttttgaagaaaaagaaaaaggagagagatataaaagggaagaacaatttggcaagtggcgactgtgatgagtcagtaaaaccttccaaaattaatggttctactcagaaacatcaatcagatatgccaccaccaccagctcgaccccctcagaacaataatttcactggaaaggagaaacaaccagtccctgttgcaagagcagacgatgatgacatttttgttggagatggagttgactatacagttcctaacgaggaaatgagtcagagccctgtttctgatatggatgaatccccacataaccatcagaagcagtccaatttcattgaacccatgtatggccctgtaccaccatctgaacctgctcaagcttggcaacagccgaatgggtatgatgctgttcaagcccagatggcagctgctggatatcaaggtgactggtcaagctatgtgtatgcagaacagcagttgggttatccagagcagtacgtgcagcaaagcacacaggaatatgatgtgttagctgaccccagtatatcacaggatccgaggttcatgactcaggcagacaaggatcggggtttaggttctgttttcaaacgtgacgatcaaaggcttaatcagctgagggaaaaggacgaacgggagagagatccaaattttatttcagatagttactcagagtgttatcctggttaccaggagtataataatgagatcgcaggaagcgatgatgaagatgatttatcgaagatggatatgggtggacgggcgaagggccgtcttcacaggtgggacttcgagactgaagaggagtgggccaagtacaacgatcagaaagaagccatgccgaaggctgccttccagttcggggtgaagatgcaggacggcaggaaaaccaggaagcagaacaaggaccagaagctgacgaatgacctccacaagatcaacaagattctggctaggaagaagggcgagaaagatggggcggaagatggcggtcactacgatgatgatttacctagctcaaagaaacagcgtggctgaagcagtcatttttttgtttttgtttctcctgctcgtactgtaggcaggcgaacattctatgaagagtcacagtgtcatgtttagctggcagctgtatcctgctgcgtttgtttaaggtgtcctggtaggaaatatgttgatgctattgagccgaaaccatggaaggaatgtg

SEQ ID NO: 37588 - DNA, 2201 bp, Zea Mays
atgttactcactgtaagtgattgggtgagctccaatttctcttgttctccattcagcgaggagaagaaaaaagaagaaccagagacacccaggtatcgtgatcgtgctaaggagcggcgtgaagatcaaaaccctgattatgaacctacagaacttggttcgtttcatgcagtggcacctcctgggagtgatttgaggttggcggatgcccacaagatttcaattgagaaaagcaaatatcttggagatgcgccaacagagagaaaccctaggaaaacatgtcatgcactttcttgctggttatatttccatgttttcaggacagggtccttttcagacagggataacacggattatattgcttggaacaatgttactattctttctcacctgctattgctagcgcaagcagttcctcacctcactgtgcattacctatcaaactggagcatgggcaaggccacaaggcaacacttggccattggctaccaaactgacttgatcatggaatatgcagaaatcccctgttgatgagcaactggtggtcctattgtactgcttatttataggtgatttggagcatacacatctggtcaagggcctgggctatgctctacttcacaaagtacggagtgaaattgaaaagaaacctgaggcagaggatgggaaggatgcaaagtcaagggcaacaaaagaagatcaggcagtctccttccgcactgcaactgcaaagtctgtctaccagtggatcataaagcctcaaagcataattaaagagaatgaattgtttcttcctggtcggatgtcatttatttacaacttggaggaggtagtaaccaatgacattccaacaactcttcataggagcaaagctgattgcccagttcaagaggagatggtaactgtaagtgtggatggttctgtacttgacaggattgctaaaattatgacgtaccttcggcttggatcatcagggaaggttttgaagaaaaagaaaaaggagagagatataaaagggaagaacaatttggcaagtggcgactgtgatgagtcagtaaaaccttccaaaattaatggttctactcagaaacatcaatcagatatgccaccaccaccagctcgaccccctcagaacaataatttcactggaaaggagaaacaaccagtccctgttgcaagagcagacgatgatgacatttttgttggagatggagttgactatacagttcctaacgaggaaatgagtcagagccctgtttctgatatggatgaatccccacataaccatcagaagcagtccaatttcattgaacccatgtatggccctgtaccaccatctgaacctgctcaagcttggcaacagccgaatgggtatgatgctgttcaagcccagatggcagctgctggatatcaaggtgactggtcaagctatgtgtatgcagaacagcagttgggttatccagagcagtacgtgcagcaaagcacacaggaatatgatgtgttagctgaccccagtatatcacaggatccgaggttcatgactcaggcagacaaggatcggggtttaggttctgttttcaaacgtgacgatcaaaggcttaatcagctgagggaaaaggacgaacgggagagagatccaaattttatttcagatagttactcagagtgttatcctggttaccaggagtataataatgagatcgcaggaagcgatgatgaagatgatttatcgaagatggatatgggtggacgggcgaagggccgtcttcacaggtgggacttcgagactgaagaggagtgggccaagtacaacgatcagaaagaagccatgccgaaggctgccttccagttcggggtgaagatgcaggacggcaggaaaaccaggaagcagaacaaggaccagaagctgacgaatgacctccacaagatcaacaagattctggctaggaagaagggcgagaaagatggggcggaagatggcggtcactacgatgatgatttacctagctcaaagaaacagcgtggctgaagcagtcatttttttgtttttgtttctcctgctcgtactgtaggcaggcgaacattctatgaagagtcacagtgtcatgtttagctggcagctgtatcctgctgcgtttgtttaaggtgtcctggtaggaaatatgttgatgctattgagccgaaaccatggaaggaatgtg

SEQ ID NO: 37589 - DNA, 2172 bp, Zea Mays
atgttactcactgtaagtgattgggtgagctccaatttctcttgttctccattcagcgaggagaagaaaaaagaagaaccagagacacccaggtatcgtgatcgtgctaaggagcggcgtgaagatcaaaaccctgattatgaacctacagaacttggttcgtttcatgcagtggcacctcctgggagtgatttgaggttggcggatgcccacaagatttcaattgagaaaagcaaatatcttggagatgcgccaacagagagaaaccctaggaaaacatgtcatgcactttcttgctggttatatttccatgttttcaggacagggtccttttcagacagggataacacgttcctcacctcactgtgcattacctatcaaactggagcatgggcaaggccacaaggcaacacttggccattggctaccaaactgacttgatcatggaatatgcagtccatgtaattttgtgttcattgatttcgcagaaatcccctgttgatgagcaactggtggtcctattgtactgcttatttataggtgatttggagcatacacatctggtcaagggcctgggctatgctctacttcacaaagtacggagtgaaattgaaaagaaacctgaggcagaggatgggaaggatgcaaagtcaagggcaacaaaagaagatcaggcagtctccttccgcactgcaactgcaaagtctgtctaccagtggatcataaagcctcaaagcataattaaagagaatgaattgtttcttcctggtcggatgtcatttatttacaacttggaggaggtagtaaccaatgacattccaacaactcttcataggagcaaagctgattgcccagttcaagaggagatggtaactgtaagtgtggatggttctgtacttgacaggattgctaaaattatgacgtaccttcggcttggatcatcagggaaggttttgaagaaaaagaaaaaggagagagatataaaagggaagaacaatttggcaagtggcgactgtgatgagtcagtaaaaccttccaaaattaatggttctactcagaaacatcaatcagatatgccaccaccaccagctcgaccccctcagaacaataatttcactggaaaggagaaacaaccagtccctgttgcaagagcagacgatgatgacatttttgttggagatggagttgactatacagttcctaacgaggaaatgagtcagagccctgtttctgatatggatgaatccccacataaccatcagaagcagtccaatttcattgaacccatgtatggccctgtaccaccatctgaacctgctcaagcttggcaacagccgaatgggtatgatgctgttcaagcccagatggcagctgctggatatcaaggtgactggtcaagctatgtgtatgcagaacagcagttgggttatccagagcagtacgtgcagcaaagcacacaggaatatgatgtgttagctgaccccagtatatcacaggatccgaggttcatgactcaggcagacaaggatcggggtttaggttctgttttcaaacgtgacgatcaaaggcttaatcagctgagggaaaaggacgaacgggagagagatccaaattttatttcagatagttactcagagtgttatcctggttaccaggagtataataatgagatcgcaggaagcgatgatgaagatgatttatcgaagatggatatgggtggacgggcgaagggccgtcttcacaggtgggacttcgagactgaagaggagtgggccaagtacaacgatcagaaagaagccatgccgaaggctgccttccagttcggggtgaagatgcaggacggcaggaaaaccaggaagcagaacaaggaccagaagctgacgaatgacctccacaagatcaacaagattctggctaggaagaagggcgagaaagatggggcggaagatggcggtcactacgatgatgatttacctagctcaaagaaacagcgtggctgaagcagtcatttttttgtttttgtttctcctgctcgtactgtaggcaggcgaacattctatgaagagtcacagtgtcatgtttagctggcagctgtatcctgctgcgtttgtttaaggtgtcctggtaggaaatatgttgatgctattgagccgaaaccatggaaggaatgtg

SEQ ID NO: 37590 - DNA, 3010 bp, Zea Mays
atgttactcactgtaagtgattgggtgagctccaatttctcttgttctccattcagcgaggagaagaaaaaagaagaaccagagacacccaggtatcgtgatcgtgctaaggagcggcgtgaagatcaaaaccctgattatgaacctacagaacttggttcgtttcatgcagtggcacctcctgggagtgatttgaggttggcggatgcccacaagatttcaattgagaaaagcaaatatcttggaggacagggtccttttcagacagggataacacgatgtggtgtttgccaggattatattgcttggaacaatgttactattctttctcacctgctattgctagcgcaagcagttcctcacctcactgtgcattacctatcaaactggagcatgggcaaggccacaaggcaacacttggccattggctaccaaactgacttgatcatggaatatgcagtccatgtaattttgtgttcattgatttcgcagaaatcccctgttgatgagcaactggtggtcctattgtactgcttatttataggtgatttggagcatacacatctggtcaagggcctgggctatgctctacttcacaaagtacggagtgaaattgaaaagaaacctgaggcagaggatgggaaggatgcaaagtcaagggcaacaaaagaagatcaggcagtctccttccgcactgcaactgcaaagtctgtctaccagtggatcataaagcctcaaagcataattaaagagaatgaattgtttcttcctggtcggatgtcatttatttacaacttggtaattccctgaaaagtacaatagtgctcatttatacttacagacatggcattatgtataaatatccatagcattgtaagaaattgattttttttgtttataccagtgtttttaaggcgtcacctaggtgacgcctaggcgtccaggcgctcatataattctaggcgccttgcctgcctaggcgttaaggcggtggtccagctcctcacctcaccgtaccgccttaagaacactggtttatacatttgtttactaagatattcgtattttaaccttcttattctgagaatttaacacgcatgtcctatgatttttgttaccttttgcagtatatgaaatgcatgattatgtttcgttctatgataagaaattgtctgcttctctgctgatcacctgagtgcagaacttcattcaatttcctgaatttctcacctggaaactgaataatcttgtgcttttattatgctctattatattcaagtatagtgttaatttactttatctctgatggcgtgatttacagttcatgcgattttgattgtcattgggtgcatcatagcctcataattgctaaagacagtacttcctctgtgttcatattctattaaggaaaccatgaatcacaaaccagcaatcatatccttttcatatattttctcagaatattagagtaggagtgcaccagcacagcttattcttgtgaagttgccagtgttgccgatttttttttcttttgtattccaacttttgttgtattttcatctctccttttattttggttttgaagttttttgtttataaagcatagtaattatcttttaataatccaatcaggaggaggtagtaaccaatgacattccaacaactcttcataggagcaaagctgattgcccagttcaagaggagatggtaactgtaagtgtggatggttctgtacttgacaggattgctaaaattatgacgtaccttcggcttggatcatcagggaaggttttgaagaaaaagaaaaaggagagagatataaaagggaagaacaatttggcaagtggcgactgtgatgagtcagtaaaaccttccaaaattaatggttctactcagaaacatcaatcagatatgccaccaccaccagctcgaccccctcagaacaataatttcactggaaaggagaaacaaccagtccctgttgcaagagcagacgatgatgacatttttgttggagatggagttgactatacagttcctaacgaggaaatgagtcagagccctgtttctgatatggatgaatccccacataaccatcagaagcagtccaatttcattgaacccatgtatggccctgtaccaccatctgaacctgctcaagcttggcaacagccgaatgggtatgatgctgttcaagcccagatggcagctgctggatatcaaggtgactggtcaagctatgtgtatgcagaacagcagttgggttatccagagcagtacgtgcagcaaagcacacaggaatatgatgtgttagctgaccccagtatatcacaggatccgaggttcatgactcaggcagacaaggatcggggtttaggttctgttttcaaacgtgacgatcaaaggcttaatcagctgagggaaaaggacgaacgggagagagatccaaattttatttcagatagttactcagagtgttatcctggttaccaggagtataataatgagatcgcaggaagcgatgatgaagatgatttatcgaagatggatatgggtggacgggcgaagggccgtcttcacaggtgggacttcgagactgaagaggagtgggccaagtacaacgatcagaaagaagccatgccgaaggctgccttccagttcggggtgaagatgcaggacggcaggaaaaccaggaagcagaacaaggaccagaagctgacgaatgacctccacaagatcaacaagattctggctaggaagaagggcgagaaagatggggcggaagatggcggtcactacgatgatgatttacctagctcaaagaaacagcgtggctgaagcagtcatttttttgtttttgtttctcctgctcgtactgtaggcaggcgaacattctatgaagagtcacagtgtcatgtttagctggcagctgtatcctgctgcgtttgtttaaggtgtcctggtaggaaatatgttgatgctattgagccgaaaccatggaaggaatgtg

SEQ ID NO: 37591 - DNA, 2128 bp, Zea Mays
atgttactcactgtaagtgattgggtgagctccaatttctcttgttctccattcagcgaggagaagaaaaaagaagaaccagagacacccaggtatcgtgatcgtgctaaggagcggcgtgaagatcaaaaccctgattatgaacctacagaacttggttcgtttcatgcagtggcacctcctgggagtgatttgaggttggcggatgcccacaagatttcaattgagaaaagcaaatatcttggaggacagggtccttttcagacagggataacacggattatattgcttggaacaatgttactattctttctcacctgctattgctagcgcaagcagttcctcacctcactgtgcattacctatcaaactggagcatgggcaaggccacaaggcaacacttggccattggctaccaaactgacttgatcatggaatatgcagaaatcccctgttgatgagcaactggtggtcctattgtactgcttatttataggtgatttggagcatacacatctggtcaagggcctgggctatgctctacttcacaaagtacggagtgaaattgaaaagaaacctgaggcagaggatgggaaggatgcaaagtcaagggcaacaaaagaagatcaggcagtctccttccgcactgcaactgcaaagtctgtctaccagtggatcataaagcctcaaagcataattaaagagaatgaattgtttcttcctggtcggatgtcatttatttacaacttggaggaggtagtaaccaatgacattccaacaactcttcataggagcaaagctgattgcccagttcaagaggagatggtaactgtaagtgtggatggttctgtacttgacaggattgctaaaattatgacgtaccttcggcttggatcatcagggaaggttttgaagaaaaagaaaaaggagagagatataaaagggaagaacaatttggcaagtggcgactgtgatgagtcagtaaaaccttccaaaattaatggttctactcagaaacatcaatcagatatgccaccaccaccagctcgaccccctcagaacaataatttcactggaaaggagaaacaaccagtccctgttgcaagagcagacgatgatgacatttttgttggagatggagttgactatacagttcctaacgaggaaatgagtcagagccctgtttctgatatggatgaatccccacataaccatcagaagcagtccaatttcattgaacccatgtatggccctgtaccaccatctgaacctgctcaagcttggcaacagccgaatgggtatgatgctgttcaagcccagatggcagctgctggatatcaaggtgactggtcaagctatgtgtatgcagaacagcagttgggttatccagagcagtacgtgcagcaaagcacacaggaatatgatgtgttagctgaccccagtatatcacaggatccgaggttcatgactcaggcagacaaggatcggggtttaggttctgttttcaaacgtgacgatcaaaggcttaatcagctgagggaaaaggacgaacgggagagagatccaaattttatttcagatagttactcagagtgttatcctggttaccaggagtataataatgagatcgcaggaagcgatgatgaagatgatttatcgaagatggatatgggtggacgggcgaagggccgtcttcacaggtgggacttcgagactgaagaggagtgggccaagtacaacgatcagaaagaagccatgccgaaggctgccttccagttcggggtgaagatgcaggacggcaggaaaaccaggaagcagaacaaggaccagaagctgacgaatgacctccacaagatcaacaagattctggctaggaagaagggcgagaaagatggggcggaagatggcggtcactacgatgatgatttacctagctcaaagaaacagcgtggctgaagcagtcatttttttgtttttgtttctcctgctcgtactgtaggcaggcgaacattctatgaagagtcacagtgtcatgtttagctggcagctgtatcctgctgcgtttgtttaaggtgtcctggtaggaaatatgttgatgctattgagccgaaaccatggaaggaatgtg

SEQ ID NO: 37592 - DNA, 2076 bp, Zea Mays
atgttactcactgtaagtgattgggtgagctccaatttctcttgttctccattcagcgaggagaagaaaaaagaagaaccagagacacccaggtatcgtgatcgtgctaaggagcggcgtgaagatcaaaaccctgattatgaacctacagaacttggttcgtttcatgcagtggcacctcctgggagtgatttgaggttggcggatgcccacaagatttcaattgagaaaagcaaatatcttggaggacagggtccttttcagacagggataacacgcgcaagcagttcctcacctcactgtgcattacctatcaaactggagcatgggcaaggccacaaggcaacacttggccattggctaccaaactgacttgatcatggaatatgcagaaatcccctgttgatgagcaactggtggtcctattgtactgcttatttataggtgatttggagcatacacatctggtcaagggcctgggctatgctctacttcacaaagtacggagtgaaattgaaaagaaacctgaggcagaggatgggaaggatgcaaagtcaagggcaacaaaagaagatcaggcagtctccttccgcactgcaactgcaaagtctgtctaccagtggatcataaagcctcaaagcataattaaagagaatgaattgtttcttcctggtcggatgtcatttatttacaacttggaggaggtagtaaccaatgacattccaacaactcttcataggagcaaagctgattgcccagttcaagaggagatggtaactgtaagtgtggatggttctgtacttgacaggattgctaaaattatgacgtaccttcggcttggatcatcagggaaggttttgaagaaaaagaaaaaggagagagatataaaagggaagaacaatttggcaagtggcgactgtgatgagtcagtaaaaccttccaaaattaatggttctactcagaaacatcaatcagatatgccaccaccaccagctcgaccccctcagaacaataatttcactggaaaggagaaacaaccagtccctgttgcaagagcagacgatgatgacatttttgttggagatggagttgactatacagttcctaacgaggaaatgagtcagagccctgtttctgatatggatgaatccccacataaccatcagaagcagtccaatttcattgaacccatgtatggccctgtaccaccatctgaacctgctcaagcttggcaacagccgaatgggtatgatgctgttcaagcccagatggcagctgctggatatcaaggtgactggtcaagctatgtgtatgcagaacagcagttgggttatccagagcagtacgtgcagcaaagcacacaggaatatgatgtgttagctgaccccagtatatcacaggatccgaggttcatgactcaggcagacaaggatcggggtttaggttctgttttcaaacgtgacgatcaaaggcttaatcagctgagggaaaaggacgaacgggagagagatccaaattttatttcagatagttactcagagtgttatcctggttaccaggagtataataatgagatcgcaggaagcgatgatgaagatgatttatcgaagatggatatgggtggacgggcgaagggccgtcttcacaggtgggacttcgagactgaagaggagtgggccaagtacaacgatcagaaagaagccatgccgaaggctgccttccagttcggggtgaagatgcaggacggcaggaaaaccaggaagcagaacaaggaccagaagctgacgaatgacctccacaagatcaacaagattctggctaggaagaagggcgagaaagatggggcggaagatggcggtcactacgatgatgatttacctagctcaaagaaacagcgtggctgaagcagtcatttttttgtttttgtttctcctgctcgtactgtaggcaggcgaacattctatgaagagtcacagtgtcatgtttagctggcagctgtatcctgctgcgtttgtttaaggtgtcctggtaggaaatatgttgatgctattgagccgaaaccatggaaggaatgtg

SEQ ID NO: 37593 - DNA, 2035 bp, Zea Mays
atgttactcactgtaagtgattgggtgagctccaatttctcttgttctccattcagcgaggagaagaaaaaagaagaaccagagacacccaggtatcgtgatcgtgctaaggagcggcgtgaagatcaaaaccctgattatgaacctacagaacttggttcgtttcatgcagtggcacctcctgggagtgatttgaggttggcggatgcccacaagatttcaattgagaaaagcaaatatcttggagatgcgccaacagagagaaaccctaggaaaacatgtcatgcactttcttgctggttatatttccatgttttcaggacagggtccttttcagacagggataacacgaaatcccctgttgatgagcaactggtggtcctattgtactgcttatttataggtgatttggagcatacacatctggtcaagggcctgggctatgctctacttcacaaagtacggagtgaaattgaaaagaaacctgaggcagaggatgggaaggatgcaaagtcaagggcaacaaaagaagatcaggcagtctccttccgcactgcaactgcaaagtctgtctaccagtggatcataaagcctcaaagcataattaaagagaatgaattgtttcttcctggtcggatgtcatttatttacaacttggaggaggtagtaaccaatgacattccaacaactcttcataggagcaaagctgattgcccagttcaagaggagatggtaactgtaagtgtggatggttctgtacttgacaggattgctaaaattatgacgtaccttcggcttggatcatcagggaaggttttgaagaaaaagaaaaaggagagagatataaaagggaagaacaatttggcaagtggcgactgtgatgagtcagtaaaaccttccaaaattaatggttctactcagaaacatcaatcagatatgccaccaccaccagctcgaccccctcagaacaataatttcactggaaaggagaaacaaccagtccctgttgcaagagcagacgatgatgacatttttgttggagatggagttgactatacagttcctaacgaggaaatgagtcagagccctgtttctgatatggatgaatccccacataaccatcagaagcagtccaatttcattgaacccatgtatggccctgtaccaccatctgaacctgctcaagcttggcaacagccgaatgggtatgatgctgttcaagcccagatggcagctgctggatatcaaggtgactggtcaagctatgtgtatgcagaacagcagttgggttatccagagcagtacgtgcagcaaagcacacaggaatatgatgtgttagctgaccccagtatatcacaggatccgaggttcatgactcaggcagacaaggatcggggtttaggttctgttttcaaacgtgacgatcaaaggcttaatcagctgagggaaaaggacgaacgggagagagatccaaattttatttcagatagttactcagagtgttatcctggttaccaggagtataataatgagatcgcaggaagcgatgatgaagatgatttatcgaagatggatatgggtggacgggcgaagggccgtcttcacaggtgggacttcgagactgaagaggagtgggccaagtacaacgatcagaaagaagccatgccgaaggctgccttccagttcggggtgaagatgcaggacggcaggaaaaccaggaagcagaacaaggaccagaagctgacgaatgacctccacaagatcaacaagattctggctaggaagaagggcgagaaagatggggcggaagatggcggtcactacgatgatgatttacctagctcaaagaaacagcgtggctgaagcagtcatttttttgtttttgtttctcctgctcgtactgtaggcaggcgaacattctatgaagagtcacagtgtcatgtttagctggcagctgtatcctgctgcgtttgtttaaggtgtcctggtaggaaatatgttgatgctattgagccgaaaccatggaaggaatgtg

SEQ ID NO: 37594 - DNA, 2149 bp, Zea Mays
atgttactcactgtaagtgattgggtgagctccaatttctcttgttctccattcagcgaggagaagaaaaaagaagaaccagagacacccaggtatcgtgatcgtgctaaggagcggcgtgaagatcaaaaccctgattatgaacctacagaacttggttcgtttcatgcagtggcacctcctgggagtgatttgaggttggcggatgcccacaagatttcaattgagaaaagcaaatatcttggagatgcgccaacagagagaaaccctaggaaaacatgtcatgcactttcttgctggttatatttccatgttttcaggacagggtccttttcagacagggataacacggattatattgcttggaacaatgttactattctttctcacctgctattgctagcgcaagcagttcctcacctcactgtgcattacctatcaaactggagcatgggcaaggccacaaggcaacacttggccattggctaccaaactgacttgatcatggaatatgcaggtgatttggagcatacacatctggtcaagggcctgggctatgctctacttcacaaagtacggagtgaaattgaaaagaaacctgaggcagaggatgggaaggatgcaaagtcaagggcaacaaaagaagatcaggcagtctccttccgcactgcaactgcaaagtctgtctaccagtggatcataaagcctcaaagcataattaaagagaatgaattgtttcttcctggtcggatgtcatttatttacaacttggaggaggtagtaaccaatgacattccaacaactcttcataggagcaaagctgattgcccagttcaagaggagatggtaactgtaagtgtggatggttctgtacttgacaggattgctaaaattatgacgtaccttcggcttggatcatcagggaaggttttgaagaaaaagaaaaaggagagagatataaaagggaagaacaatttggcaagtggcgactgtgatgagtcagtaaaaccttccaaaattaatggttctactcagaaacatcaatcagatatgccaccaccaccagctcgaccccctcagaacaataatttcactggaaaggagaaacaaccagtccctgttgcaagagcagacgatgatgacatttttgttggagatggagttgactatacagttcctaacgaggaaatgagtcagagccctgtttctgatatggatgaatccccacataaccatcagaagcagtccaatttcattgaacccatgtatggccctgtaccaccatctgaacctgctcaagcttggcaacagccgaatgggtatgatgctgttcaagcccagatggcagctgctggatatcaaggtgactggtcaagctatgtgtatgcagaacagcagttgggttatccagagcagtacgtgcagcaaagcacacaggaatatgatgtgttagctgaccccagtatatcacaggatccgaggttcatgactcaggcagacaaggatcggggtttaggttctgttttcaaacgtgacgatcaaaggcttaatcagctgagggaaaaggacgaacgggagagagatccaaattttatttcagatagttactcagagtgttatcctggttaccaggagtataataatgagatcgcaggaagcgatgatgaagatgatttatcgaagatggatatgggtggacgggcgaagggccgtcttcacaggtgggacttcgagactgaagaggagtgggccaagtacaacgatcagaaagaagccatgccgaaggctgccttccagttcggggtgaagatgcaggacggcaggaaaaccaggaagcagaacaaggaccagaagctgacgaatgacctccacaagatcaacaagattctggctaggaagaagggcgagaaagatggggcggaagatggcggtcactacgatgatgatttacctagctcaaagaaacagcgtggctgaagcagtcatttttttgtttttgtttctcctgctcgtactgtaggcaggcgaacattctatgaagagtcacagtgtcatgtttagctggcagctgtatcctgctgcgtttgtttaaggtgtcctggtaggaaatatgttgatgctattgagccgaaaccatggaaggaatgtg

SEQ ID NO: 37595 - DNA, 2153 bp, Zea Mays
ccatcttccgctgccatagctattgtaagcaagcgaggagaagaaaaaagaagaaccagagacacccaggtatcgtgatcgtgctaaggagcggcgtgaagatcaaaaccctgattatgaacctacagaacttggttcgtttcatgcagtggcacctcctgggagtgatttgaggttggcggatgcccacaagatttcaattgagaaaagcaaatatcttggaggacagggtccttttcagacagggataacacgatgtggtgtttgccaggattatattgcttggaacaatgttactattctttctcacctgctattgctagcgcaagcagttcctcacctcactgtgcattacctatcaaactggagcatgggcaaggccacaaggcaacacttggccattggctaccaaactgacttgatcatggaatatgcagtccatgtaattttgtgttcattgatttcgcagaaatcccctgttgatgagcaactggtggtcctattgtactgcttatttataggtgatttggagcatacacatctggtcaagggcctgggctatgctctacttcacaaagtacggagtgaaattgaaaagaaacctgaggcagaggatgggaaggatgcaaagtcaagggcaacaaaagaagatcaggcagtctccttccgcactgcaactgcaaagtctgtctaccagtggatcataaagcctcaaagcataattaaagagaatgaattgtttcttcctggtcggatgtcatttatttacaacttggaggaggtagtaaccaatgacattccaacaactcttcataggagcaaagctgattgcccagttcaagaggagatggtaactgtaagtgtggatggttctgtacttgacaggattgctaaaattatgacgtaccttcggcttggatcatcagggaaggttttgaagaaaaagaaaaaggagagagatataaaagggaagaacaatttggcaagtggcgactgtgatgagtcagtaaaaccttccaaaattaatggttctactcagaaacatcaatcagatatgccaccaccaccagctcgaccccctcagaacaataatttcactggaaaggagaaacaaccagtccctgttgcaagagcagacgatgatgacatttttgttggagatggagttgactatacagttcctaacgaggaaatgagtcagagccctgtttctgatatggatgaatccccacataaccatcagaagcagtccaatttcattgaacccatgtatggccctgtaccaccatctgaacctgctcaagcttggcaacagccgaatgggtatgatgctgttcaagcccagatggcagctgctggatatcaaggtgactggtcaagctatgtgtatgcagaacagcagttgggttatccagagcagtacgtgcagcaaagcacacaggaatatgatgtgttagctgaccccagtatatcacaggatccgaggttcatgactcaggcagacaaggatcggggtttaggttctgttttcaaacgtgacgatcaaaggcttaatcagctgagggaaaaggacgaacgggagagagatccaaattttatttcagatagttactcagagtgttatcctggttaccaggagtataataatgagatcgcaggaagcgatgatgaagatgatttatcgaagatggatatgggtggacgggcgaagggccgtcttcacaggtgggacttcgagactgaagaggagtgggccaagtacaacgatcagaaagaagccatgccgaaggctgccttccagttcggggtgaagatgcaggacggcaggaaaaccaggaagcagaacaaggaccagaagctgacgaatgacctccacaagatcaacaagattctggctaggaagaagggcgagaaagatggggcggaagatggcggtcactacgatgatgatttacctagctcaaagaaacagcgtggctgaagcagtcatttttttgtttttgtttctcctgctcgtactgtaggcaggcgaacattctatgaagagtcacagtgtcatgtttagctggcagctgtatcctgctgcgtttgtttaaggtgtcctggtaggaaatatgttgatgctattgagccgaaaccatggaaggaatgtg

SEQ ID NO: 37596 - DNA, 2982 bp, Zea Mays
ctccttcccatcttccgctgccatagctattgtaagcaaggtacattaagaccgaatctcctgtacgatcccgtgagccgcgcctttagtttttgcgtcgttctaatttcacctcgaatgattctatggagagagagagagagagagagagagagagagagagagagagagagagagagatcgcgtcttatgcttggggtttggacagtaaaatcagagctgcctccctttggaaggagcctactgtagttagtcttgtcgaatcgtccaccaattataggcttatagctgtttttttctgaaaattattatgcagggaaaaaaatcatgaatgaaaccacagctcttgatggtaccgttaatttcttactgttgttgtgacagttacgcgaatggctggaacttgaaatgcaaccatgactgctgttgtagcttagccttctagtcatctagtccatctgctacattacttggatttactttcaccctctggtggtgattcgctgttacctgtactccttcgcaaaagcccgaataaccaccattatgtttgtctctgcaatatactactatccatctctgcaaaattctatttttcatacatgtcacatactgcaagggagctatgataatgttcaggaccccacaatcagcgactctggtcttggactgaatccacacacgttttcagccttttaggatgtgtatgtatcagggcccgtgatcatgttactcactgtaagtgattgggtgagctccaatttctcttgttctccattcagcgaggagaagaaaaaagaagaaccagagacacccaggtatcgtgatcgtgctaaggagcggcgtgaagatcaaaaccctgattatgaacctacagaacttggttcgtttcatgcagtggcacctcctgggagtgatttgaggttggcggatgcccacaagatttcaattgagaaaagcaaatatcttggagatgcgccaacagagagaaaccctaggaaaacatgtcatgcactttcttgctggttatatttccatgttttcaggacagggtccttttcagacagggataacacggattatattgcttggaacaatgttactattctttctcacctgctattgctagcgcaagcagttcctcacctcactgtgcattacctatcaaactggagcatgggcaaggccacaaggcaacacttggccattggctaccaaactgacttgatcatggaatatgcagaaatcccctgttgatgagcaactggtggtcctattgtactgcttatttataggtgatttggagcatacacatctggtcaagggcctgggctatgctctacttcacaaagtacggagtgaaattgaaaagaaacctgaggcagaggatgggaaggatgcaaagtcaaggatgcacctagtgctttgggagcataaacacttatctttcacttttgttgttcagggcaacaaaagaagatcaggcagtctccttccgcactgcaactgcaaagtctgtctaccagtggatcataaagcctcaaagcataattaaagagaatgaattgtttcttcctggtcggatgtcatttatttacaacttggaggaggtagtaaccaatgacattccaacaactcttcataggagcaaagctgattgcccagttcaagaggagatggtaactgtaagtgtggatggttctgtacttgacaggattgctaaaattatgacgtaccttcggcttggatcatcagggaaggttttgaagaaaaagaaaaaggagagagatataaaagggaagaacaatttggcaagtggcgactgtgatgagtcagtaaaaccttccaaaattaatggttctactcagaaacatcaatcagatatgccaccaccaccagctcgaccccctcagaacaataatttcactggaaaggagaaacaaccagtccctgttgcaagagcagacgatgatgacatttttgttggagatggagttgactatacagttcctaacgaggaaatgagtcagagccctgtttctgatatggatgaatccccacataaccatcagaagcagtccaatttcattgaacccatgtatggccctgtaccaccatctgaacctgctcaagcttggcaacagccgaatgggtatgatgctgttcaagcccagatggcagctgctggatatcaaggtgactggtcaagctatgtgtatgcagaacagcagttgggttatccagagcagtacgtgcagcaaagcacacaggaatatgatgtgttagctgaccccagtatatcacaggatccgaggttcatgactcaggcagacaaggatcggggtttaggttctgttttcaaacgtgacgatcaaaggcttaatcagctgagggaaaaggacgaacgggagagagatccaaattttatttcagatagttactcagagtgttatcctggttaccaggagtataataatgagatcgcaggaagcgatgatgaagatgatttatcgaagatggatatgggtggacgggcgaagggccgtcttcacaggtgggacttcgagactgaagaggagtgggccaagtacaacgatcagaaagaagccatgccgaaggctgccttccagttcggggtgaagatgcaggacggcaggaaaaccaggaagcagaacaaggaccagaagctgacgaatgacctccacaagatcaacaagattctggctaggaagaagggcgagaaagatggggcggaagatggcggtcactacgatgatgatttacctagctcaaagaaacagcgtggctgaagcagtcatttttttgtttttgtttctcctgctcgtactgtaggcaggcgaacattctatgaagagtcacagtgtcatgtttagctggcagctgtatcctgctgcgtttgtttaaggtgtcctggtaggaaatatgttgatgctattgagccgaaaccatggaaggaatgtg

SEQ ID NO: 37597 - DNA, 2268 bp, Zea Mays
caagcaccagcgaaatccgagggccaaaccgaaaaagtcactccggcaccgccagtcccccgcctcctccaaatccccgaccggcgcctccgtcccggcttccctccgctccctgccgcggcgccgtcgacgccaccgctgttgcctcgctccttcccatcttccgctgccatagctattcgaggagaagaaaaaagaagaaccagagacacccaggtatcgtgatcgtgctaaggagcggcgtgaagatcaaaaccctgattatgaacctacagaacttggttcgtttcatgcagtggcacctcctgggagtgatttgaggttggcggatgcccacaagatttcaattgagaaaagcaaatatcttggaggacagggtccttttcagacagggataacacgatgtggtgtttgccaggattatattgcttggaacaatgttactattctttctcacctgctattgctagcgcaagcagttcctcacctcactgtgcattacctatcaaactggagcatgggcaaggccacaaggcaacacttggccattggctaccaaactgacttgatcatggaatatgcagaaatcccctgttgatgagcaactggtggtcctattgtactgcttatttataggtgatttggagcatacacatctggtcaagggcctgggctatgctctacttcacaaagtacggagtgaaattgaaaagaaacctgaggcagaggatgggaaggatgcaaagtcaagggcaacaaaagaagatcaggcagtctccttccgcactgcaactgcaaagtctgtctaccagtggatcataaagcctcaaagcataattaaagagaatgaattgtttcttcctggtcggatgtcatttatttacaacttggaggaggtagtaaccaatgacattccaacaactcttcataggagcaaagctgattgcccagttcaagaggagatggtaactgtaagtgtggatggttctgtacttgacaggattgctaaaattatgacgtaccttcggcttggatcatcagggaaggttttgaagaaaaagaaaaaggagagagatataaaagggaagaacaatttggcaagtggcgactgtgatgagtcagtaaaaccttccaaaattaatggttctactcagaaacatcaatcagatatgccaccaccaccagctcgaccccctcagaacaataatttcactggaaaggagaaacaaccagtccctgttgcaagagcagacgatgatgacatttttgttggagatggagttgactatacagttcctaacgaggaaatgagtcagagccctgtttctgatatggatgaatccccacataaccatcagaagcagtccaatttcattgaacccatgtatggccctgtaccaccatctgaacctgctcaagcttggcaacagccgaatgggtatgatgctgttcaagcccagatggcagctgctggatatcaaggtgactggtcaagctatgtgtatgcagaacagcagttgggttatccagagcagtacgtgcagcaaagcacacaggaatatgatgtgttagctgaccccagtatatcacaggatccgaggttcatgactcaggcagacaaggatcggggtttaggttctgttttcaaacgtgacgatcaaaggcttaatcagctgagggaaaaggacgaacgggagagagatccaaattttatttcagatagttactcagagtgttatcctggttaccaggagtataataatgagatcgcaggaagcgatgatgaagatgatttatcgaagatggatatgggtggacgggcgaagggccgtcttcacaggtgggacttcgagactgaagaggagtgggccaagtacaacgatcagaaagaagccatgccgaaggctgccttccagttcggggtgaagatgcaggacggcaggaaaaccaggaagcagaacaaggaccagaagctgacgaatgacctccacaagatcaacaagattctggctaggaagaagggcgagaaagatggggcggaagatggcggtcactacgatgatgatttacctagctcaaagaaacagcgtggctgaagcagtcatttttttgtttttgtttctcctgctcgtactgtaggcaggcgaacattctatgaagagtcacagtgtcatgtttagctggcagctgtatcctgctgcgtttgtttaaggtgtcctggtaggaaatatgttgatgctattgagccgaaaccatggaaggaatgtg

SEQ ID NO: 37598 - DNA, 2850 bp, Zea Mays
cctagcccagcccaacggccgagcacacgatccgttcgagagcgagaaggtcctccggcctcagcaccctcaagtacacagtacaccctcgcaccggtaccgcggtccgcggcacacgacacccccactcgtctgtcgactcacgtctgatcgtctctccccaacaatctctcgagtcttgccattcgcctcagcttgcccctcctccaagcgtccaagccccacccggccattgcctcctcctcctgccgcaggcacatggcgccgaccaggcacgcggatgagggcgggcagctccagctcatagacgccgccagcgtcgacgaggaggaggagtgctttgagtccatcgacaagctgatttctcaggggataaatgcaggagacgtgaggaagctgcaggatgcagggatttacacttgcaatggcctaatgatgcataccaagaagaaccttacaggaatcaaaggtttgtctgaagcaaaagttgataagatctgcgaggcagcagaaaaacttctgaaccagggcttcatgacaggaaatgatctccttctcaagcggaagtctgttgttcggattacaaccgggagccaggcacttgatgagctgcttggcggggggattgaaacactttgcatcacagaggcattcggggagttccggtcagggaagacccagttggctcataccctatgtgtctccactcagcttccaatccacatgcatggggggaatggaaaggttgcctacattgacactgagggaacattccgacctgaacgcattgtgccaattgctgagagatttgggatggatgccaatgctgttctcgacaatatcatatatgctcgtgcgtacacatatgagcaccagtacaacttgctcctgggccttgctgccaaaatggctgaagaacctttcaagcttctgattgtggattctgtgattgcactgttccgtgttgatttcagtggcaggggtgaactagcagagcgccagcaaaagctagcacagatgctgtcacgccttaccaagattgccgaggaattcaatgttgcagtgtacatcaccaaccaagtgattgctgatccaggtggcggcatgttcataaccgatccaaagaaaccagcaggcggccatgtgttggcgcatgctgccaccatcagattgatgctgaggaaaggaaaaggcgagcagcgtgtctgcaagatcttcgatgcacctaaccttcctgaaggagaagctgttttccaggttacatcaggtggaatcatggacgtaaaagactgattcgggttttcagccagagtttctgccgaagaagattgttcatgtttctgcagtgaagttcacatagcttgcataggtacacatcgagcgaagttacagcagtggtgtactctgttttatcattgacgtaggaaaaataaataggcgaaactctatgttgcttaggcctcccattgggtagttttttgccacggattacatgtttccttatggagggagtatgttaccgtgtcctttgctttcccaaatgagtgctaggcactaggcagagaccatctactgttagttgtttaagcatgctcatctccatgcttgcgtataaataacactgttctttctcattaaaaaagaaaaaggagagagatataaaagggaagaacaatttggcaagtggcgactgtgatgagtcagtaaaaccttccaaaattaatggttctactcagaaacatcaatcagatatgccaccaccaccagctcgaccccctcagaacaataatttcactggaaaggagaaacaaccagtccctgttgcaagagcagacgatgatgacatttttgttggagatggagttgactatacagttcctaacgaggaaatgagtcagagccctgtttctgatatggatgaatccccacataaccatcagaagcagtccaatttcattgaacccatgtatggccctgtaccaccatctgaacctgctcaagcttggcaacagccgaatgggtatgatgctgttcaagcccagatggcagctgctggatatcaaggtgactggtcaagctatgtgtatgcagaacagcagttgggttatccagagcagtacgtgcagcaaagcacacaggaatatgatgtgttagctgaccccagtatatcacaggatccgaggttcatgactcaggcagacaaggatcggggtttaggttctgttttcaaacgtgacgatcaaaggcttaatcagctgagggaaaaggacgaacgggagagagatccaaattttatttcagatagttactcagagtgttatcctggttaccaggagtataataatgagatcgcaggaagcgatgatgaagatgatttatcgaagatggatatgggtggacgggcgaagggccgtcttcacaggtgggacttcgagactgaagaggagtgggccaagtacaacgatcagaaagaagccatgccgaaggctgccttccagttcggggtgaagatgcaggacggcaggaaaaccaggaagcagaacaaggaccagaagctgacgaatgacctccacaagatcaacaagattctggctaggaagaagggcgagaaagatggggcggaagatggcggtcactacgatgatgatttacctagctcaaagaaacagcgtggctgaagcagtcatttttttgtttttgtttctcctgctcgtactgtaggcaggcgaacattctatgaagagtcacagtgtcatgtttagctggcagctgtatcctgctgcgtttgtttaaggtgtcctggtaggaaatatgttgatgctattgagccgaaaccatggaaggaatgtg

SEQ ID NO: 37599 - DNA, 2844 bp, Zea Mays
cctagcccagcccaacggccgagcacacgatccgttcgagagcgagaaggtcctccggcctcagcaccctcaagtacacagtacaccctcgcaccggtaccgcggtccgcggcacacgacacccccactcgtctgtcgactcacgtctgatcgtctctccccaacaatctctcgagtcttgccattcgcctcagcttgcccctcctccaagcgtccaagccccacccggccattgcctcctcctcctgccgcaggcacatggcgccgaccaggcacgcggatgagggcgggcagctccagctcatagacgccgccagcgtcgacgaggaggaggagtgctttgagtccatcgacaagctgatttctcaggggataaatgcaggagacgtgaggaagctgcaggatgcagggatttacacttgcaatggcctaatgatgcataccaagaagaaccttacaggaatcaaaggtttgtctgaagcaaaagttgataagatctgcgaggcagcagaaaaacttctgaaccagggcttcatgacaggaaatgatctccttctcaagtctgttgttcggattacaaccgggagccaggcacttgatgagctgcttggcggggggattgaaacactttgcatcacagaggcattcggggagttccggtcagggaagacccagttggctcataccctatgtgtctccactcagcttccaatccacatgcatggggggaatggaaaggttgcctacattgacactgagggaacattccgacctgaacgcattgtgccaattgctgagagatttgggatggatgccaatgctgttctcgacaatatcatatatgctcgtgcgtacacatatgagcaccagtacaacttgctcctgggccttgctgccaaaatggctgaagaacctttcaagcttctgattgtggattctgtgattgcactgttccgtgttgatttcagtggcaggggtgaactagcagagcgccagcaaaagctagcacagatgctgtcacgccttaccaagattgccgaggaattcaatgttgcagtgtacatcaccaaccaagtgattgctgatccaggtggcggcatgttcataaccgatccaaagaaaccagcaggcggccatgtgttggcgcatgctgccaccatcagattgatgctgaggaaaggaaaaggcgagcagcgtgtctgcaagatcttcgatgcacctaaccttcctgaaggagaagctgttttccaggttacatcaggtggaatcatggacgtaaaagactgattcgggttttcagccagagtttctgccgaagaagattgttcatgtttctgcagtgaagttcacatagcttgcataggtacacatcgagcgaagttacagcagtggtgtactctgttttatcattgacgtaggaaaaataaataggcgaaactctatgttgcttaggcctcccattgggtagttttttgccacggattacatgtttccttatggagggagtatgttaccgtgtcctttgctttcccaaatgagtgctaggcactaggcagagaccatctactgttagttgtttaagcatgctcatctccatgcttgcgtataaataacactgttctttctcattaaaaaagaaaaaggagagagatataaaagggaagaacaatttggcaagtggcgactgtgatgagtcagtaaaaccttccaaaattaatggttctactcagaaacatcaatcagatatgccaccaccaccagctcgaccccctcagaacaataatttcactggaaaggagaaacaaccagtccctgttgcaagagcagacgatgatgacatttttgttggagatggagttgactatacagttcctaacgaggaaatgagtcagagccctgtttctgatatggatgaatccccacataaccatcagaagcagtccaatttcattgaacccatgtatggccctgtaccaccatctgaacctgctcaagcttggcaacagccgaatgggtatgatgctgttcaagcccagatggcagctgctggatatcaaggtgactggtcaagctatgtgtatgcagaacagcagttgggttatccagagcagtacgtgcagcaaagcacacaggaatatgatgtgttagctgaccccagtatatcacaggatccgaggttcatgactcaggcagacaaggatcggggtttaggttctgttttcaaacgtgacgatcaaaggcttaatcagctgagggaaaaggacgaacgggagagagatccaaattttatttcagatagttactcagagtgttatcctggttaccaggagtataataatgagatcgcaggaagcgatgatgaagatgatttatcgaagatggatatgggtggacgggcgaagggccgtcttcacaggtgggacttcgagactgaagaggagtgggccaagtacaacgatcagaaagaagccatgccgaaggctgccttccagttcggggtgaagatgcaggacggcaggaaaaccaggaagcagaacaaggaccagaagctgacgaatgacctccacaagatcaacaagattctggctaggaagaagggcgagaaagatggggcggaagatggcggtcactacgatgatgatttacctagctcaaagaaacagcgtggctgaagcagtcatttttttgtttttgtttctcctgctcgtactgtaggcaggcgaacattctatgaagagtcacagtgtcatgtttagctggcagctgtatcctgctgcgtttgtttaaggtgtcctggtaggaaatatgttgatgctattgagccgaaaccatggaaggaatgtg

SEQ ID NO: 37600 - DNA, 1789 bp, Zea Mays
cctagcccagcccaacggccgagcacacgatccgttcgagagcgagaaggtcctccggcctcagcaccctcaagtacacagtacaccctcgcaccggtaccgcggtccgcggcacacgacacccccactcgtctgtcgactcacgtctgatcgtctctccccaacaatctctcgagtcttgccattcgcctcagcttgcccctcctccaagcgtccaagccccacccggccattgcctcctcctcctgccgcagtgcaggcacatggcgccgaccaggcacgcggatgagggcgggcagctccagctcatagacgccgccagcgtcgacgaggaggaggagtgctttgagtccatcgacaagctgatttctcaggggataaatgcaggagacgtgaggaagctgcaggatgcagggatttacacttgcaatggcctaatgatgcataccaagaagaaccttacaggaatcaaaggtttgtctgaagcaaaagttgataagatctgcgaggcagcagaaaaacttctgaaccagggcttcatgacaggaaatgatctccttctcaagtctgttgttcggattacaaccgggagccaggcacttgatgagctgcttggcggggggattgaaacactttgcatcacagaggcattcggggagttccggtcagggaagacccagttggctcataccctatgtgtctccactcagcttccaatccacatgcatggggggaatggaaaggttgcctacattgacactgagggaacattccgacctgaacgcattgtgccaattgctgagagatttgggatggatgccaatgctgttctcgacaatatcatatatgctcgtgcgtacacatatgagcaccagtacaacttgctcctgggccttgctgccaaaatggctgaagaacctttcaagcttctgattgtggattctgtgattgcactgttccgtgttgatttcagtggcaggggtgaactagcagagcgccagcaaaagctagcacagatgctgtcacgccttaccaagattgccgaggaattcaatgttgcagtgtacatcaccaaccaagtgattgctgatccaggtggcggcatgttcataaccgatccaaagaaaccagcaggcggccatgtgttggcgcatgctgccaccatcagattgatgctgaggaaaggaaaaggcgagcagcgtgtctgcaagatcttcgatgcacctaaccttcctgaaggagaagctgttttccaggttacatcaggtggaatcatggacgtaaaagactgattcgggttttcagccagagtttctgccgaagaagattgttcatgtttctgcagtgaagttcacatagcttgcataggtacacatcgagcgaagttacagcagtggtgtactctgttttatcattgacgtaggaaaaataaataggcgaaactctatgttgcttaggcctcccattgggtagttttttgccacggattacatgtttccttatggagggagtatgttaccgtgtcctttgctttcccaaatgagtgctaggcactaggcagagaccatctactgttagttgtttaagcatgctcatctccatgcttgcgtataaataacactgttctttctcattagtttggtttgacaatgaatggaactggaaagtaaagatactcggaggtcgtaactcgtaacttttgcaagttgggaacagatgaccaagctactgctgctaatcagtaccattccgggcagagcagaagagcagaggcatgcttccaagttcc

SEQ ID NO: 37601 - DNA, 1691 bp, Zea Mays
cctagcccagcccaacggccgagcacacgatccgttcgagagcgagaaggtcctccggcctcagcaccctcaagtacacagtacaccctcgcaccggtaccgcggtccgcggcacacgacacccccactcgtctgtcgactcacgtctgatcgtctctccccaacaatctctcgagtcttgccattcgcctcagcttgcccctcctccaagcgtccaagccccacccggccattgcctcctcctcctgccgcagtgcaggcacatggcgccgaccaggcacgcggatgagggcgggcagctccagctcatagacgccgccagcgtcgacgaggaggaggagtgctttgagtccatcgacaagctgatttctcaggggataaatgcaggagacgtgaggaagctgcaggatgcagggatttacacttgcaatggcctaatgatgcataccaagaagaaccttacaggaatcaaaggtttgtctgaagcaaaagttgataagatctgcgaggcagcagaaaaacttctgaaccagggcttcatgacaggaaatgatctccttctcaaggtcagggaagacccagttggctcataccctatgtgtctccactcagcttccaatccacatgcatggggggaatggaaaggttgcctacattgacactgagggaacattccgacctgaacgcattgtgccaattgctgagagatttgggatggatgccaatgctgttctcgacaatatcatatatgctcgtgcgtacacatatgagcaccagtacaacttgctcctgggccttgctgccaaaatggctgaagaacctttcaagcttctgattgtggattctgtgattgcactgttccgtgttgatttcagtggcaggggtgaactagcagagcgccagcaaaagctagcacagatgctgtcacgccttaccaagattgccgaggaattcaatgttgcagtgtacatcaccaaccaagtgattgctgatccaggtggcggcatgttcataaccgatccaaagaaaccagcaggcggccatgtgttggcgcatgctgccaccatcagattgatgctgaggaaaggaaaaggcgagcagcgtgtctgcaagatcttcgatgcacctaaccttcctgaaggagaagctgttttccaggttacatcaggtggaatcatggacgtaaaagactgattcgggttttcagccagagtttctgccgaagaagattgttcatgtttctgcagtgaagttcacatagcttgcataggtacacatcgagcgaagttacagcagtggtgtactctgttttatcattgacgtaggaaaaataaataggcgaaactctatgttgcttaggcctcccattgggtagttttttgccacggattacatgtttccttatggagggagtatgttaccgtgtcctttgctttcccaaatgagtgctaggcactaggcagagaccatctactgttagttgtttaagcatgctcatctccatgcttgcgtataaataacactgttctttctcattagtttggtttgacaatgaatggaactggaaagtaaagatactcggaggtcgtaactcgtaacttttgcaagttgggaacagatgaccaagctactgctgctaatcagtaccattccgggcagagcagaagagcagaggcatgcttccaagttcc

SEQ ID NO: 37602 - DNA, 1731 bp, Zea Mays
cttgtttctgcctggtgttgattccgcctgctccgctgctctgccattggtgtgtgtctccgtctagtgccgtccggcgaaccgtcccgtccgtggagtcggggcgcggtgcttcccctcttggtcctcgctcgcaatggcggattggaatcgaccgtgggacgtgaatgcacattgtgatcgctccggcagcgaccggcggcctcctctgcctcggcctgatagcagagacaattactacccagtcccattatgggaaagaaaattctgccgcaacgcttacggcatcccttggaagaagttctgcgaaaagaagcaatttattgaattatacaaaaacgtcatggactgggacgattcaggagctttggaaaattttgaggctgcaaaggagaggttcagggcaaagtatcatggggaacctttcgaggatcctttgctagaccctgatatgtacatcgacgagatcgaccacctatgcgaagtcgacccagagttggtagctgacctggataaggtacctgacgtggataaggtacttgagcaacaattggtagccaacttgggttgtgaagagccggttgctgatctggtacccatgggtcacggagaactgggtgccattccgacacccacaggttggggagaagaggatgccattccgacacccacaggttggggagaagaggatgccaatctggcacccgtaggttggggagaaccggttgccaatgtggcagccattggatggggagaatcggccagcctgacacctgatactgcttgggagggccgcaactctggatggaactctcctctggatcagccgcaatgcacaccaagcaactggaacgataactcctatggcgatagatcatccaacaattggtaccagcaggaagtggatccgagccacatgccatttgggactagaaggaatttgaatggcggcggccgcggcagtagttgcaggaactcgaacggtggcgttggcaacaggaacaataacctctatggaggtagatcatccaacactcggtaccaacaggaggtggatccgggccgcaactcatctgggactagaaggaagctgaatggcggtagtggcaacagaaacaataacttctatggaggtggatcatccaacaataggtaccaacaggaggtggatccgggccgcatgtctcctggggctgggaggaagcagaatggcggtggccgtggctgcggccgcagtggcagtaagtggaatggtggtggtggcagcggctggcagcagggccagagaggaagaaggaccagggagatggagtggcgtccggtgcagcacaagagggatccccaagatgaccctgccgcttgatctcgcccgtcgtctgtgcagccagccagggttgctcttttgcttcgctctctagtataattaactagaactagtgattgtagtctgtagagtctctattagggttctcttttgtactaactactagaaaaaatagcgccctatcgtgcgccgtagcagtctaaaatatattgtaagaaaggtactccctccgtttctttttagttgtcgctggatagttcaattttacactatccagcgacaactaaaacgaaacggaaggagtaacttatatgttggcccttctaataagaaggatcgtatcactggagtagtgccacatgttattattagtggtttatctatcctttaatatgatgcaattcttt

SEQ ID NO: 37603 - DNA, 885 bp, Zea Mays
ccttaatgggcatgcatctgcgaaagtccagttggagccaactattacagatgaaatctctttttatgggctcagcagtaaattgaaaatgcgtgagctctcccctttgtcatgggtgccatcatcttcacatgctgatctggtggggaaaatcatcttaagttggcttgatgcaaccatctcttgtccgtcatcctgcctccagcctgaggaaagtactaggtatcgaggacttgatgcaagtagcactggcttgttccccattgagtatggctgtaacaattttaaacagacgagcaatagaccagtgatgcccaaagatcattagtgttggctccctttcagaaatgccgcagctttgtcattgtccagtacggaaacacaaacaccgatatttttaagtacttttagtcacctgtttcaccagtggaagaaatgacagatggcacagatgattcatctgtatgaaccagatatcaagtacggccttggagaagcttaagggctcgttcgtttctgcaggattgcaccaagaattatttctgttgatcataacttatacaaatcagagaagcaatccgggccggaacagtttcggtcttctattccctgtcaaccgaacgggccctaagctaggtggttattggatcaggcgtctatgctgtgagagaactggcaaagaggatcctccgtttgtccttggcttctggtgttacagaagaaactgcagaacccatgagcgaaaagggtggattagttttagcaaacaagtggttacactagttgtagctgtactatgtgtcctctgaatttccctgtgaaagcaatatgatcaaagactgtcaaatatatccttttttaaaaaaaaaaattgcaatatgtaag

SEQ ID NO: 37604 - DNA, 2160 bp, Zea Mays
ctccctctttccccccgggcctcgtctgctctgttcgactgttgttgcagtgccttcgcctctccagcaagcaaagccgacccccacaccagccagtcaggaatcgccgccggcggaagccaagcatcatccccagacaccccgtccgtcatggatccggcggcgtggccgccgtggacgtcgctcctgctgcgggcgctgagccggcggcggacctgggtggcgctcttcctcgcagtgtacgccgcgctgctctcctcctcctggtccctgctggcctccgtccgcgcctggtactacgccgcctcctccgcctccgcctcggcggccgcctcggcagcgcccgcctggcccgcggcgctctacgcctccgtcacgtacggcgccgtgttcggcctactctccatggccgccgcgctcgccgtcgccgcccccgccatgctggtcacctggaccaccgtccttgtgctcctcgccttcgcggggcgccggcccaggtcgctcgtcgccgagggccgacgcgccaccagggacatcgcgggcctcgcgctccgcgtcctcctccgcgagggcaacgccgtcgccgcgctctgcgctgccgccagcttcgccgcgctcctcctcggccggcgcgacgacgatgccgcacgccgcgcttcctagttcgagctggttgtagcctgttgtagcatcgcccccctccccttttacacctcttcctcctcttctctcaagctagatctccagccctgttgttcctctccgggcgtaaccgcctgcgcaagagattatgatttgtttgttgcagctagtaggtgtaaattatcacaccagtttgtttcagttactccacaaattggacactgatggcatctgtaatgaatgtagcttgtcttacagctcttgacgatgaaaatgattccgggggctaactaaccttacatacagcgtacatttgttactgttagcacagctttctttcagatgacgtgatctttttgttaggaacaatattggtcgctgtggtggaacactggaagccatccttaatgggcatgcatctgcgaaagtccagttggagccaactattacagatgaaatccagtaaattgaaaatgcgtgagctctcccctttgtcatgggtgccatcatcttcacatgctgatctggtggggaaaatcatcttaagttggcttgatgcaaccatctcttgtccgtcatcctgcctccagcctgaggaaagtactaggtatcgaggacttgatgcaagtagcactggcttgttccccattgagtatggctgtaacaattttaaacagacgagcaatagaccagtgatgcccaaagatcattagtgttggctccctttcagaaatgccgcagctttgtcattgtccagtacggaaacacaaacaccgatatttttaagtacttttagtcacctgtttcaccagtggaagaaatgacagatggcacagatgattcatctgtatgaaccagatatcaagctcaacagattatttggatgataaaactgatctcaaggctaactaaccttacatacagcgtaaatttgttactgttagcacagctttctttcagatgacgtgatctttttgttaggaacaagaacaatattggtcgcctacgcaagggtactggacaatgacaaagctgcggcattagcaaatctggtatgaaccagatatcaagtaccgaaacactgatgattcttctgtatgaaccagatatcaagtacggccttggagaagcttaagggctcgttcgtttctgcaggattgcaccaagaattatttctgttgatcataacttatacaaatcagagaagcaatccgggccggaacagtttcggtcttctattccctgtcaaccgaacgggccctaagctaggtggttattggatcaggcgtctatgctgtgagagaactggcaaagaggatcctccgtttgtccttggcttctggtgttacagaagaaactgcagaacccatgagcgaaaagggtggattagttttagcaaacaagtggttacactagttgtagctgtactatgtgtcctctgaatttccctgtgaaagcaatatgatcaaagactgtcaaatatatccttttttaaaaaaaaaaattgcaatatgtaag

SEQ ID NO: 37605 - DNA, 1143 bp, Zea Mays
ctccctctttccccccgggcctcgtctgctctgttcgactgttgttgcagtgccttcgcctctccagcaagcaaagccgacccccacaccagccagtcaggaatcgccgccggcggaagccaagcatcatccccagacaccccgtccgtcatggatccggcggcgtggccgccgtggacgtcgctcctgctgcgggcgctgagccggcggcggacctgggtggcgctcttcctcgcagtgaacaatattggtcgctgtggtggaacactggaagccatccttaatgggcatgcatctgcgaaagtccagttggagccaactattacagatgaaatctaaattgaaaatgcgtgagctctcccctttgtcatgggtgccatcatcttcacatgctgatctggtggggaaaatcatcttaagttggcttgatgcaaccatctcttgtccgtcatcctgcctccagcctgaggaaagtactaggtatcgaggacttgatgcaagtagcactggcttgttccccattgagtatggctgtaacaattttaaacagacgagcaatagaccagtgatgcccaaagatcattagtgttggctccctttcagaaatgccgcagctttgtcattgtccagtacggaaacacaaacaccgatatttttaagtacttttagtcacctgtttcaccagtggaagaaatgacagatggcacagatgattcatctgtatgaaccagatatcaagtacggccttggagaagcttaagggctcgttcgtttctgcaggattgcaccaagaattatttctgttgatcataacttatacaaatcagagaagcaatccgggccggaacagtttcggtcttctattccctgtcaaccgaacgggccctaagctaggtggttattggatcaggcgtctatgctgtgagagaactggcaaagaggatcctccgtttgtccttggcttctggtgttacagaagaaactgcagaacccatgagcgaaaagggtggattagttttagcaaacaagtggttacactagttgtagctgtactatgtgtcctctgaatttccctgtgaaagcaatatgatcaaagactgtcaaatatatccttttttaaaaaaaaaaattgcaatatgtaag

SEQ ID NO: 37606 - DNA, 2054 bp, Zea Mays
ctccctctttccccccgggcctcgtctgctctgttcgactgttgttgcagtgccttcgcctctccagcaagcaaagccgacccccacaccagccagtcaggaatcgccgccggcggaagccaagcatcatccccagacaccccgtccgtcatggatccggcggcgtggccgccgtggacgtcgctcctgctgcgggcgctgagccggcggcggacctgggtggcgctcttcctcgcagtgtacgccgcgctgctctcctcctcctggtccctgctggcctccgtccgcgcctggtactacgccgcctcctccgcctccgcctcggcggccgcctcggcagcgcccgcctggcccgcggcgctctacgcctccgtcacgtacggcgccgtgttcggcctactctccatggccgccgcgctcgccgtcgccgcccccgccatgctggtcacctggaccaccgtccttgtgctcctcgccttcgcggggcgccggcccaggtcgctcgtcgccgagggccgacgcgccaccagggacatcgcgggcctcgcgctccgcgtcctcctccgcgagggcaacgccgtcgccgcgctctgcgctgccgccagcttcgccgcgctcctcctcggccggcgcgacgacgatgccgcacgccgcgcttcctagttcgagctggttgtagcctgttgtagcatcgcccccctccccttttacacctcttcctcctcttctctcaagctagatctccagccctgttgttcctctccgggcgtaaccgcctgcgcaagagattatgatttgtttgttgcagctagtaggtgtaaattatcacaccagtttgtttcagttactccacaaattggacactgatggcatctgtaatgaatgtagcttgtcttacagctcttgacgatgaaaatgattccgggggctaactaaccttacatacagcgtacatttgttactgttagcacagctttctttcagatgacgtgatctttttgttaggaacaatattggtcgctgtggtggaacactggaagccatccttaatgggcatgcatctgcgaaagtccagttggagccaactattacagatgaaatctaaattgaaaatgcgtgagctctcccctttgtcatgggtgccatcatcttcacatgctgatctggtggggaaaatcatcttaagttggcttgatgcaaccatctcttgtccgtcatcctgcctccagcctgaggaaagtactaggtatcgaggacttgatgcaagtagcactggcttgttccccattgagtatggctgtaacaattttaaacagacgagcaatagaccagtgatgcccaaagatcattagtgttggctccctttcagaaatgccgcagctttgtcattgtccagtacggaaacacaaacaccgatatttttaagtacttttagtcacctgtttcaccagtggaagaaatgacagatggcacagatgattcatctgtatgaaccagatatcaagctcaacagattatttggatgataaaactgatctcaaggctaactaaccttacatacagcgtaaatttgttactgttagcacagctttctttcagatgacgtgatctttttgttaggaacaagaacaatattggtcgcctacgcaagggtactggacaatgacaaagctgcggcattagcaaatctggattgcaccaagaattatttctgttgatcataacttatacaaatcagagaagcaatccgggccggaacagtttcggtcttctattccctgtcaaccgaacgggccctaagctaggtggttattggatcaggcgtctatgctgtgagagaactggcaaagaggatcctccgtttgtccttggcttctggtgttacagaagaaactgcagaacccatgagcgaaaagggtggattagttttagcaaacaagtggttacactagttgtagctgtactatgtgtcctctgaatttccctgtgaaagcaatatgatcaaagactgtcaaatatatccttttttaaaaaaaaaaattgcaatatgtaag

SEQ ID NO: 37607 - DNA, 2177 bp, Zea Mays
ctccctctttccccccgggcctcgtctgctctgttcgactgttgttgcagtgccttcgcctctccagcaagcaaagccgacccccacaccagccagtcaggaatcgccgccggcggaagccaagcatcatccccagacaccccgtccgtcatggatccggcggcgtggccgccgtggacgtcgctcctgctgcgggcgctgagccggcggcggacctgggtggcgctcttcctcgcagtgtacgccgcgctgctctcctcctcctggtccctgctggcctccgtccgcgcctggtactacgccgcctcctccgcctccgcctcggcggccgcctcggcagcgcccgcctggcccgcggcgctctacgcctccgtcacgtacggcgccgtgttcggcctactctccatggccgccgcgctcgccgtcgccgcccccgccatgctggtcacctggaccaccgtccttgtgctcctcgccttcgcggggcgccggcccaggtcgctcgtcgccgagggccgacgcgccaccagggacatcgcgggcctcgcgctccgcgtcctcctccgcgagggcaacgccgtcgccgcgctctgcgctgccgccagcttcgccgcgctcctcctcggccggcgcgacgacgatgccgcacgccgcgcttcctagttcgagctggttgtagcctgttgtagcatcgcccccctccccttttacacctcttcctcctcttctctcaagctagatctccagccctgttgttcctctccgggcgtaaccgcctgcgcaagagattatgatttgtttgttgcagctagtaggtgtaaattatcacaccagtttgtttcagttactccacaaattggacactgatggcatctgtaatgaatgtagcttgtcttacagctcttgacgatgaaaatgattccgggggctaactaaccttacatacagcgtacatttgttactgttagcacagctttctttcagatgacgtgatctttttgttaggaacaatattggtcgctgtggtggaacactggaagccatccttaatgggcatgcatctgcgaaagtccagttggagccaactattacagatgaaatctctttttatgggctcagcagtaaattgaaaatgcgtgagctctcccctttgtcatgggtgccatcatcttcacatgctgatctggtggggaaaatcatcttaagttggcttgatgcaaccatctcttgtccgtcatcctgcctccagcctgaggaaagtactaggtatcgaggacttgatgcaagtagcactggcttgttccccattgagtatggctgtaacaattttaaacagacgagcaatagaccagtgatgcccaaagatcattagtgttggctccctttcagaaatgccgcagctttgtcattgtccagtacggaaacacaaacaccgatatttttaagtacttttagtcacctgtttcaccagtggaagaaatgacagatggcacagatgattcatctgtatgaaccagatatcaagctcaacagattatttggatgataaaactgatctcaaggctaactaaccttacatacagcgtaaatttgttactgttagcacagctttctttcagatgacgtgatctttttgttaggaacaagaacaatattggtcgcctacgcaagggtactggacaatgacaaagctgcggcattagcaaatctggtatgaaccagatatcaagtaccgaaacactgatgattcttctgtatgaaccagatatcaagtacggccttggagaagcttaagggctcgttcgtttctgcaggattgcaccaagaattatttctgttgatcataacttatacaaatcagagaagcaatccgggccggaacagtttcggtcttctattccctgtcaaccgaacgggccctaagctaggtggttattggatcaggcgtctatgctgtgagagaactggcaaagaggatcctccgtttgtccttggcttctggtgttacagaagaaactgcagaacccatgagcgaaaagggtggattagttttagcaaacaagtggttacactagttgtagctgtactatgtgtcctctgaatttccctgtgaaagcaatatgatcaaagactgtcaaatatatccttttttaaaaaaaaaaattgcaatatgtaag

SEQ ID NO: 37608 - DNA, 2064 bp, Zea Mays
ctccctctttccccccgggcctcgtctgctctgttcgactgttgttgcagtgccttcgcctctccagcaagcaaagccgacccccacaccagccagtcaggaatcgccgccggcggaagccaagcatcatccccagacaccccgtccgtcatggatccggcggcgtggccgccgtggacgtcgctcctgctgcgggcgctgagccggcggcggacctgggtggcgctcttcctcgcagtgtacgccgcgctgctctcctcctcctggtccctgctggcctccgtccgcgcctggtactacgccgcctcctccgcctccgcctcggcggccgcctcggcagcgcccgcctggcccgcggcgctctacgcctccgtcacgtacggcgccgtgttcggcctactctccatggccgccgcgctcgccgtcgccgcccccgccatgctggtcacctggaccaccgtccttgtgctcctcgccttcgcggggcgccggcccaggtcgctcgtcgccgagggccgacgcgccaccagggacatcgcgggcctcgcgctccgcgtcctcctccgcgagggcaacgccgtcgccgcgctctgcgctgccgccagcttcgccgcgctcctcctcggccggcgcgacgacgatgccgcacgccgcgcttcctagttcgagctggttgtagcctgttgtagcatcgcccccctccccttttacacctcttcctcctcttctctcaagctagatctccagccctgttgttcctctccgggcgtaaccgcctgcgcaagagattatgatttgtttgttgcagctagtaggtgtaaattatcacaccagtttgtttcagttactccacaaattggacactgatggcatctgtaatgaatgtagcttgtcttacagctcttgacgatgaaaatgattccgggggctaactaaccttacatacagcgtacatttgttactgttagcacagctttctttcagatgacgtgatctttttgttaggaacaatattggtcgctgtggtggaacactggaagccatccttaatgggcatgcatctgcgaaagtccagttggagccaactattacagatgaaatctaaattgaaaatgcgtgagctctcccctttgtcatgggtgccatcatcttcacatgctgatctggtggggaaaatcatcttaagttggcttgatgcaaccatctcttgtccgtcatcctgcctccagcctgaggaaagtactaggtatcgaggacttgatgcaagtagcactggcttgttccccattgagtatggctgtaacaattttaaacagacgagcaatagaccagtgatgcccaaagatcattagtgttggctccctttcagaaatgccgcagctttgtcattgtccagtacggaaacacaaacaccgatatttttaagtacttttagtcacctgtttcaccagtggaagaaatgacagatggcacagatgattcatctgtatgaaccagatatcaagctcaacagattatttggatgataaaactgatctcaaggctaactaaccttacatacagcgtaaatttgttactgttagcacagctttctttcagatgacgtgatctttttgttaggaacaagaacaatattggtcgcctacgcaaggatatcaagtacggccttggagaagcttaagggctcgttcgtttctgcaggattgcaccaagaattatttctgttgatcataacttatacaaatcagagaagcaatccgggccggaacagtttcggtcttctattccctgtcaaccgaacgggccctaagctaggtggttattggatcaggcgtctatgctgtgagagaactggcaaagaggatcctccgtttgtccttggcttctggtgttacagaagaaactgcagaacccatgagcgaaaagggtggattagttttagcaaacaagtggttacactagttgtagctgtactatgtgtcctctgaatttccctgtgaaagcaatatgatcaaagactgtcaaatatatccttttttaaaaaaaaaaattgcaatatgtaag

SEQ ID NO: 37609 - DNA, 1445 bp, Zea Mays
ctccctctttccccccgggcctcgtctgctctgttcgactgttgttgcagtgccttcgcctctccagcaagcaaagccgacccccacaccagccagtcaggaatcgccgccggcggaagccaagcatcatccccagacaccccgtccgtcatggatccggcggcgtggccgccgtggacgtcgctcctgctgcgggcgctgagccggcggcggacctgggtggcgctcttcctcgcagtgtacgccgcgctgctctcctcctcctggtccctgctggcctccgtccgcgcctggaacaatattggtcgctgtggtggaacactggaagccatccttaatgggcatgcatctgcgaaagtccagttggagccaactattacagatgaaatctaaattgaaaatgcgtgagctctcccctttgtcatgggtgccatcatcttcacatgctgatctggtggggaaaatcatcttaagttggcttgatgcaaccatctcttgtccgtcatcctgcctccagcctgaggaaagtactaggtatcgaggacttgatgcaagtagcactggcttgttccccattgagtatggctgtaacaattttaaacagacgagcaatagaccagtgatgcccaaagatcattagtgttggctccctttcagaaatgccgcagctttgtcattgtccagtacggaaacacaaacaccgatatttttaagtacttttagtcacctgtttcaccagtggaagaaatgacagatggcacagatgattcatctgtatgaaccagatatcaagctcaacagattatttggatgataaaactgatctcaaggctaactaaccttacatacagcgtaaatttgttactgttagcacagctttctttcagatgacgtgatctttttgttaggaacaagaacaatattggtcgcctacgcaagggtactggacaatgacaaagctgcggcattagcaaatctggtatgaaccagatatcaagtaccgaaacactgatgattcttctgtatgaaccagatatcaagtacggccttggagaagcttaagggctcgttcgtttctgcaggattgcaccaagaattatttctgttgatcataacttatacaaatcagagaagcaatccgggccggaacagtttcggtcttctattccctgtcaaccgaacgggccctaagctaggtggttattggatcaggcgtctatgctgtgagagaactggcaaagaggatcctccgtttgtccttggcttctggtgttacagaagaaactgcagaacccatgagcgaaaagggtggattagttttagcaaacaagtggttacactagttgtagctgtactatgtgtcctctgaatttccctgtgaaagcaatatgatcaaagactgtcaaatatatccttttttaaaaaaaaaaattgcaatatgtaag

SEQ ID NO: 37610 - DNA, 1743 bp, Zea Mays
ctccctctttccccccgggcctcgtctgctctgttcgactgttgttgcagtgccttcgcctctccagcaagcaaagccgacccccacaccagccagtcaggaatcgccgccggcggaagccaagcatcatccccagacaccccgtccgtcatggatccggcggcgtggccgccgtggacgtcgctcctgctgcgggcgctgagccggcggcggacctgggtggcgctcttcctcgcagtgtacgccgcgctgctctcctcctcctggtccctgctggcctccgtccgcgcctggtactacgccgcctcctccgcctccgcctcggcggccgcctcggcagcgcccgcctggcccgcggcgctctacgcctccgtcacgtacggcgccgtgttcggcctactctccatggccgccgcgctcgccgtcgccgcccccgccatgctggtcacctggaccaccgtccttgtgctcctcgccttcgcggggcgccggcccaggtcgctcgtcgccgagggccgacgcgccaccagggacatcgcgggcctcgcgctccgcgtcctcctccgcgagggcaacgccgtcgccgcgctctgcgctgccgccagcttcgccgcgctcctcctcggccggcgcgacgacgatgccgcacgccgcgcttcctagttcgagctggttgtagcctgttgtagcatcgcccccctccccttttacacctcttcctcctcttctctcaagctagatctccagccctgttgttcctctccgggcgtaaccgcctgcgcaagagattatgatttgtttgttgcagctagtaggtgtaaattatcacaccagtttgtttcagttactccacaaattggacactgatggcatctgtaatgaatgtagcttgtcttacagctcttgacgatgaaaatgattccgggggctaactaaccttacatacagcgtacatttgttactgttagcacagctttctttcagatgacgtgatctttttgttaggaacaatattggtcgctgtggtggaacactggaagccatccttaatgggcatgcatctgcgaaagtccagttggagccaactattacagatgaaatctaaattgaaaatgcgtgagctctcccctttgtcatgggtgccatcatcttcacatgctgatctggtggggaaaatcatcttaagttggcttgatgcaaccatctcttgtccgtcatcctgcctccagcctgaggaaagtactaggtatcgaggacttgatgcaagtagcactggcttgttccccattgagtatggctgtaacaattttaaacagacgagcaatagaccaatatcaagtacggccttggagaagcttaagggctcgttcgtttctgcaggattgcaccaagaattatttctgttgatcataacttatacaaatcagagaagcaatccgggccggaacagtttcggtcttctattccctgtcaaccgaacgggccctaagctaggtggttattggatcaggcgtctatgctgtgagagaactggcaaagaggatcctccgtttgtccttggcttctggtgttacagaagaaactgcagaacccatgagcgaaaagggtggattagttttagcaaacaagtggttacactagttgtagctgtactatgtgtcctctgaatttccctgtgaaagcaatatgatcaaagactgtcaaatatatccttttttaaaaaaaaaaattgcaatatgtaag

SEQ ID NO: 37611 - DNA, 1047 bp, Zea Mays
tgaaattgcaatgcgtgataagcttgagccgccatgattttgaattcaaaagagaaacgaggttcacgtcaaaatgtccaccgaaagaaatcattcgcaagattgaggaagctgcaaaacctctaggatttggtgtccagaagaaaaactacaagttgaggctagagaaagtaaaagcagggaggaagggaaacctgaatgttgctacggaggtagtaaaaaacaactcatcaactgtaaacaataatccaagcaaactttcttgtgcctagcatttactaatgtgtttttcatccagatactacaggttgcgccctcccttcatatggtacaagtccggaaagcaaaaggcgacactctggagttccaaaagttctacaagaacctttccaagaccttaaaggacgttgtctggaaatctgaagacctgcaaatgcgagctgcttcttagcatccactagatggcgagatgttcgtacgtgtcagattccattcccgtagcatgatgtgtcgtcagccgtttctgttcactgcactctgcatggtccggtgggcgcgtggcttggcattttcagagaccgcgttgctcgttgcagcccgggatgaaggcgatgcagtaggttttgtggatgtggtgagctctgtatatgcctattgatgagtcatgttgcaagctgtaacgacactatgatccgtgaagtgtagaagcagccaagtatgttctttctatgctgccccatttcccggcagtttccatgcattttgaagaaaaaaatagtggctaactcattgatatttgtatttggtcatcattaataaatcgcctctccatctgtgcatgacccctctatcgttgtaagatttttttacaatcctcatctttctaaggttctgtttttttaccagattatataattcagctcaaataaattaagagacaaacaaacaacatagattatcaaatgaattatataatttagatacctagattatgataatctataagcaagttattagaataatgcataagtgttcatataatttata

SEQ ID NO: 37612 - DNA, 1297 bp, Zea Mays
cgacctaaagccgtcatctcagccgagcgagcggcgaggaccgacgctgggaagctttgggatctcgggcgtactgttccaaatacagttaaatttgctgactagattggtcgaacaaagcagaagaaaattcgtgtgacttcagaataacaatccctgaaatactggaggatgagtggttcaaaaagggctacaagcgcccggagtttgacgagaaatatgacacgccattggatgatgtggatgctgtcttcaatgactcagaagagcaccacgtgacagagaagaaagaagaagaacccgtagctctcaatgcatttgaactgatttcaaggtcagcaggcctaaatcttgggaacctatttgactcggagcaggaattcaaaagagaaacgaggttcacgtcaaaatgtccaccgaaagaaatcattcgcaagattgaggaagctgcaaaacctctaggatttggtgtccagaagaaaaactacaagttgaggctagagaaagtaaaagcagggaggaagggaaacctgaatgttgctacggagatactacaggttgcgccctcccttcatatggtacaagtccggaaagcaaaaggcgacactctggagttccaaaagttctacaagaacctttccaagaccttaaaggacgttgtctggaaatctgaagacctgcaaatgcgagctgcttcttagcatccactagatggcgagatgttcgtacgtgtcagattccattcccgtagcatgatgtgtcgtcagccgtttctgttcactgcactctgcatggtccggtgggcgcgtggcttggcattttcagagaccgcgttgctcgttgcagcccgggatgaaggcgatgcagtaggttttgtggatgtggtgagctctgtatatgcctattgatgagtcatgttgcaagctgtaacgacactatgatccgtgaagtgtagaagcagccaagtatgttctttctatgctgccccatttcccggcagtttccatgcattttgaagaaaaaaatagtggctaactcattgatatttgtatttggtcatcattaataaatcgcctctccatctgtgcatgacccctctatcgttgtaagatttttttacaatcctcatctttctaaggttctgtttttttaccagattatataattcagctcaaataaattaagagacaaacaaacaacatagattatcaaatgaattatataatttagatacctagattatgataatctataagcaagttattagaataatgcataagtgttcatataatttata

SEQ ID NO: 37613 - DNA, 1910 bp, Zea Mays
ctcacgtcttctacattgtgcatggccccttcctttcagattctgtctgttcctcctctagtattaagagggagatttcgaccatgaagctgattaagcaccctaacgttgttcgcatatatgaggtgatgggaagtaaaacaaaggtctacattgtgctggagtatgttaccggcggcgaacttttcgacacaattgctaaccaaggtcgaatgagggaaggcgaggcgaggagttacttccaacaattaatcaacgcagttgattattgccatagcagggccagaaaatctactgcttgactcatatggaaatctgaatgtctctgactttgggctgagcgcgctgtcccagcaaatcaaggatgatggattgctgcacacaacttgtgggactccaaactatgtggcaccagaggtcctagaagatcagggctatgatggtgcaatggctgatctgtggtcatgtggagttatcctgtttgttctgctagctgggtatttaccttttgaggactctaaccttatgacgctgtataagaaaatctcaaatgcagaatacacatttccaccatggacatctttccctgccaagaggttgttgacaagaatccttgatccaaatccgatgacgggttgattttgcgtccatattatagctgagcaactctttcattcctagcagattcatctctccagttccaaatacagttaaatttgctgactagattggtcgaacaaagcagaagaaaattcgtgtgacttcagaataacaatccctgaaatactggaggatgagtggttcaaaaagggctacaagcgcccggagtttgacgagaaatatgacacgccattggatgatgtggatgctgtcttcaatgactcagaagagcaccacgtgacagagaagaaagaagaagaacccgtagctctcaatgcatttgaactgatttcaaggtcagcaggcctaaatcttgggaacctatttgactcggagcaggaattcaaaagagaaacgaggttcacgtcaaaatgtccaccgaaagaaatcattcgcaagattgaggaagctgcaaaacctctaggatttggtgtccagaagaaaaactacaagttgaggctagagaaagtaaaagcagggaggaagggaaacctgaatgttgctacggaggttgcgccctcccttcatatggtacaagtccggaaagcaaaaggcgacactctggagttccaaaagttctacaagaacctttccaagaccttaaaggacgttgtctggaaatctgaagacctgcaaatgcgagctgcttcttagcatccactagatggcgagatgttcgtacgtgtcagattccattcccgtagcatgatgtgtcgtcagccgtttctgttcactgcactctgcatggtccggtgggcgcgtggcttggcattttcagagaccgcgttgctcgttgcagcccgggatgaaggcgatgcagtaggttttgtggatgtggtgagctctgtatatgcctattgatgagtcatgttgcaagctgtaacgacactatgatccgtgaagtgtagaagcagccaagtatgttctttctatgctgccccatttcccggcagtttccatgcattttgaagaaaaaaatagtggctaactcattgatatttgtatttggtcatcattaataaatcgcctctccatctgtgcatgacccctctatcgttgtaagatttttttacaatcctcatctttctaaggttctgtttttttaccagattatataattcagctcaaataaattaagagacaaacaaacaacatagattatcaaatgaattatataatttagatacctagattatgataatctataagcaagttattagaataatgcataagtgttcatataatttata

SEQ ID NO: 37614 - DNA, 2845 bp, Zea Mays
acataagcttttatctaggcttgcggctacttgcatcggagcaagtcagtcacatctcacagctcagtgagatccagagccaaagggcggggcgtctcccactcccaatcccaagtccagccgccgccgtctcttgctcgctccaaaagccgttttccagagatctttttcagggccagacgccagccgccgtctctcgcttgcctgcatttccgatcctgaggcagtcctcatctcattctcatccaaccgggaggttgggaacgagatcacagctacagttacctgagtagtaggatcctcctcagatcggcttcaaaaatcaaagtgggggggacaacaaggcaggggatgagtgcagctgcaaccaaggtgaagagacgtgtgggcaagtacgagctcggccgaaccataggcgaaggcacattcgccaaggtcaggttcgccaagaacaccgagaccggggagccggtggccgtcaagatcctcgacaaggagaaggtcctcaggcacaagatggccgagcagattaagagggagatttcgaccatgaagctgattaagcaccctaacgttgttcgcatatatgaggtgatgggaagtaaaacaaaggtctacattgtgctggagtatgttaccggcggcgaacttttcgacacaattgctaaccaaggtcgaatgagggaaggcgaggcgaggagttacttccaacaattaatcaacgcagttgattattgccatagcagggccagaaaatctactgcttgactcatatggaaatctgaatgtctctgactttgggctgagcgcgctgtcccagcaaatcaaggatgatggattgctgcacacaacttgtgggactccaaactatgtggcaccagaggtcctagaagatcagggctatgatggtgcaatggctgatctgtggtcatgtggagttatcctgtttgttctgctagctgggtatttaccttttgaggactctaaccttatgacgctgtataagaaaatctcaaatgcagaatacacatttccaccatggacatctttccctgccaagaggttgttgacaagaatccttgatccaaatccgatgacggtatgcaagagcacagaagctgctcgaaataaaatactacccaaaacaatgtaggaattttggaaagtctaaaagttcctactgcacttactagcacatagccagcgatagatgtatttgggggaaagattcttttaggcctcgttcgttttcagccgatcagcccattcctgttccgggtggaacgaatggacctggtttggaatttggtacaactcattgaaattgtttgtttcggcccgaattggaatcgaaactggcccagattaaaatttcccttcaccccatggcccggaacaaaaccttgtgtcgtaccctccggatcgaagcctggacacgacgcggccggagcgacggcgcggcggcggctcgacgcgaccggcgcgacggcggcttgatgcgaccggcacggcggcggcgcacagccccgacgacgaccctccccgctgccttctccctgggttgattttgcgtccatattatagctgagcaactctttcattcctagcagattcatctctccagttccaaatacagttaaatttgctgactagattggtcgaacaaagcagaagaaaattcgtgtgacttcagaataacaatccctgaaatactggaggatgagtggttcaaaaagggctacaagcgcccggagtttgacgagaaatatgacacgccattggatgatgtggatgctgtcttcaatgactcagaagagcaccacgtgacagagaagaaagaagaagaacccgtagctctcaatgcatttgaactgatttcaaggtcagcaggcctaaatcttgggaacctatttgactcggagcaggaattcaaaagagaaacgaggttcacgtcaaaatgtccaccgaaagaaatcattcgcaagattgaggaagctgcaaaacctctaggatttggtgtccagaagaaaaactacaagttgaggctagagaaagtaaaagcagggaggaagggaaacctgaatgttgctacggagatactacaggttgcgccctcccttcatatggtacaagtccggaaagcaaaaggcgacactctggagttccaaaagttctacaagaacctttccaagaccttaaaggacgttgtctggaaatctgaagacctgcaaatgcgagctgcttcttagcatccactagatggcgagatgttcgtacgtgtcagattccattcccgtagcatgatgtgtcgtcagccgtttctgttcactgcactctgcatggtccggtgggcgcgtggcttggcattttcagagaccgcgttgctcgttgcagcccgggatgaaggcgatgcagtaggttttgtggatgtggtgagctctgtatatgcctattgatgagtcatgttgcaagctgtaacgacactatgatccgtgaagtgtagaagcagccaagtatgttctttctatgctgccccatttcccggcagtttccatgcattttgaagaaaaaaatagtggctaactcattgatatttgtatttggtcatcattaataaatcgcctctccatctgtgcatgacccctctatcgttgtaagatttttttacaatcctcatctttctaaggttctgtttttttaccagattatataattcagctcaaataaattaagagacaaacaaacaacatagattatcaaatgaattatataatttagatacctagattatgataatctataagcaagttattagaataatgcataagtgttcatataatttata

SEQ ID NO: 37615 - DNA, 2409 bp, Zea Mays
caaaatactgcgtgctctcttcttctggttctcctcatcacattcaccgtcgtcgtcatcacataagcttttatctaggcttgcggctacttgcatcggagcaagtcagtcacatctcacagctcagtgagatccagagccaaagggcggggcgtctcccactcccaatcccaagtccagccgccgccgtctcttgctcgctccaaaagccgttttccagagatctttttcagggccagacgccagccgccgtctctcgcttgcctgcatttccgatcctgaggcagtcctcatctcattctcatccaaccgggaggttgggaacgagatcacagctacagttacctatgtggtataacgatctctgtaaaaccattcccgcacgtgacactgaaagcgaaaccacttggctgcgtgtaggagtagtaggatcctcctcagatcggcttcaaaaatcaaagtgggggggacaacaaggcaggggatgagtgcagctgcaaccaaggtgaagagacgtgtgggcaagtacgagctcggccgaaccataggcgaaggcacattcgccaaggtcaggttcgccaagaacaccgagaccggggagccggtggccgtcaagatcctcgacaaggagaaggtcctcaggcacaagatggccgagcagattaagagggagatttcgaccatgaagctgattaagcaccctaacgttgttcgcatatatgaggtgatgggaagtaaaacaaaggtctacattgtgctggagtatgttaccggcggcgaacttttcgacacaattgctaaccaaggtcgaatgagggaaggcgaggcgaggagttacttccaacaattaatcaacgcagttgattattgccatagcaggggtgtgtaccaccgggatttaaaaccagaaaatctactgcttgactcatatggaaatctgaatgtctctgactttgggctgagcgcgctgtcccagcaaatcaaggatgatggattgctgcacacaacttgtgggactccaaactatgtggcaccagaggtcctagaagatcagggctatgatggtgcaatggctgatctgtggtcatgtggagttatcctgtttgttctgctagctgggtatttaccttttgaggactctaaccttatgacgctgtataagaaaatctcaaatgcagaatacacatttccaccatggacatctttccctgccaagaggttgttgacaagaatccttgatccaaatccgatgacgagaataacaatccctgaaatactggaggatgagtggttcaaaaagggctacaagcgcccggagtttgacgagaaatatgacacgccattggatgatgtggatgctgtcttcaatgactcagaagagcaccacgtgacagagaagaaagaagaagaacccgtagctctcaatgcatttgaactgatttcaaggtcagcaggcctaaatcttgggaacctatttgactcggagcaggaattcaaaagagaaacgaggttcacgtcaaaatgtccaccgaaagaaatcattcgcaagattgaggaagctgcaaaacctctaggatttggtgtccagaagaaaaactacaagttgaggctagagaaagtaaaagcagggaggaagggaaacctgaatgttgctacggagatactacaggttgcgccctcccttcatatggtacaagtccggaaagcaaaaggcgacactctggagttccaaaagttctacaagaacctttccaagaccttaaaggacgttgtctggaaatctgaagacctgcaaatgcgagctgcttcttagcatccactagatggcgagatgttcgtacgtgtcagattccattcccgtagcatgatgtgtcgtcagccgtttctgttcactgcactctgcatggtccggtgggcgcgtggcttggcattttcagagaccgcgttgctcgttgcagcccgggatgaaggcgatgcagtaggttttgtggatgtggtgagctctgtatatgcctattgatgagtcatgttgcaagctgtaacgacactatgatccgtgaagtgtagaagcagccaagtatgttctttctatgctgccccatttcccggcagtttccatgcattttgaagaaaaaaatagtggctaactcattgatatttgtatttggtcatcattaataaatcgcctctccatctgtgcatgacccctctatcgttgtaagatttttttacaatcctcatctttctaaggttctgtttttttaccagattatataattcagctcaaataaattaagagacaaacaaacaacatagattatcaaatgaattatataatttagatacctagattatgataatctataagcaagttattagaataatgcataagtgttcatataatttata

SEQ ID NO: 37616 - DNA, 2313 bp, Zea Mays
caaaatactgcgtgctctcttcttctggttctcctcatcacattcaccgtcgtcgtcatcacataagcttttatctaggcttgcggctacttgcatcggagcaagtcagtcacatctcacagctcagtgagatccagagccaaagggcggggcgtctcccactcccaatcccaagtccagccgccgccgtctcttgctcgctccaaaagccgttttccagagatctttttcagggccagacgccagccgccgtctctcgcttgcctgcatttccgatcctgaggcagtcctcatctcattctcatccaaccgggaggttgggaacgagatcacagctacagttacctgagtagtaggatcctcctcagatcggcttcaaaaatcaaagtgggggggacaacaaggcaggggatgagtgcagctgcaaccaaggtgaagagacgtgtgggcaagtacgagctcggccgaaccataggcgaaggcacattcgccaaggtcaggttcgccaagaacaccgagaccggggagccggtggccgtcaagatcctcgacaaggagaaggtcctcaggcacaagatggccgagcagattaagagggagatttcgaccatgaagctgattaagcaccctaacgttgttcgcatatatgaggtgatgggaagtaaaacaaaggtctacattgtgctggagtatgttaccggcggcgaacttttcgacacaattgctaaccaaggtcgaatgagggaaggcgaggcgaggagttacttccaacaattaatcaacgcagttgattattgccatagcagggccagaaaatctactgcttgactcatatggaaatctgaatgtctctgactttgggctgagcgcgctgtcccagcaaatcaaggatgatggattgctgcacacaacttgtgggactccaaactatgtggcaccagaggtcctagaagatcagggctatgatggtgcaatggctgatctgtggtcatgtggagttatcctgtttgttctgctagctgggtatttaccttttgaggactctaaccttatgacgctgtataagaaaatctcaaatgcagaatacacatttccaccatggacatctttccctgccaagaggttgttgacaagaatccttgatccaaatccgatgacgagaataacaatccctgaaatactggaggatgagtggttcaaaaagggctacaagcgcccggagtttgacgagaaatatgacacgccattggatgatgtggatgctgtcttcaatgactcagaagagcaccacgtgacagagaagaaagaagaagaacccgtagctctcaatgcatttgaactgatttcaaggtcagcaggcctaaatcttgggaacctatttgactcggagcaggaattcaaaagagaaacgaggttcacgtcaaaatgtccaccgaaagaaatcattcgcaagattgaggaagctgcaaaacctctaggatttggtgtccagaagaaaaactacaagttgaggctagagaaagtaaaagcagggaggaagggaaacctgaatgttgctacggagatactacaggttgcgccctcccttcatatggtacaagtccggaaagcaaaaggcgacactctggagttccaaaagttctacaagaacctttccaagaccttaaaggacgttgtctggaaatctgaagacctgcaaatgcgagctgcttcttagcatccactagatggcgagatgttcgtacgtgtcagattccattcccgtagcatgatgtgtcgtcagccgtttctgttcactgcactctgcatggtccggtgggcgcgtggcttggcattttcagagaccgcgttgctcgttgcagcccgggatgaaggcgatgcagtaggttttgtggatgtggtgagctctgtatatgcctattgatgagtcatgttgcaagctgtaacgacactatgatccgtgaagtgtagaagcagccaagtatgttctttctatgctgccccatttcccggcagtttccatgcattttgaagaaaaaaatagtggctaactcattgatatttgtatttggtcatcattaataaatcgcctctccatctgtgcatgacccctctatcgttgtaagatttttttacaatcctcatctttctaaggttctgtttttttaccagattatataattcagctcaaataaattaagagacaaacaaacaacatagattatcaaatgaattatataatttagatacctagattatgataatctataagcaagttattagaataatgcataagtgttcatataatttata

SEQ ID NO: 37617 - DNA, 2959 bp, Zea Mays
ctgcaaaatactgcgtgctctcttcttctggttctcctcatcacattcaccgtcgtcgtcatcacataagcttttatctaggcttgcggctacttgcatcggagcaagtcagtcacatctcacagctcagtgagatccagagccaaagggcggggcgtctcccactcccaatcccaagtccagccgccgccgtctcttgctcgctccaaaagccgttttccagagatctttttcagggccagacgccagccgccgtctctcgcttgcctgcatttccgatcctgaggcagtcctcatctcattctcatccaaccgggaggttgggaacgagatcacagctacagttacctgagtagtaggatcctcctcagatcggcttcaaaaatcaaagtgggggggacaacaaggcaggggatgagtgcagctgcaaccaaggtgaagagacgtgtgggcaagtacgagctcggccgaaccataggcgaaggcacattcgccaaggtcaggttcgccaagaacaccgagaccggggagccggtggccgtcaagatcctcgacaaggagaaggtcctcaggcacaagatggccgagcaggcccaatatgggctttggcatacttgttcagagttcagtcagtagatttggtggaactagtcatttcgctgacgatgacacaaactactacatggttcgatgcagattaagagggagatttcgaccatgaagctgattaagcaccctaacgttgttcgcatatatgaggtgatgggaagtaaaacaaaggtctacattgtgctggagtatgttaccggcggcgaacttttcgacacaattgctaaccaaggtcgaatgagggaaggcgaggcgaggagttacttccaacaattaatcaacgcagttgattattgccatagcaggggtgtgtaccaccgggatttaaaaccagaaaatctactgcttgactcatatggaaatctgaatgtctctgactttgggctgagcgcgctgtcccagcaaatcaaggatgatggattgctgcacacaacttgtgggactccaaactatgtggcaccagaggtcctagaagatcagggctatgatggtgcaatggctgatctgtggtcatgtggagttatcctgtttgttctgctagctgggtatttaccttttgaggactctaaccttatgacgctgtataagaaaatctcaaatgcagaatacacatttccaccatggacatctttccctgccaagaggttgttgacaagaatccttgatccaaatccgatgacggtatgcaagagcacagaagctgctcgaaataaaatactacccaaaacaatgtaggaattttggaaagtctaaaagttcctactgcacttactagcacatagccagcgatagatgtatttgggggaaagattcttttaggcctcgttcgttttcagccgatcagcccattcctgttccgggtggaacgaatggacctggtttggaatttggtacaactcattgaaattgtttgtttcggcccgaattggaatcgaaactggcccagattaaaatttcccttcaccccatggcccggaacaaaaccttgtgtcgtaccctccggatcgaagcctggacacgacgcggccggagcgacggcgcggcggcggctcgacgcgaccggcgcgacggcggcttgatgcgaccggcacggcggcggcgcacagccccgacgacgaccctccccgctgccttctccctgggttgattttgcgtccatattatagctgagcaactctttcattcctagcagattcatctctccaagaataacaatccctgaaatactggaggatgagtggttcaaaaagggctacaagcgcccggagtttgacgagaaatatgacacgccattggatgatgtggatgctgtcttcaatgactcagaagagcaccacgtgacagagaagaaagaagaagaacccgtagctctcaatgcatttgaactgatttcaaggtcagcaggcctaaatcttgggaacctatttgactcggagcaggaattcaaaagagaaacgaggttcacgtcaaaatgtccaccgaaagaaatcattcgcaagattgaggaagctgcaaaacctctaggatttggtgtccagaagaaaaactacaagttgaggctagagaaagtaaaagcagggaggaagggaaacctgaatgttgctacggaggttgcgccctcccttcatatggtacaagtccggaaagcaaaaggcgacactctggagttccaaaagttctacaagaacctttccaagaccttaaaggacgttgtctggaaatctgaagacctgcaaatgcgagctgcttcttagcatccactagatggcgagatgttcgtacgtgtcagattccattcccgtagcatgatgtgtcgtcagccgtttctgttcactgcactctgcatggtccggtgggcgcgtggcttggcattttcagagaccgcgttgctcgttgcagcccgggatgaaggcgatgcagtaggttttgtggatgtggtgagctctgtatatgcctattgatgagtcatgttgcaagctgtaacgacactatgatccgtgaagtgtagaagcagccaagtatgttctttctatgctgccccatttcccggcagtttccatgcattttgaagaaaaaaatagtggctaactcattgatatttgtatttggtcatcattaataaatcgcctctccatctgtgcatgacccctctatcgttgtaagatttttttacaatcctcatctttctaaggttctgtttttttaccagattatataattcagctcaaataaattaagagacaaacaaacaacatagattatcaaatgaattatataatttagatacctagattatgataatctataagcaagttattagaataatgcataagtgttcatataatttata

SEQ ID NO: 37618 - DNA, 2336 bp, Zea Mays
ctgcatctgcaaaatactgcgtgctctcttcttctggttctcctcatcacattcaccgtcgtcgtcatcacataagcttttatctaggcttgcggctacttgcatcggagcaagtcagtcacatctcacagctcagtgagatccagagccaaagggcggggcgtctcccactcccaatcccaagtccagccgccgccgtctcttgctcgctccaaaagccgttttccagagatctttttcagggccagacgccagccgccgtctctcgcttgcctgcatttccgatcctgaggcagtcctcatctcattctcatccaaccgggaggttgggaacgagatcacagctacagttacctgagtagtaggatcctcctcagatcggcttcaaaaatcaaagtgggggggacaacaaggcaggggatgagtgcagctgcaaccaaggtgaagagacgtgtgggcaagtacgagctcggccgaaccataggcgaaggcacattcgccaaggtcaggttcgccaagaacaccgagaccggggagccggtggccgtcaagatcctcgacaaggagaaggtcctcaggcacaagatggccgagcagattaagagggagatttcgaccatgaagctgattaagcaccctaacgttgttcgcatatatgaggtgatgggaagtaaaacaaaggtctacattgtgctggagtatgttaccggcggcgaacttttcgacacaattgctaaccaaggtcgaatgagggaaggcgaggcgaggagttacttccaacaattaatcaacgcagttgattattgccatagcaggggtgtgtaccaccgggatttaaaaccagaaaatctactgcttgactcatatggaaatctgaatgtctctgactttgggctgagcgcgctgtcccagcaaatcaaggatgatggattgctgcacacaacttgtgggactccaaactatgtggcaccagaggtcctagaagatcagggctatgatggtgcaatggctgatctgtggtcatgtggagttatcctgtttgttctgctagctgggtatttaccttttgaggactctaaccttatgacgctgtataagaaaatctcaaatgcagaatacacatttccaccatggacatctttccctgccaagaggttgttgacaagaatccttgatccaaatccgatgacgagaataacaatccctgaaatactggaggatgagtggttcaaaaagggctacaagcgcccggagtttgacgagaaatatgacacgccattggatgatgtggatgctgtcttcaatgactcagaagagcaccacgtgacagagaagaaagaagaagaacccgtagctctcaatgcatttgaactgatttcaaggtcagcaggcctaaatcttgggaacctatttgactcggagcaggaattcaaaagagaaacgaggttcacgtcaaaatgtccaccgaaagaaatcattcgcaagattgaggaagctgcaaaacctctaggatttggtgtccagaagaaaaactacaagttgaggctagagaaagtaaaagcagggaggaagggaaacctgaatgttgctacggaggttgcgccctcccttcatatggtacaagtccggaaagcaaaaggcgacactctggagttccaaaagttctacaagaacctttccaagaccttaaaggacgttgtctggaaatctgaagacctgcaaatgcgagctgcttcttagcatccactagatggcgagatgttcgtacgtgtcagattccattcccgtagcatgatgtgtcgtcagccgtttctgttcactgcactctgcatggtccggtgggcgcgtggcttggcattttcagagaccgcgttgctcgttgcagcccgggatgaaggcgatgcagtaggttttgtggatgtggtgagctctgtatatgcctattgatgagtcatgttgcaagctgtaacgacactatgatccgtgaagtgtagaagcagccaagtatgttctttctatgctgccccatttcccggcagtttccatgcattttgaagaaaaaaatagtggctaactcattgatatttgtatttggtcatcattaataaatcgcctctccatctgtgcatgacccctctatcgttgtaagatttttttacaatcctcatctttctaaggttctgtttttttaccagattatataattcagctcaaataaattaagagacaaacaaacaacatagattatcaaatgaattatataatttagatacctagattatgataatctataagcaagttattagaataatgcataagtgttcatataatttata

SEQ ID NO: 37619 - DNA, 2581 bp, Zea Mays
catatctgcatctgcaaaatactgcgtgctctcttcttctggttctcctcatcacattcaccgtcgtcgtcatcacataagcttttatctaggcttgcggctacttgcatcggagcaagtcagtcacatctcacagctcagtgagatccagagccaaagggcggggcgtctcccactcccaatcccaagtccagccgccgccgtctcttgctcgctccaaaagccgttttccagagatctttttcagggccagacgccagccgccgtctctcgcttgcctgcatttccgatcctgaggcagtcctcatctcattctcatccaaccgggaggttgggaacgagatcacagctacagttaccttaggatcctcctcagatcggcttcaaaaatcaaagtgggggggacaacaaggcaggggatgagtgcagctgcaaccaaggtgaagagacgtgtgggcaagtacgagctcggccgaaccataggcgaaggcacattcgccaaggtcaggttcgccaagaacaccgagaccggggagccggtggccgtcaagatcctcgacaaggagaaggtcctcaggcacaagatggccgagcaggcccaatatgggctttggcatacttgttcagagttcagtcagtagatttggtggaactagtcatttcgctgacgatgacacaaactactacatggttcgatgcagattaagagggagatttcgaccatgaagctgattaagcaccctaacgttgttcgcatatatgaggtgatgggaagtaaaacaaaggtctacattgtgctggagtatgttaccggcggcgaacttttcgacacaattgctaaccaaggtcgaatgagggaaggcgaggcgaggagttacttccaacaattaatcaacgcagttgattattgccatagcaggggtgtgtaccaccgggatttaaaaccagaaaatctactgcttgactcatatggaaatctgaatgtctctgactttgggctgagcgcgctgtcccagcaaatcaaggatgatggattgctgcacacaacttgtgggactccaaactatgtggcaccagaggtcctagaagatcagggctatgatggtgcaatggctgatctgtggtcatgtggagttatcctgtttgttctgctagctgggtatttaccttttgaggactctaaccttatgacgctgtataagaaaatctcaaatgcagaatacacatttccaccatggacatctttccctgccaagaggttgttgacaagaatccttgatccaaatccgatgacgggttgattttgcgtccatattatagctgagcaactctttcattcctagcagattcatctctccagttccaaatacagttaaatttgctgactagattggtcgaacaaagcagaagaaaattcgtgtgacttcagaataacaatccctgaaatactggaggatgagtggttcaaaaagggctacaagcgcccggagtttgacgagaaatatgacacgccattggatgatgtggatgctgtcttcaatgactcagaagagcaccacgtgacagagaagaaagaagaagaacccgtagctctcaatgcatttgaactgatttcaaggtcagcaggcctaaatcttgggaacctatttgactcggagcaggaattcaaaagagaaacgaggttcacgtcaaaatgtccaccgaaagaaatcattcgcaagattgaggaagctgcaaaacctctaggatttggtgtccagaagaaaaactacaagttgaggctagagaaagtaaaagcagggaggaagggaaacctgaatgttgctacggagatactacaggttgcgccctcccttcatatggtacaagtccggaaagcaaaaggcgacactctggagttccaaaagttctacaagaacctttccaagaccttaaaggacgttgtctggaaatctgaagacctgcaaatgcgagctgcttcttagcatccactagatggcgagatgttcgtacgtgtcagattccattcccgtagcatgatgtgtcgtcagccgtttctgttcactgcactctgcatggtccggtgggcgcgtggcttggcattttcagagaccgcgttgctcgttgcagcccgggatgaaggcgatgcagtaggttttgtggatgtggtgagctctgtatatgcctattgatgagtcatgttgcaagctgtaacgacactatgatccgtgaagtgtagaagcagccaagtatgttctttctatgctgccccatttcccggcagtttccatgcattttgaagaaaaaaatagtggctaactcattgatatttgtatttggtcatcattaataaatcgcctctccatctgtgcatgacccctctatcgttgtaagatttttttacaatcctcatctttctaaggttctgtttttttaccagattatataattcagctcaaataaattaagagacaaacaaacaacatagattatcaaatgaattatataatttagatacctagattatgataatctataagcaagttattagaataatgcataagtgttcatataatttata

SEQ ID NO: 37620 - DNA, 3063 bp, Zea Mays
agacgctccaccgccacatatctgcatctgcaaaatactgcgtgctctcttcttctggttctcctcatcacattcaccgtcgtcgtcatcacataagcttttatctaggcttgcggctacttgcatcggagcaagtcagtcacatctcacagctcagtgagatccagagccaaagggcggggcgtctcccactcccaatcccaagtccagccgccgccgtctcttgctcgctccaaaagccgttttccagagatctttttcagggccagacgccagccgccgtctctcgcttgcctgcatttccgatcctgaggcagtcctcatctcattctcatccaaccgggaggttgggaacgagatcacagctacagttacctgagtagtaggatcctcctcagatcggcttcaaaaatcaaagtgggggggacaacaaggcaggggatgagtgcagctgcaaccaaggtgaagagacgtgtgggcaagtacgagctcggccgaaccataggcgaaggcacattcgccaaggtcaggttcgccaagaacaccgagaccggggagccggtggccgtcaagatcctcgacaaggagaaggtcctcaggcacaagatggccgagcaggcccaatatgggctttggcatacttgttcagagttcagtcagtagatttggtggaactagtcatttcgctgacgatgacacaaactactacatggttcgatgcagattaagagggagatttcgaccatgaagctgattaagcaccctaacgttgttcgcatatatgaggtgatgggaagtaaaacaaaggtctacattgtgctggagtatgttaccggcggcgaacttttcgacacaattgctaaccaaggtcgaatgagggaaggcgaggcgaggagttacttccaacaattaatcaacgcagttgattattgccatagcaggggtgtgtaccaccgggatttaaaaccagaaaatctactgcttgactcatatggaaatctgaatgtctctgactttgggctgagcgcgctgtcccagcaaatcaaggatgatggattgctgcacacaacttgtgggactccaaactatgtggcaccagaggtcctagaagatcagggctatgatggtgcaatggctgatctgtggtcatgtggagttatcctgtttgttctgctagctgggtatttaccttttgaggactctaaccttatgacgctgtataagaaaatctcaaatgcagaatacacatttccaccatggacatctttccctgccaagaggttgttgacaagaatccttgatccaaatccgatgacggtatgcaagagcacagaagctgctcgaaataaaatactacccaaaacaatgtaggaattttggaaagtctaaaagttcctactgcacttactagcacatagccagcgatagatgtatttgggggaaagattcttttaggcctcgttcgttttcagccgatcagcccattcctgttccgggtggaacgaatggacctggtttggaatttggtacaactcattgaaattgtttgtttcggcccgaattggaatcgaaactggcccagattaaaatttcccttcaccccatggcccggaacaaaaccttgtgtcgtaccctccggatcgaagcctggacacgacgcggccggagcgacggcgcggcggcggctcgacgcgaccggcgcgacggcggcttgatgcgaccggcacggcggcggcgcacagccccgacgacgaccctccccgctgccttctccctgggttgattttgcgtccatattatagctgagcaactctttcattcctagcagattcatctctccagttccaaatacagttaaatttgctgactagattggtcgaacaaagcagaagaaaattcgtgtgacttcagaataacaatccctgaaatactggaggatgagtggttcaaaaagggctacaagcgcccggagtttgacgagaaatatgacacgccattggatgatgtggatgctgtcttcaatgactcagaagagcaccacgtgacagagaagaaagaagaagaacccgtagctctcaatgcatttgaactgatttcaaggtcagcaggcctaaatcttgggaacctatttgactcggagcaggaattcaaaagagaaacgaggttcacgtcaaaatgtccaccgaaagaaatcattcgcaagattgaggaagctgcaaaacctctaggatttggtgtccagaagaaaaactacaagttgaggctagagaaagtaaaagcagggaggaagggaaacctgaatgttgctacggagatactacaggttgcgccctcccttcatatggtacaagtccggaaagcaaaaggcgacactctggagttccaaaagttctacaagaacctttccaagaccttaaaggacgttgtctggaaatctgaagacctgcaaatgcgagctgcttcttagcatccactagatggcgagatgttcgtacgtgtcagattccattcccgtagcatgatgtgtcgtcagccgtttctgttcactgcactctgcatggtccggtgggcgcgtggcttggcattttcagagaccgcgttgctcgttgcagcccgggatgaaggcgatgcagtaggttttgtggatgtggtgagctctgtatatgcctattgatgagtcatgttgcaagctgtaacgacactatgatccgtgaagtgtagaagcagccaagtatgttctttctatgctgccccatttcccggcagtttccatgcattttgaagaaaaaaatagtggctaactcattgatatttgtatttggtcatcattaataaatcgcctctccatctgtgcatgacccctctatcgttgtaagatttttttacaatcctcatctttctaaggttctgtttttttaccagattatataattcagctcaaataaattaagagacaaacaaacaacatagattatcaaatgaattatataatttagatacctagattatgataatctataagcaagttattagaataatgcataagtgttcatataatttata

SEQ ID NO: 37621 - DNA, 2750 bp, Zea Mays
agacgctccaccgccacatatctgcatctgcaaaatactgcgtgctctcttcttctggttctcctcatcacattcaccgtcgtcgtcatcacataagcttttatctaggcttgcggctacttgcatcggagcaagtcagtcacatctcacagctcagtgagatccagagccaaagggcggggcgtctcccactcccaatcccaagtccagccgccgccgtctcttgctcgctccaaaagccgttttccagagatctttttcagggccagacgccagccgccgtctctcgcttgcctgcatttccgatcctgaggcagtcctcatctcattctcatccaaccgggaggttgggaacgagatcacagctacagttacctgagtagtaggatcctcctcagatcggcttcaaaaatcaaagtgggggggacaacaaggcaggggatgagtgcagctgcaaccaaggtgaagagacgtgtgggcaagtacgagctcggccgaaccataggcgaaggcacattcgccaaggtcaggttcgccaagaacaccgagaccggggagccggtggccgtcaagatcctcgacaaggagaaggtcctcaggcacaagatggccgagcagattaagagggagatttcgaccatgaagctgattaagcaccctaacgttgttcgcatatatgaggtgatgggaagtaaaacaaaggtctacattgtgctggagtatgttaccggcggcgaacttttcgacacaattgctaaccaaggtcgaatgagggaaggcgaggcgaggagttacttccaacaattaatcaacgcagttgattattgccatagcagggccagaaaatctactgcttgactcatatggaaatctgaatgtctctgactttgggctgagcgcgctgtcccagcaaatcaaggtgatggcctcttgcccatattatgccacttaagttaattaccaacgagtactgagtaccaacaggccatacacctttgtatgaacagacaattagttatagcattttatgtttgaaagtttttagaccccactacatacttttaagcatgctcctttatcttgtttaggatgatggattgctgcacacaacttgtgggactccaaactatgtggcaccagaggtcctagaagatcagggctatgatggtgcaatggctgatctgtggtcatgtggagttatcctgtttgttctgctagctgggtatttaccttttgaggactctaaccttatgacgctgtataagaaaatctcaaatgcagaatacacatttccaccatggacatctttccctgccaagaggttgttgacaagaatccttgatccaaatccgatgacgggttgattttgcgtccatattatagctgagcaactctttcattcctagcagattcatctctccaaactggcactaatttaacattaggatcagatactaatttaaacggtccaaccaatagatctatatgcttttttaaacggcgctggaatgcataactctaatcttaggttccaaatacagttaaatttgctgactagattggtcgaacaaagcagaagaaaattcgtgtgacttcagaataacaatccctgaaatactggaggatgagtggttcaaaaagggctacaagcgcccggagtttgacgagaaatatgacacgccattggatgatgtggatgctgtcttcaatgactcagaagagcaccacgtgacagagaagaaagaagaagaacccgtagctctcaatgcatttgaactgatttcaaggtcagcaggcctaaatcttgggaacctatttgactcggagcaggaattcaaaagagaaacgaggttcacgtcaaaatgtccaccgaaagaaatcattcgcaagattgaggaagctgcaaaacctctaggatttggtgtccagaagaaaaactacaagttgaggctagagaaagtaaaagcagggaggaagggaaacctgaatgttgctacggagatactacaggttgcgccctcccttcatatggtacaagtccggaaagcaaaaggcgacactctggagttccaaaagttctacaagaacctttccaagaccttaaaggacgttgtctggaaatctgaagacctgcaaatgcgagctgcttcttagcatccactagatggcgagatgttcgtacgtgtcagattccattcccgtagcatgatgtgtcgtcagccgtttctgttcactgcactctgcatggtccggtgggcgcgtggcttggcattttcagagaccgcgttgctcgttgcagcccgggatgaaggcgatgcagtaggttttgtggatgtggtgagctctgtatatgcctattgatgagtcatgttgcaagctgtaacgacactatgatccgtgaagtgtagaagcagccaagtatgttctttctatgctgccccatttcccggcagtttccatgcattttgaagaaaaaaatagtggctaactcattgatatttgtatttggtcatcattaataaatcgcctctccatctgtgcatgacccctctatcgttgtaagatttttttacaatcctcatctttctaaggttctgtttttttaccagattatataattcagctcaaataaattaagagacaaacaaacaacatagattatcaaatgaattatataatttagatacctagattatgataatctataagcaagttattagaataatgcataagtgttcatataatttata

SEQ ID NO: 37622 - DNA, 2544 bp, Zea Mays
gaaaaaaaaagctcaaacagacatgtcttatagtctgttctccgcgagacgctccaccgccacatatctgcatctgcaaaatactgcgtgctctcttcttctggttctcctcatcacattcaccgtcgtcgtcatcacataagcttttatctaggcttgcggctacttgcatcggagcaagtcagtcacatctcacagctcagtgagatccagagccaaagggcggggcgtctcccactcccaatcccaagtccagccgccgccgtctcttgctcgctccaaaagccgttttccagagatctttttcagggccagacgccagccgccgtctctcgcttgcctgcatttccgatcctgaggcagtcctcatctcattctcatccaaccgggaggttgggaacgagatcacagctacagttacctgagtagtaggatcctcctcagatcggcttcaaaaatcaaagtgggggggacaacaaggcaggggatgagtgcagctgcaaccaaggtgaagagacgtgtgggcaagtacgagctcggccgaaccataggcgaaggcacattcgccaaggtcaggttcgccaagaacaccgagaccggggagccggtggccgtcaagatcctcgacaaggagaaggtcctcaggcacaagatggccgagcagattaagagggagatttcgaccatgaagctgattaagcaccctaacgttgttcgcatatatgaggtgatgggaagtaaaacaaaggtctacattgtgctggagtatgttaccggcggcgaacttttcgacacaattgctaaccaaggtcgaatgagggaaggcgaggcgaggagttacttccaacaattaatcaacgcagttgattattgccatagcaggggtgtgtaccaccgggatttaaaaccagaaaatctactgcttgactcatatggaaatctgaatgtctctgactttgggctgagcgcgctgtcccagcaaatcaaggatgatggattgctgcacacaacttgtgggactccaaactatgtggcaccagaggtcctagaagatcagggctatgatggtgcaatggctgatctgtggtcatgtggagttatcctgtttgttctgctagctgggtatttaccttttgaggactctaaccttatgacgctgtataagaaaatctcaaatgcagaatacacatttccaccatggacatctttccctgccaagaggttgttgacaagaatccttgatccaaatccgatgacgggttgattttgcgtccatattatagctgagcaactctttcattcctagcagattcatctctccagttccaaatacagttaaatttgctgactagattggtcgaacaaagcagaagaaaattcgtgtgacttcagaataacaatccctgaaatactggaggatgagtggttcaaaaagggctacaagcgcccggagtttgacgagaaatatgacacgccattggatgatgtggatgctgtcttcaatgactcagaagagcaccacgtgacagagaagaaagaagaagaacccgtagctctcaatgcatttgaactgatttcaaggtcagcaggcctaaatcttgggaacctatttgactcggagcaggaattcaaaagagaaacgaggttcacgtcaaaatgtccaccgaaagaaatcattcgcaagattgaggaagctgcaaaacctctaggatttggtgtccagaagaaaaactacaagttgaggctagagaaagtaaaagcagggaggaagggaaacctgaatgttgctacggagatactacaggttgcgccctcccttcatatggtacaagtccggaaagcaaaaggcgacactctggagttccaaaagttctacaagaacctttccaagaccttaaaggacgttgtctggaaatctgaagacctgcaaatgcgagctgcttcttagcatccactagatggcgagatgttcgtacgtgtcagattccattcccgtagcatgatgtgtcgtcagccgtttctgttcactgcactctgcatggtccggtgggcgcgtggcttggcattttcagagaccgcgttgctcgttgcagcccgggatgaaggcgatgcagtaggttttgtggatgtggtgagctctgtatatgcctattgatgagtcatgttgcaagctgtaacgacactatgatccgtgaagtgtagaagcagccaagtatgttctttctatgctgccccatttcccggcagtttccatgcattttgaagaaaaaaatagtggctaactcattgatatttgtatttggtcatcattaataaatcgcctctccatctgtgcatgacccctctatcgttgtaagatttttttacaatcctcatctttctaaggttctgtttttttaccagattatataattcagctcaaataaattaagagacaaacaaacaacatagattatcaaatgaattatataatttagatacctagattatgataatctataagcaagttattagaataatgcataagtgttcatataatttata

SEQ ID NO: 37623 - DNA, 1321 bp, Zea Mays
ttgttagacagattgatcctccgggtggtggatgcgatgccgaggttgttgacaagaatccttgatccaaatccgatgacgagaataacaatccctgaaatactggaggatgagtggttcaaaaagggctacaagcgcccggagtttgacgagaaatatgacacgccattggatgatgtggatgctgtcttcaatgactcagaagagcaccacgtgacagagaagaaagaagaagaacccgtagctctcaatgcatttgaactgatttcaaggtcagcaggcctaaatcttgggaacctatttgactcggagcaggaattcaaaagagaaacgaggttcacgtcaaaatgtccaccgaaagaaatcattcgcaagattgaggaagctgcaaaacctctaggatttggtgtccagaagaaaaactacaagttgaggctagagaaagtaaaagcagggaggaagggaaacctgaatgttgctacggaggtagtaaaaaacaactcatcaactgtaaacaataatccaagcaaactttcttgtgcctagcatttactaatgtgtttttcatccagatactacaggttgcgccctcccttcatatggtacaagtccggaaagcaaaaggcgacactctggagttccaaaagttctacaagaacctttccaagaccttaaaggacgttgtctggaaatctgaagacctgcaaatgcgagctgcttcttagcatccactagatggcgagatgttcgtacgtgtcagattccattcccgtagcatgatgtgtcgtcagccgtttctgttcactgcactctgcatggtccggtgggcgcgtggcttggcattttcagagaccgcgttgctcgttgcagcccgggatgaaggcgatgcagtaggttttgtggatgtggtgagctctgtatatgcctattgatgagtcatgttgcaagctgtaacgacactatgatccgtgaagtgtagaagcagccaagtatgttctttctatgctgccccatttcccggcagtttccatgcattttgaagaaaaaaatagtggctaactcattgatatttgtatttggtcatcattaataaatcgcctctccatctgtgcatgacccctctatcgttgtaagatttttttacaatcctcatctttctaaggttctgtttttttaccagattatataattcagctcaaataaattaagagacaaacaaacaacatagattatcaaatgaattatataatttagatacctagattatgataatctataagcaagttattagaataatgcataagtgttcatataatttata

SEQ ID NO: 37624 - DNA, 1745 bp, Zea Mays
caaaatactgcgtgctctcttcttctggttctcctcatcacattcaccgtcgtcgtcatcacataagcttttatctaggcttgcggctacttgcatcggagcaagtcagtcacatctcacagctcagtgagatccagagccaaagggcggggcgtctcccactcccaatcccaagtccagccgccgccgtctcttgctcgctccaaaagccgttttccagagatctttttcagggccagacgccagccgccgtctctcgcttgcctgcatttccgatcctgaggcagtcctcatctcattctcatccaaccgggaggttgggaacgagatcacagctacagttacctatgtggtataacgatctctgtaaaaccattcccgcacgtgacactgaaagcgaaaccacttggctgcgtgtaggagtagtaggatcctcctcagatcggcttcaaaaatcaaagtgggggggacaacaaggcaggggatgagtgcagctgcaaccaaggtgaagagacgtgtgggcaagtacgagctcggccgaaccataggcgaaggcacattcgccaaggtcaggttcgccaagaacaccgagaccggggagccggtggccgtcaagatcctcgacaaggagaaggtcctcaggcacaagatggccgagcagattaagagggagatttcgaccatgaagctgattaagcaccctaacgttgttcgcatatatgaggtgatgggaagtaaaacaaaggtctacattgtgctggagtatgttaccggcggcgaacttttcgacacaattgctaaccaaggtcgaatgagggaaggcgaggcgaggagttacttccaacaattaatcaacgcagttgattattgccatagcaggggtgtgtaccaccgggatttaaaaccagaaaatctactgcttgactcatatggaaatctgaatgtctctgactttgggctgagcgcgctgtcccagcaaatcaaggatgatggattgctgcacacaacttgtgggactccaaactatgtggcaccagaggtcctagaagatcagggctatgatggtgcaatggctgatctgtggtcatgtggagttatcctgtttgttctgctagctgggtatttaccttttgaggactctaaccttatgacgctgtataagaaaatctcaaatgcagaatacacatttccaccatggacatctttccctgccaagaggttgttgacaagaatccttgatccaaatccgatgacgggttgattttgcgtccatattatagctgagcaactctttcattcctagcagattcatctctccatcacaagaattttcttctgctttgttcgaccaatccagtaagcaaattcaactgtatttggaacctgcgaagaaacaattagggttagacacttcaactgcctagtaaatttgaacaagagaaataacagagttctcaaactttagttatggcaataaaaataaatttcaattattgcaatgcattcaaatagtaatttttgtactaaattattatattaaacctacctcatatatagagggtcaattttcagttatactgttttcatgcagtattcaattttcaattgaatacaagcatctgaattttgaatgaataacatcagcgaacatatcattttattgcatgatgatcagttaaaataatttcaacagctacaaatgcacttcctagcaaaatttacctaagattagagttatgcatccc

SEQ ID NO: 37625 - DNA, 1007 bp, Zea Mays
ctgcaaaatactgcgtgctctcttcttctggttctcctcatcacattcaccgtcgtcgtcatcacataagcttttatctaggcttgcggctacttgcatcggagcaagtcagtcacatctcacagctcagtgagatccagagccaaagggcggggcgtctcccactcccaatcccaagtccagccgccgccgtctcttgctcgctccaaaagccgttttccagagatctttttcagggccagacgccagccgccgtctctcgcttgcctgcatttccgatcctgaggcagtcctcatctcattctcatccaaccgggaggttgggaacgagatcacagctacagttacctattaagagggagatttcgaccatgaagctgattaagcaccctaacgttgttcgcatatatgaggtgatgggaagtaaaacaaaggtctacattgtgctggagtatgttaccggcggcgaacttttcgacacaattgctaaccaaggtcgaatgagggaaggcgaggcgaggagttacttccaacaattaatcaacgcagttgattattgccatagcaggggtgtgtaccaccgggatttaaaaccagaaaatctactgcttgactcatatggaaatctgaatgtctctgactttgggctgagcgcgctgtcccagcaaatcaaggatgatggattgctgcacacaacttgtgggactccaaactatgtggcaccagaggtcctagaagatcagggctatgatggtgcaatggctgatctgtggtcatgtggagttatcctgtttgttctgctagctgggtatttaccttttgaggactctaaccttatgacgctgtataagaaaatctcaaatgcagaatacacatttccaccatggacatctttccctgccaagaggttgttgacaagaatccttgatccaaatccgatgacgggttgattttgcgtccatattatagctgagcaactctttcattcctagcagattcatctctcc

SEQ ID NO: 37626 - DNA, 2197 bp, Zea Mays
ctttcgtccagaatctggcatagatttatcattcattgcatcatcaatcgtgacatcctcgttgatgtttataacatccctttgagatccctggccagtatttctttcataagcaataatctcttcatatgccttctgtaagatatcttttgctgccttatatactgcctccgatccagctcctttctcagcacatctgatggcatcagcacatagggtattgtagcggcttgtggtggactgagaagcatcctcatcatgagtattgttgttattatcttctaacaaagcatcatcatctcttgccttccttgtccaacgtttcataaaatattcagttggaagtgttcgtggatcaactattatgtatactccaagaatatggcggcacagaataccggagaattcaaagtacttgcaactacagtttgccatcttattggaagcattataagtcacgcagaatgtgtctgatggatcttcatattttgtgatgctgtatttacttatgcagccgtcttcggttttctgaatgataaaccctagagactctgtaaattcctcctgaaacctactgaagactgctttggtataggtccctgctgcctgtttttctattagcgatgcagtttttgtagttgccttatttaagtaggcatccatatctgcttttgcctcatcctcatatcggcctgccaagctcaaatcgaactgattaagaaaaacttcaagcgttgtttttgtattgaaatatttcttatagaaatcattcatggtttccaatttccatgtggggaacgtttctgcaaagaatgtatccatcaggtacaaaggaacccatttttggcggatattgtatattgcttgaagccatgaattctttctcaagtcatatctatcaatgattgacatccaagtggtttcgaatgtcgagatggtttcagtctcaagcacacagctctcaagctcatctcttagggttggatgctctgagtatgtatgggtcagcttttgcttggttctactcagaatactccacttacagaaacggtgacaggaattcggaaaaaccttcccaattgcagccttcatggccctgttttggtcagtgaccaatgagcatggtgccttacctcccattgccgctaaccatgtttcaaatagccatataaacgagaactcagtctcttccataagcaatgcacatccaaaaataacagtctgcagatgatggttgactcccgagaaagtaacaaagggcatcatatgcttgttcttcttgtacgtcgtgtcgaacgttatagcatccccgaaatgccgataagctgctttggccctagcatcagcccagaaaacatcctctcacgcttccttgccgcctcatccggcgaggtctgtttcttcttgtacaccccttccctggagcaaacgaacctcttcatgacgacaacctcctctgtgcccttcgaccgccgagacctgccgacgcggaaggggaagccaagccgcctggcatagtcgttgtagaatgccttggcggcctcatcggactcaaacgtcatgccgagcacgggctcattggggtcctcggatgaggggatatctctcatggcatctggctcagttccggcatcgaccgtccctcctcccccgcctggagcaccgaggatgagaccatcgctgtggacaggccgggtgttggtgtccagagacataaggcaatccacataatcagcaatcagctcgtcgccttccgtccttcctccctccatcaccattaccatcggtgtgtgtgtgtgtcaagaattcaagatcccgtaggagcaaccatcgccacaattacggagctgctgaaactagtagcgggataagtgtagatatggctgtagttgttttttctttttctttttctttttttttgcaaaaaaaaaaacgaatttagtaggcacaatacatgtagtatacagttgtggttaaatcagatccgaatacaaatagcttgagctagggttcgggtgctgaacttcgcacagcaggaagggaagagaagggacgggcatacctggcgtggcgggttctcgttgccggcaaagggttcgacgaagacctgggcggcggcgggctccctagttgtcacgcgcgcgaggtgaactggagaagaaaaacagcaggtgtgattgtgaacgcatgagtgagg

SEQ ID NO: 37627 - DNA, 3003 bp, Zea Mays
aaaaaaaccaatgatagatgcggataaggcgacagcacagctgacagggccccacgcgtcggcgggcgcgcgccgccgaacgaaaccatcccggcaaggcaagcaagcaaccgtggccacgccgcggcgcgaccctgacgcccgccgtctccggcacccgataggcctcctccccacacccctcgcgtggcttccgtggcccgtagcccggcgcgcttcccttcaaagccactgcttcgcctcctccttctacttaagcgcagccggccccggccggcattcgcatccggtagctcgatcacttcttcctctggattttgggaaggaggcatcggacgtcggatgcatgacacactcattgcattagcgcctacgcctaccgcaagtggaagcctatggatctcaagcaagccttctctggtacaatcttctgccttctgcttctattctgcgtgggctgcagatgtcggactttggaaatagaggccacccagacagcagccctcaaggttgatgcctcgccacagcttgcccggaagatccctgaaacactgtttgggatattttttgaggagatcaaccatgcaggagctggtggcatatgggcagagcttgtcagtaacagaggtttcgaagctggaggctctcatactccatcaaacatcgacccgtggtccatcattggagatgactcctccgtgttcgtggcgactgatcgtacatcatgtttcagtcgaaacattgttgctctgaggatggaggtcctctgtgatgactgtccagctggtggtgttggtgtttataacccaggtttttggggcatgaacatagaagatgggaaggcctacaatctcgttatgtatgttcagtccccagaaacaaaggatctaacagtttcattaacaagctctgatgggttgcaaaacttggcttcagctacaataacagtttctggcacatcaaattggacaaaagtggagcagaagctggttgctaaaggaaccaatagaacatcaaggcttcaaataacaacgaacaaaaaaggagttgtttggcttgatcaagtatcactcatgcctgaagacacatacaagggacatggtttccgcacagaacttatatccatgcttttggatttgaaaccacgattcttgagatttcctggaggttgttttgtagaaggtgactggctaagaaatgcattcagatggagagagtcaattggtccatgggaagagaggcctggacacttcggggatgtttggcattactggactgatgatgggcttggatattatgagttccttcagcttgcggaggacctgggtgctgccccaatctgggtattcaacaatggaataagccacaatgatgaagttgatactgtagctattgccccttttgtaaaggatgtattggacagtctagaatttgcaagggggagtgcagattcaacatggggctctgttagggctgcaatggggcaccctgaacctttcctggtcaaacatgtcgcaattggaaatgaagattgcgggaaaaagttctaccgtggtaattacctcaaattctacaatgctataagagaggcctatccagacattcagatgatttcaaactgtgatggttcatctagaccacttgaccatcctgcggatttgtatgatttccatgtctatactgattctaagactttgtttaacatgaggagcacatttgacagaacatctcgtagtggacctaaggtaagtcttaagtctcattttcacaaggactcttatgagacagccctctttcacgaccagtcatttacatcgatcagggattcctggcattcacttgtgatgttctttgggtagtatataaaaaaatgggtcctttgatgctttgcaaaatccttaagagatggagggtacaattctccgaggtgttgtgattctgtataacgatgaggaatactcatagggagcttatgtgacgtgtggttctatttgcatgtttctctgaagaccctgaagctccagtgattttcttgcttatttatgacatcaccagtaccctgtccatacagtaaaaatgttgctgaaatgattcgaacacaggcttttgtgagcgagtacgctgtctggagaagtgacgcgggtagaggcagtcttcttgcttcgttggctgaagctgctttcctcactggtctggagaagaacagtgatatcgttcagatggcaagttacgctccactcttcgtgaacgacaatgaccaaacgtggaacccggacgctatcgtcttcaactcctggcagcactatggaactcctagctactggatgcagacgattttccgcgagtcaagcggtgccatgatccatccggttaatatcagttcccggtactcgagttcgctggccgcgtctgcgatcacgtggcaggatgcagagaatagcttcctgagagtgaaggtcgtgaacttcgggtcggacaccgttaacctcacggtctccacgagcggactcggggccagcgtcaacgcgctgggatcaaccgccaccgtcctcacgtctggcaacgtcatggacgagaactccttcagtaacccgaacaaggttgcgccggtgaaaagccagctgagcaacgccgcggagcagatgcaggtcacgctggctcctcactccttcaccgccttcgatctggcgctggctgagcccaagcttgtggcggagatatgatgtgtgtgctgttagcgatcttgatcgataaaaaggctttgtactggtgtaccatgatacaggataacgtactacgtactgttgcttcatgaaataaaaaccacatcaggtttttgcttggtgttggttggtttcctttctcctgtacgtgtttgctttgcatgttcatcaccatctactgtacgggatgatggtacattgatggtgagaacgacagcctcctgtggattaaacaaattgtcgatggatgccttcatggtaaacaactttatcatgaatc

SEQ ID NO: 37628 - DNA, 1864 bp, Zea Mays
aaaaaaaccaatgatagatgcggataaggcgacagcacagctgacagggccccacgcgtcggcgggcgcgcgccgccgaacgaaaccatcccggcaaggcaagcaagcaaccgtggccacgccgcggcgcgaccctgacgcccgccgtctccggcacccgataggcctcctccccacacccctcgcgtggcttccgtggcccgtagcccggcgcgcttcccttcaaagccactgcttcgcctcctccttctacttaagcgcagccggccccggccggcattcgcatccggtagctcgatcacttcttcctctggattttgggaaggaggcatcggacgtcggatgcatgacacactcattgcattagcgcctacgcctaccgcaagtggaagcctatggatctcaagcaagccttctctggtacaatcttctgccttctgcttctattctgcgtgggctgcagatgtcggactttggaaatagaggccacccagacagcagccctcaaggttgatgcctcgccacagcttgcccggaagatccctgaaacactgtttgggatattttttgaggagatcaaccatgcaggagctggtggcatatgggcagagcttgtcagtaacagaggtttcgaagctggaggctctcatactccatcaaacatcgacccgtggtccatcattggagatgactcctccgtgttcgtggcgactgatcgtacatcatgtttcagtcgaaacattgttgctctgaggatggaggtcctctgtgatgactgtccagctggtggtgttggtgtttataacccaggtttttggggcatgaacatagaagatgggaaggcctacaatctcgttatgtatgttcagtccccagaaacaaaggatctaacagtttcattaacaagctctgatgggttgcaaaacttggcttcagctacaataacagtttctggcacatcaaattggacaaaagtggagcagaagctggttgctaaaggaaccaatagaacatcaaggcttcaaataacaacgaacaaaaaaggagttgtttggcttgatcaagtatcactcatgcctgaagacacatacaagggacatggtttccgcacagaacttatatccatgcttttggatttgaaaccacgattcttgagatttcctggaggttgttttgtagaaggtgactggctaagaaatgcattcagatggagagagtcaattggtccatgggaagagaggcctggacacttcggggatgtttggcattactggactgatgatgggcttggatattatgagttccttcagcttgcggaggacctgggtgctgccccaatctgggtattcaacaatggaataagccacaatgatgaagttgatactgtagctattgccccttttgtaaaggatgtattggacagtctagaatttgcaagggggagtgcagattcaacatggggctctgttagggctgcaatggggcaccctgaacctttcctggtcaaacatgtcgcaattggaaatgaagattgcgggaaaaagttctaccgtggtaattacctcaaattctacaatgctataagagaggcctatccagacattcagatgatttcaaactgtgatggttcatctagaccacttgaccatcctgcggatttgtatgatttccatgtctatactgattctaagactttgtttaacatgaggagcacatttgacagaacatctcgtagtggacctaaggcttttgtgagcgagtacgctgtctggagaagtgacgcgggtagaggcagtcttcttgcttcgttggctgaagctgctttcctcactggtctggagaagaacagatgacctttttgcag

SEQ ID NO: 37629 - DNA, 1102 bp, Zea Mays
agttgtgctacatttaacatttggctccgccagtgacatttcctcgcccagaggggaagatcaagactctggtgcttcctgaggatgtgtatgtcacgaagttcaacagaatacatccagattcgctttaccatgatgcaatcaagataagtggatttgatccaccgccagctcgagtgtttgcttggcgtgtcctggagttgaaagagcaaggagtcgatgaagatgttgcgatggctgtagcagataacgagtaccggacagagaagaaggcaaagaagaaagcgtacaaggagctgaaagaaatcgcccgcagcgaagggaggaagccacctccgaatccatacccgagtgccataaaggaaatacaagcggaggaaaagaagtatgtcatggaccgtttgcataacccgaaggtaatcgagattgcgaacaagatgaaggaggagcgagacaggatgttgagggatagagcagcaggtcagcggtagtcgtagcagcaggtaatgtttggactggcccgactgggtgttgtcgtttacgacatgggccaactggcgtcataaataatggttgttggagattgatatggcaaatatgaaactcgtgtttttgttattcgtatttctgggatttagatggcctctggaatgcaatgttgattgggatgtgtttttgccagcaagctggtaaattgagacgtgttttgcttgctccagaaagttctgcttatagctgatacaaggctagaccgaatcagcagttgcattgtgatatgttagcagaacgccagttccccttctattcgccccttgcatgttaatttctgcatatccctgtgatgagcattttagtaatctgagtgagtgctcattcagttggtgctccctccgatgagaggttgaaggaaccaatacctgttgagatgtggcattctgagggatatgattgagttgttggttgctctctaacattcaaggtttttttttgttgttgtttttttacttcaagaatttcttgcgaatttttctctctctctctgtgtgtgtgtgtgtttgccttgccgtttagttttggaagatcttgtcgctgttcttaaatc

SEQ ID NO: 37630 - DNA, 1123 bp, Zea Mays
gcccttgcacttgcatttctcgatccatccgtggctccgttagggctccgccagtgacatttcctcgcccagaggggaagatcaagactctggtgcttcctgaggatgtgtatgtcacgaagttcaacagaatacatccagattcgctttaccatgatgcaatcaagataagtggatttgatccaccgccagctcgagtgtttgcttggcgtgtcctggagttgaaagagcaaggagtcgatgaagatgttgcgatggctgtagcagataacgagtaccggacagagaagaaggcaaagaagaaagcgtacaaggagctgaaagaaatcgcccgcagcgaagggaggaagccacctccgaatccatacccgagtgccataaaggaaatacaagcggaggaaaagaagtatgtcatggaccgtttgcataacccgaaggtaatcgagattgcgaacaagatgaaggaggagcgagacaggatgttgagggatagagcagcaggtcagcggtagtcgtagcagcaggtaatgtttggactggcccgactgggtgttgtcgtttacgacatgggccaactggcgtcataaataatggttgttggagattgatatggcaaatatgaaactcgtgtttttgttattcgtatttctgggatttagatggcctctggaatgcaatgttgattgggatgtgtttttgccagcaagctggtaaattgagacgtgttttgcttgctccagaaagttctgcttatagctgatacaaggctagaccgaatcagcagttgcattgtgatatgttagcagaacgccagttccccttctattcgccccttgcatgttaatttctgcatatccctgtgatgagcattttagtaatctgagtgagtgctcattcagttggtgctccctccgatgagaggttgaaggaaccaatacctgttgagatgtggcattctgagggatatgattgagttgttggttgctctctaacattcaaggtttttttttgttgttgtttttttacttcaagaatttcttgcgaatttttctctctctctctgtgtgtgtgtgtgtttgccttgccgtttagttttggaagatcttgtcgctgttcttaaatc

SEQ ID NO: 37631 - DNA, 1272 bp, Zea Mays
atttgcttcaagacatggcaagcagcagctggagtgaagaggaggaagagatccaagaggtcaatgctgaagcaaattcagagcagcagcaggatggagccgtcgagccagatgttattgtgacagctcagagtgagattgcagctgcagcagtccaaattgttggtattaatacgaagtgaataggctgatcagcctcggacaacttgaagattacaacctcaagattctcctagagaatggtttcctggagatctgggacttggggcgacgcttgctagcaaaggtaccacgtgcagcgaatcgcttgtacatactgaaccgtcacattgggagcaaagtgtgagaacggactctacatgcgtggcattgggagatgaagactggtggtgcgagtctatgttgatgatcagggataaatctttaggagggactgaactaaaccactgcatatagaagtcacttctacactatactgcatatgttggtggtggaattgagctgtgccagagcgcttacgcactcaaactgcttggaaaggcagggatggataactgcaattccagtgcgacatcaatgaaggcaagactggagctgtccaagacaagtgattcagcaccaggaacattggaagtctgcagtacctgctccacagccgacctgatattgcaatcagtgttgggtatcgtctcagcaggttcatggaggaacccaggcaggagcacatggctgcagcctgcagcgaagcgtatgcttcgctatgtcgtggggacgactgattggtgtcgtcatgctcatttgaacatttgaacagcacatgaattagggggagattgtcaggtacttcaagtgttttattgagagttgcagattttcagtcagtgttgtcgcgtttcacggtatggaaactaaataagtacagatttttttagcgcttcacggtatggaaactaaataagtacagatttttttagcgcgttaggaggttgtagttgagttctacgcgcgctcagttcgcacgagctgtggaaggcatttagtggcttcagagtctgtatgtgtttagtggcttcagtttttaataggaagagtctcggaaaagcggttgttgccacaccaaacgaatgtgtctctctgtgttccagccattcgcgtgtgctgtgtatgtgtttttcctctgttcatcttcgttcccagcgagatcgagttcttggcttcttgctgtaacatttttgggcttcctactctccttggtccacttatcagtttcag

SEQ ID NO: 37632 - DNA, 1396 bp, Zea Mays
cacggtgaatgaccttgatggtaggaccggctgctccacgcgtcatggcggaggcatgtaaggccgcgtgaaatgcgggcgtgagcccaaatgcgttcaagttttaaggaaccagattggccattggtcatttgcttcaagacatggcaagcagcagctggagtgaagaggaggaagagatccaagaggtcaatgctgaagcaaattcagagcagcagcaggatggagccgtcgagccagatgttattgtgacagctcagaattgcagctgcagcagtccaaattgttggtattaatacgaagtgaataggctgatcagcctcggacaacttgaagattacaacctcaagattctcctagagaatggtttcctggagatctgggacttggggcgacgcttgctagcaaaggtaccacgtgcagcgaatcgcttgtacatactgaaccgtcacattgggagcaaagtgtgagaacggactctacatgcgtggcattgggagatgaagactggtggtgcgagtctatgttgatgatcagggataaatctttaggagggactgaactaaaccactgcatatagaagtcacttctacactatactgcatatgttggtggtggaattgagctgtgccagagcgcttacgcactcaaactgcttggaaaggcagggatggataactgcaattccagtgcgacatcaatgaaggcaagactggagctgtccaagacaagtgattcagcaccaggaacattggaagtctgcagtacctgctccacagccgacctgatattgcaatcagtgttgggtatcgtctcagcaggttcatggaggaacccaggcaggagcacatggctgcagcctgcagcgaagcgtatgcttcgctatgtcgtggggacgactgattggtgtcgtcatgctcatttgaacatttgaacagcacatgaattagggggagattgtcaggtacttcaagtgttttattgagagttgcagattttcagtcagtgttgtcgcgtttcacggtatggaaactaaataagtacagatttttttagcgcttcacggtatggaaactaaataagtacagatttttttagcgcgttaggaggttgtagttgagttctacgcgcgctcagttcgcacgagctgtggaaggcatttagtggcttcagagtctgtatgtgtttagtggcttcagtttttaataggaagagtctcggaaaagcggttgttgccacaccaaacgaatgtgtctctctgtgttccagccattcgcgtgtgctgtgtatgtgtttttcctctgttcatcttcgttcccagcgagatcgagttcttggcttcttgctgtaacatttttgggcttcctactctccttggtccacttatcagtttcag

SEQ ID NO: 37633 - DNA, 249 bp, Zea Mays
atgacatccttctccaagctggccaccctcggtgggtacctcccgaagtctgacagcacgaacactgcgggggacaacgccgcccgggcgtgcagcaagctgttggggtggtgcgccacgatgacgtggtcggctccgccgaacctcctccattccggccgcgccgtgaggtaccccaccagcttctcctggagtgccttgtccctgccgaccttctcgggcggcaagggccgggagtggcggttgtag

SEQ ID NO: 37634 - DNA, 1161 bp, Zea Mays
agattgtacatgggattggagcaacgtgcagattcacataactgccacatcacatgctctttgatttggtaccttccggtcctccacagctactgtctgttcttcacctactctgatcggaacaaacaaagaccatagcatgcatgcgctgtagaaagcatccacctggaattaaggtattaatttatcctttgaagtgtggacagcacattgacaaaggctaaaatgtttagtatctgaaaaggattgcctcgtcagggtggtggacctggttagaagggccgtgccactcgcgctcgcgccagagaacgacccaagaaaagaggagttcgaactgctccgagagaagaaggaagcgatcgacaggctagcgcacaagcaagtccggcgcatcctgtggtccggcctagggttcttcatgtgccaggtcgggctcttcttccgcctcacgttctgggagttctcgtgggacgtgatggagccgatcgccttcttcaccaccgcgtccggcctgctcgtcggctacgcctacttcctcatcacctcgagggacccgacgtaccaggacttcatggagaggctgttcctgtcgaggcagaggaagctttgtgcggcgcacaagttcgatatggagaggttcatggagcttcagaagcactgtagatgtcccctggaaggccatggccctcgtggtccctgagcttcatgacttgtaacaccctataggttgcacgatagccactacttatttacacgacctcatcgttcgagacagcaagcaatgtgatcctgacagacatggatcatatactagttagctaccctttgcctgcttatcagaggcgaactgacctatgtgtattttgacaaattgttttgaaggacccttgcatgctgaagtatgcttgaatatattccaaattttgcaggtgacaaagaagaccgttccttctttttttttcatttgctgtgcttggttgcaggaccaaaatccaaagtatgtcagacacaactatctgaattctcattcctttgagattcggacagcaaaaataacctaatatttttttaaaaaaatggttacaagggcatacttgctgattcaggcatcatttgttgtttcatgtacatgatgtgccgccgcagtcagcattggactcc

SEQ ID NO: 37635 - DNA, 3455 bp, Zea Mays
cttaaattgtgttttagaagcattgcaaatcgtggtacaaatgaatgatctttgtgtttgtacaaatacaaatgttgaatatgtaatttttgtgattgagacacgtttctgcatttatagttaattactcataaatagttgctagtattgattgtatcgtgcaaggactatgcaaatagccacgatagttttaccaagtttattctaccattgttgtaatgtgataattgtaccaaactatgatcctattccaatctatgagtgaatctgtagataaatgtgggtgtatatggtgtaagggtttaagatttggctcatgtctttgacttggctgtcgtttttgaggatgttttggattgctgttcatatgagtgcacccaatcccatagatctgtcgaacacgtgtcacaatttgaggtaaattggctacaaggtctacagggagggataaattcagttatttaacaagccactgaagcatgttttagtgcattgcttactagatagtatttcacatgtgcatgtttagctagtattggtgcttttctgcatgcgcccgagtgagatatcgcagttttactaaggtctttccatttggatctgttccattgaaaacttatcttcctgatggagacattgacttgactacattcggccctgcaatttctgatgaaaaattagcaaatgaagtatgtgctattctaaaatcagaagagcataggaaagattctgaatttgatgtcaaagatgtccagtatatccatgctgaggtcaaactggtgaaatgtgtagtacagaacattatagtagatatctctgtgaatcagattgggggactctgtacactttgttttctggagaaggttgatgagaattttggaaagaaacacctcttcaaaagaagcgtaatgctgattaaagactggtgttactatgaaactcgcattcttggtgcacaccatggattgatatctacctacgctttggagattttagtgctatacattttccatatcttccataagtctttgaatggcccattagctgtcctctataggtttctcgattactatagtcaatttgattgggatgctaagggaatcagcttgtttggtcctgtttccttatcttcactacctgatctagttactgaccctccagttattcatgatgatggttttcttctgcgggaaaagtttctcagagaatgtgcagatgcatttagtgtcccccctagaaactctgagaaagatgcacaactattttctcggaagtttttaaatatagtagatccactgaaacaaagtaataatcttggacgcagtgtcagcagaggaaatttttaccgaatacgtagtgcatttgattttggtgctcgtaagcttgggaagattcttcaaaggcctgtctgttatactgttgatgaagtgaatcagttctttgggaacacattaaagagaaatcgtattgggttcagacaagatgttttagtgagctcatctgatgatggtacattgacttatcatgccaccaacggttccttgtctctaggcttggattgcaaaagagtcaacaactgcagtgcacctttatacagcaatccctgtggtgatttctcttatcggtttaataacatcaacatttcagattccatcaatcatgatgactcaataaaacagaaacaatgtaactctattgctggagagaaagcgataaagtctatttctgatgggttgctagatagtgaaggctcaagtcatgctagtactgatgattcagtaagtgtgaggaacagtggtgacttctatgaagctttaacaactatctcgccatctgggagacgttatgccccacatcaattttaccaattagaaaatggtaaggtggttgttagacataacacaaacatgtcacaccatgggatgccaacaaagcagttcacaagcagatcttaccactcttttgaagatgccaagtatcacaatgagttttcaggaagctttctgccacccattgagcataatgcttactcttctgctggctttgttaatgttctggccacctctaactcagcatgtacacatgaaaattcacaacttggtggagccaataataacatcttgaaagatctcactggagattttgagacatacttccataatcttcagtatgcgcaagggttccagcaagataatccagtaaacccgttttcctctggaaggcctgctccaccatccctgcaatgtcagaacacgtgcccttcaaatggtcgaggaagaaaaaatccatattcatatgctagcatgaatggtgcagtcccttgccctccttacccatctggctatcttgtgtggagtccatttattcaaccagatgatcctatggctatgaggacccgtggaacaggcacctacttttctgaccgaaaattgcgcaagaataggccacccactggacgtgtggagagaggaagaaatcagttcgcttcaaataattatcaaaggttccatcaccatgtcagaacagatatgcctgcagatatgggatctggtctggaattgaggcatgagctaccacagatacatattcctggtgcaactgatcatggaatgccatctccaatgagtataccaatgtcatcgtcatctcttaactctccaagagatcaattgaaggtaccagctcattctccatcttcccaggttcgaaggaataatttccatggcaatggtttcatgctcctgcaagacagtaagcttgagtccaggacctttaacagtaaacttgagtctgggatattggggccgttgcctttagaagttacctccaaagaccatgctagcagatcagaatccgcttccagcaatcaagtttctggacctgtgagtactgtttctgctcctcgaaacactactacgacagattccaatctaatgagggatggcgctcaatcatatcgcctcaaggacagcagagacttccccccactgtccagttgaatgttgatggcggtacactgtagtatgaactgagaggtgactgtcaacgccgcacttgatcaccaggcaaaattaccgatgaatggtctgtgctgaaccgcagcagtggcaccgagttgttgctccctgaaaccagacaacatgttgtatatcctgccattttcttcccgtactccaggcgtcagattcaccttgtccctgcgatcagccttacaccctcatttggcaaaaaagaaaaaaaaagaaagaaaacaaaagggacagcaagagaagcagaaggaataaagatgcagggttatgacatgtagatagtactgttactaggaaaaggtcccccttcagacatgttggagggctagttggttgtgttgttgttgagaatagcgtttttagtagcctttgttggcgtttatataacgagtaaggggtctggcaggatctcgcaacaaataaatt

SEQ ID NO: 37636 - DNA, 2893 bp, Zea Mays
ccaagtcaggctttcatgctgggtctttccatttggatctgttccattgaaaacttatcttcctgatggagacattgacttgactacattcggccctgcaatttctgatgaaaaattagcaaatgaagtatgtgctattctaaaatcagaagagcataggaaagattctgaatttgatgtcaaagatgtccagtatatccatgctgaggtcaaactggtgaaatgtgtagtacagaacattatagtagatatctctgtgaatcagattgggggactctgtacactttgttttctggagaaggttgatgagaattttggaaagaaacacctcttcaaaagaagcgtaatgctgattaaagactggtgttactatgaaactcgcattcttggtgcacaccatggattgatatctacctacgctttggagattttagtgctatacattttccatatcttccataagtctttgaatggcccattagctgtcctctataggtttctcgattactatagtcaatttgattgggatgctaagggaatcagcttgtttggtcctgtttccttatcttcactacctgatctagttactgaccctccagttattcatgatgatggttttcttctgcgggaaaagtttctcagagaatgtgcagatgcatttagtgtcccccctagaaactctgagaaagatgcacaactattttctcggaagtttttaaatatagtagatccactgaaacaaagtaataatcttggacgcagtgtcagcagaggaaatttttaccgaatacgtagtgcatttgattttggtgctcgtaagcttgggaagattcttcaaaggcctgtctgttatactgttgatgaagtgaatcagttctttgggaacacattaaagagaaatcgtattgggttcagacaagatgttttagtgagctcatctgatgatggtacattgacttatcatgccaccaacggttccttgtctctaggcttggattgcaaaagagtcaacaactgcagtgcacctttatacagcaatccctgtggtgatttctcttatcggtttaataacatcaacatttcagattccatcaatcatgatgactcaataaaacagaaacaatgtaactctattgctggagagaaagcgataaagtctatttctgatgggttgctagatagtgaaggctcaagtcatgctagtactgatgattcagtaagtgtgaggaacagtggtgacttctatgaagctttaacaactatctcgccatctgggagacgttatgccccacatcaattttaccaattagaaaatggtaaggtggttgttagacataacacaaacatgtcacaccatgggatgccaacaaagcagttcacaagcagatcttaccactcttttgaagatgccaagtatcacaatgagttttcaggaagctttctgccacccattgagcataatgcttactcttctgctggctttgttaatgttctggccacctctaactcagcatgtacacatgaaaattcacaacttggtggagccaataataacatcttgaaagatctcactggagattttgagacatacttccataatcttcagtatgcgcaagggttccagcaagataatccagtaaacccgttttcctctggaaggcctgctccaccatccctgcaatgtcagaacacgtgcccttcaaatggtcgaggaagaaaaaatccatattcatatgctagcatgaatggtgcagtcccttgccctccttacccatctggctatcttgtgtggagtccatttattcaaccagatgatcctatggctatgaggacccgtggaacaggcacctacttttctgaccgaaaattgcgcaagaataggccacccactggacgtgtggagagaggaagaaatcagttcgcttcaaataattatcaaaggttccatcaccatgtcagaacagatatgcctgcagatatgggatctggtctggaattgaggcatgagctaccacagatacatattcctggtgcaactgatcatggaatgccatctccaatgagtataccaatgtcatcgtcatctcttaactctccaagagatcaattgaaggtaccagctcattctccatcttcccaggttcgaaggaataatttccatggcaatggtttcatgctcctgcaagacagtaagcttgagtccaggacctttaacagtaaacttgagtctgggatattggggccgttgcctttagaagttacctccaaagaccatgctagcagatcagaatccgcttccagcaatcaagtttctggacctgtgagtactgtttctgctcctcgaaacactactacgacagattccaatctaatgagggatggcgctcaatcatatcgcctcaaggacagcagagacttccccccactgtccagttgaatgttgatggcggtacactgtagtatgaactgagaggtgactgtcaacgccgcacttgatcaccaggcaaaattaccgatgaatggtctgtgctgaaccgcagcagtggcaccgagttgttgctccctgaaaccagacaacatgttgtatatcctgccattttcttcccgtactccaggcgtcagattcaccttgtccctgcgatcagccttacaccctcatttggcaaaaaagaaaaaaaaagaaagaaaacaaaagggacagcaagagaagcagaaggaataaagatgcagggttatgacatgtagatagtactgttactaggaaaaggtcccccttcagacatgttggagggctagttggttgtgttgttgttgagaatagcgtttttagtagcctttgttggcgtttatataacgagtaaggggtctggcaggatctcgcaacaaataaatt

SEQ ID NO: 37637 - DNA, 3211 bp, Zea Mays
ccggcggcgcccagtcgcgaccgcgctctcaccgatcgcctcggtgagtgatactccgcaccgcaggccgcagcgcaagcgcctcgggccgtccgccgtcgccgcctgaagctagcgtctcctgtaagcggctggccgcttcactccgaggctctcgcacattgtttcggggctccggcgaccatggtggacatcatcgacgcgtacccggcggtgcccgagcccgcgccggcgcacccggacccctcgtcgatcccccgcgacgcctggcggcgcttcgagagcgccgcgctcggcatactctacacgatccagcccagcgccacctccgagcacctccgcgccgccatcatcgactacgtccagcgcctcttggcgtcccactccggggttcaggtctttccatttggatctgttccattgaaaacttatcttcctgatggagacattgacttgactacattcggccctgcaatttctgatgaaaaattagcaaatgaagtatgtgctattctaaaatcagaagagcataggaaagattctgaatttgatgtcaaagatgtccagtatatccatgctgaggtcaaactggtgaaatgtgtagtacagaacattatagtagatatctctgtgaatcagattgggggactctgtacactttgttttctggagaaggttgatgagaattttggaaagaaacacctcttcaaaagaagcgtaatgctgattaaagactggtgttactatgaaactcgcattcttggtgcacaccatggattgatatctacctacgctttggagattttagtgctatacattttccatatcttccataagtctttgaatggcccattagctgtcctctataggtttctcgattactatagtcaatttgattgggatgctaagggaatcagcttgtttggtcctgtttccttatcttcactacctgatctagttactgaccctccagttattcatgatgatggttttcttctgcgggaaaagtttctcagagaatgtgcagatgcatttagtgtcccccctagaaactctgagaaagatgcacaactattttctcggaagtttttaaatatagtagatccactgaaacaaagtaataatcttggacgcagtgtcagcagaggaaatttttaccgaatacgtagtgcatttgattttggtgctcgtaagcttgggaagattcttcaaaggcctgtctgttatactgttgatgaagtgaatcagttctttgggaacacattaaagagaaatcgtattgggttcagacaagatgttttagtgagctcatctgatgatggtacattgacttatcatgccaccaacggttccttgtctctaggcttggattgcaaaagagtcaacaactgcagtgcacctttatacagcaatccctgtggtgatttctcttatcggtttaataacatcaacatttcagattccatcaatcatgatgactcaataaaacagaaacaatgtaactctattgctggagagaaagcgataaagtctatttctgatgggttgctagatagtgaaggctcaagtcatgctagtactgatgattcagtaagtgtgaggaacagtggtgacttctatgaagctttaacaactatctcgccatctgggagacgttatgccccacatcaattttaccaattagaaaatggtaaggtggttgttagacataacacaaacatgtcacaccatgggatgccaacaaagcagttcacaagcagatcttaccactcttttgaagatgccaagtatcacaatgagttttcaggaagctttctgccacccattgagcataatgcttactcttctgctggctttgttaatgttctggccacctctaactcagcatgtacacatgaaaattcacaacttggtggagccaataataacatcttgaaagatctcactggagattttgagacatacttccataatcttcagtatgcgcaagggttccagcaagataatccagtaaacccgttttcctctggaaggcctgctccaccatccctgcaatgtcagaacacgtgcccttcaaatggtcgaggaagaaaaaatccatattcatatgctagcatgaatggtgcagtcccttgccctccttacccatctggctatcttgtgtggagtccatttattcaaccagatgatcctatggctatgaggacccgtggaacaggcacctacttttctgaccgaaaattgcgcaagaataggccacccactggacgtgtggagagaggaagaaatcagttcgcttcaaataattatcaaaggttccatcaccatgtcagaacagatatgcctgcagatatgggatctggtctggaattgaggcatgagctaccacagatacatattcctggtgcaactgatcatggaatgccatctccaatgagtataccaatgtcatcgtcatctcttaactctccaagagatcaattgaaggtaccagctcattctccatcttcccaggttcgaaggaataatttccatggcaatggtttcatgctcctgcaagacagtaagcttgagtccaggacctttaacagtaaacttgagtctgggatattggggccgttgcctttagaagttacctccaaagaccatgctagcagatcagaatccgcttccagcaatcaagtttctggacctggatggcgctcaatcatatcgcctcaaggacagcagagacttccccccactgtccagttgaatgttgatggcggtacactgtagtatgaactgagaggtgactgtcaacgccgcacttgatcaccaggcaaaattaccgatgaatggtctgtgctgaaccgcagcagtggcaccgagttgttgctccctgaaaccagacaacatgttgtatatcctgccattttcttcccgtactccaggcgtcagattcaccttgtccctgcgatcagccttacaccctcatttggcaaaaaagaaaaaaaaagaaagaaaacaaaagggacagcaagagaagcagaaggaataaagatgcagggttatgacatgtagatagtactgttactaggaaaaggtcccccttcagacatgttggagggctagttggttgtgttgttgttgagaatagcgtttttagtagcctttgttggcgtttatataacgagtaaggggtctggcaggatctcgcaacaaataaatt

SEQ ID NO: 37638 - DNA, 585 bp, Zea Mays
acagagacagaagctaaaagggaggaactggtgctggatggagctcaggaaggcggcggcgggcatgttctgtcgccgtccggtgcacatgttggcttgttttctccaacaagtcctgatgtgcagccactgtggccattcagtgaaaaaagagagcatagaacgaacagacttttgtaatagaaggaagggaaaatgtggagccaaggcttccttgcctcctctcatgtagggtttacggtcggatataagctggactgtgttcctcttttttgcactgcattgggccttgtttcacctgatgatgttttatgcctgtatgtatgctattgtttctgtgatgtcgcaagtggtgggtagtggaggcaggcgagagaggcggatatggtgtaggagtagaagagaagggtctatcatgtcttgttgttttgttgccattgccattggttgatgcatgcagagaaagaaatgcctgtccatcaatgtcgtgcttgtgcttggtggcccgcacgcatcagattcgctgactgcacctgcgacggagctcgagacgaaaacccctggagagcatagagacctgctggg

SEQ ID NO: 37639 - DNA, 2906 bp, Zea Mays
caaaaagaagggagaggaagagggagggattgaaaagctagggttttcgccatggccattgcccacctcgagctcccctctctcgaatccacccttcccaagctctcctagctcccgcatctcgtatcttcacaaaaagcagacgcctttgattccccttcccgctgcgtcgcccccattcgagggttttccctccttccccaaatcgaatcgcagcattaccgaccgagcaagcaacccaccaacccacccgctttaagggtccgagccgagcgacggcgctggcgatccagctgggcgtgagggcggcggaggcggccggataatcaatgtgtacgctgtgcgccgtgcagcggtggtcgcggcgcgtcgccaccatgctcccgtggctcgtcgtcccgctcatcgtcatctgggccgccactcagctgctcctcccggccgcctaccgcttcgaggtcacctccccacgcctcgcctgcgtctccgtcctcctcctcaccctcttctggtacgagatcctcctcccgcgcctctccctctggcgctcccgccgctccgcgcgcctccgcgaggagcgccgggcccacgctctcgagctccataagctccgcaagactgcaacacggcgctgccgcaactgcagcaacccgtacagggaccagaaccctggcggtggtaagttcatgtgctcttactgcggtcatgtctccaagcgccccgtgctcgacctcaattcagccgggaaggcccctaccggatggccttgtgctcaggattgtggatattggctggagcgagaaatgctggaggaggaggaaaggaagcagcgagaggagatggctaagctagtagaggaacggaggaagctgagggatgaaaaggcagaggctgaagagcggtcaaaaagcgctacccctgttggggagaaggatgctaggagggaggtagagaagcggtgtcaggagaggaagaagaaagaggacaagggatcaagtaaaagcaattcagattgtgaggacattgatagaagattgaaccaagaaggcgatagaaagcgagactttgacagaaagagcgacttggacaggcgtgagagttacaagcctcgttacttcgatgctaacagtcacagtaataaaacaggggagagcagatcaagatactttggccgtgtgacaggtggcttcttatcttcttcaagagggtttggtggcggttccttctttggcagaagtgctcaggcccctgctcctcaagttagcaaggttagtagatctgtagttcctgcaactgaccagggtaatgcaatcaaaagagatgtccagcatgcagccacgcaagctacagacaaatctgctacagctggagaaactagaaatgcatggactaattttaatcgacctgttagtccaaatgtgcagccacaccctactggccttaaaaagtcatggcatcagctttttatacgctcagcatcagtggccccttatcctgacgttacaacttcagctcatgatatgattcggaagccagaaccaaatggagcacaaataaacaatgctcatacatttctctctcagtatcctcctctggactgcaagccaagttcaagccagtccatgcaatatcctggttttccaccacttaatggagcacctcccagtaacccactatttcatttttctgctggacatatgcccttctatgatgatgcagaatcaacactactcgaagaatcagagcaatttgaggacccatgctatgatccagatgcaattgcattacttgggccagtttcagaatctttagataacttccctccggacttagattgtggattcttctcgagtgatgttgctaaagaaccacatgggtggccttcaccaattgagtctcctctctcaagatcccacacggttgaagaaaagcttaccaagccctcgcactcatcagttgcaagaggttctggtggtcccattctgcctgtgactagcagtgaacaaggcacatggcaaatgtggagcacgccattggttcaggaaagtttaggtttgcaaggtcctcagagtcagtggtttcaacaaaacacaaatcaatttaaccatagtgctaaccttttcagtagtggaggcagggcaagaagtcccctgggtactggtttgaatgacagtgatccatggcttcagaaagcacctttccaacaattgccacctgatacatcaagcctgttcctttcacatgaaatgccaggaaaattgcacaatgacttggctttcgggtctccaaacaaatcagcccgcgaacacccctttgggccacctggttatttgttgcctaaggaggaactggtgctggatggagctcaggaaggcggcggcgggcatgttctgtcgccgtccggtgcacatgttggcttgttttctccaacaagtcctgatgtgcagccactgtggccattcagtgaaaaaagagagcatagaacgaacagacttttgtaatagaaggaagggaaaatgtggagccaaggcttccttgcctcctctcatgtagggtttacggtcggatataagctggactgtgttcctcttttttgcactgcattgggccttgtttcacctgatgatgttttatgcctgtatgtatgctattgtttctgtgatgtcgcaagtggtgggtagtggaggcaggcgagagaggcggatatggtgtaggagtagaagagaagggtctatcatgtcttgttgttttgttgccattgccattggttgatgcatgcagagaaagaaatgcctgtccatcaatgtcgtgcttgtgcttggtggcccgcacgcatcagattcgctgactgcacctgcgacggagctcgagacgaaaacccctggagagcatagagacctgctggg

SEQ ID NO: 37640 - DNA, 2783 bp, Zea Mays
gaaattcgagagagagagaacaaaaaatcaaacaggcatccaaaaagaagggagaggaagagggagggattgaaaagctagggttttcgccatggccattgcccacctcgagctcccctctctcgaatccacccttcccaagctctcctagctcccgcatctcgtatcttcacaaaaagcagacgcctttgattccccttcccgctgcgtcgcccccattcgagggttttccctccttccccaaatcgaatcgcagcattaccgaccgagcaagcaacccaccaacccacccgctttaagggtccgagccgagcgacggcgctggcgatccagctgggcgtgagggcggcggaggcggccggataatcaatgtgtacgctgtgcgccgtgcagcggtggtcgcggcgcgtcgccaccatgctcccgtggctcgtcgtcccgctcatcgtcatctgggccgccactcagctgctcctcccggccgcctaccgcttcgagcaatgaggtggttattaaggaatatattcagatttacattgtcaggggatggtgagggcttgaacatagatggtaaaaggttggcaaagagtggggagaatggaggaaaaaccgaggagagcaggaccaacaaggcaagaaggaaggcagaggagaagagactggcaaggctggagcgagaaatgctggaggaggaggaaaggaagcagcgagaggagatggctaagctagtagaggaacggaggaagctgagggatgaaaaggcagaggctgaagagcggtcaaaaagcgctacccctgttggggagaaggatgctaggagggaggtagagaagcggtgtcaggagaggaagaagaaagaggacaagggatcaagtaaaagcaattcagattgtgaggacattgatagaagattgaaccaagaaggcgatagaaagcgagactttgacagaaagagcgacttggacaggcgtgagagttacaagcctcgttacttcgatgctaacagtcacagtaataaaacaggggagagcagatcaagatactttggccgtgtgacaggtggcttcttatcttcttcaagagggtttggtggcggttccttctttggcagaagtgctcaggcccctgctcctcaagttagcaaggttagtagatctgtagttcctgcaactgaccagggtaatgcaatcaaaagagatgtccagcatgcagccacgcaagctacagacaaatctgctacagctggagaaactagaaatgcatggactaattttaatcgacctgttagtccaaatgtgcagccacaccctactggccttaaaaagtcatggcatcagctttttatacgctcagcatcagtggccccttatcctgacgttacaacttcagctcatgatatgattcggaagccagaaccaaatggagcacaaataaacaatgctcatacatttctctctcagtatcctcctctggactgcaagccaagttcaagccagtccatgcaatatcctggttttccaccacttaatggagcacctcccagtaacccactatttcatttttctgctggacatatgcccttctatgatgatgcagaatcaacactactcgaagaatcagagcaatttgaggacccatgctatgatccagatgcaattgcattacttgggccagtttcagaatctttagataacttccctccggacttagattgtggattcttctcgagtgatgttgctaaagaaccacatgggtggccttcaccaattgagtctcctctctcaagatcccacacggttgaagaaaagcttaccaagccctcgcactcatcagttgcaagaggttctggtggtcccattctgcctgtgactagcagtgaacaaggcacatggcaaatgtggagcacgccattggttcaggaaagtttaggtttgcaaggtcctcagagtcagtggtttcaacaaaacacaaatcaatttaaccatagtgctaaccttttcagtagtggaggcagggcaagaagtcccctgggtactggtttgaatgacagtgatccatggcttcagaaagcacctttccaacaattgccacctgatacatcaagcctgttcctttcacatgaaatgccaggaaaattgcacaatgacttggctttcgggtctccaaacaaatcagcccgcgaacacccctttgggccacctggttatttgttgcctaaggaggaactggtgctggatggagctcaggaaggcggcggcgggcatgttctgtcgccgtccggtgcacatgttggcttgttttctccaacaagtcctgatgtgcagccactgtggccattcagtgaaaaaagagagcatagaacgaacagacttttgtaatagaaggaagggaaaatgtggagccaaggcttccttgcctcctctcatgtagggtttacggtcggatataagctggactgtgttcctcttttttgcactgcattgggccttgtttcacctgatgatgttttatgcctgtatgtatgctattgtttctgtgatgtcgcaagtggtgggtagtggaggcaggcgagagaggcggatatggtgtaggagtagaagagaagggtctatcatgtcttgttgttttgttgccattgccattggttgatgcatgcagagaaagaaatgcctgtccatcaatgtcgtgcttgtgcttggtggcccgcacgcatcagattcgctgactgcacctgcgacggagctcgagacgaaaacccctggagagcatagagacctgctggg

SEQ ID NO: 37641 - DNA, 2113 bp, Zea Mays
aaaaaatggaagcttttccatttcgacacaaatggaagacagtggatgaagccctatccggtttctcaccctacagatttgtcttcttctcgcacgcttgccttgtccaccgagagaaattcgagagagagagaacaaaaaatcaaacaggcatccaaaaagaagggagaggaagagggagggattgaaaagctagggttttcgccatggccattgcccacctcgagctcccctctctcgaatccacccttcccaagctctcctagctcccgcatctcgtatcttcacaaaaagcagacgcctttgattccccttcccgctgcgtcgcccccattcgagggttttccctccttccccaaatcgaatcgcagcattaccgaccgagcaagcaacccaccaacccacccgctttaagggtccgagccgagcgacggcgctggcgatccagctgggcgtgagggcggcggaggcggccggataatcaatgtgtacgctgtgcgccgtgcagcggtggtcgcggcgcgtcgccaccatgctcccgtggctcgtcgtcccgctcatcgtcatctgggccgccactcagctgctcctcccggccgcctaccgcttcgaggttagtccaaatgtgcagccacaccctactggccttaaaaagtcatggcatcagctttttatacgctcagcatcagtggccccttatcctgacgttacaacttcagctcatgatatgattcggaagccagaaccaaatggagcacaaataaacaatgctcatacatttctctctcagtatcctcctctggactgcaagccaagttcaagccagtccatgcaatatcctggttttccaccacttaatggagcacctcccagtaacccactatttcatttttctgctggacatatgcccttctatgatgatgcagaatcaacactactcgaagaatcagagcaatttgaggacccatgctatgatccagatgcaattgcattacttgggccagtttcagaatctttagataacttccctccggacttagattgtggattcttctcgagtgatgttgctaaagaaccacatgggtggccttcaccaattgagtctcctctctcaagatcccacacggttgaagaaaagcttaccaagccctcgcactcatcagttgcaagaggttctggtggtcccattctgcctgtgactagcagtgaacaaggcacatggcaaatgtggagcacgccattggttcaggaaagtttaggtttgcaaggtcctcagagtcagtggtttcaacaaaacacaaatcaatttaaccatagtgctaaccttttcagtagtggaggcagggcaagaagtcccctgggtactggtttgaatgacagtgatccatggcttcagaaagcacctttccaacaattgccacctgatacatcaagcctgttcctttcacatgaaatgccaggaaaattgcacaatgacttggctttcgggtctccaaacaaatcagcccgcgaacacccctttgggccacctggttatttgttgcctaaggaggaactggtgctggatggagctcaggaaggcggcggcgggcatgttctgtcgccgtccggtgcacatgttggcttgttttctccaacaagtcctgatgtgcagccactgtggccattcagtgaaaaaagagagcatagaacgaacagacttttgtaatagaaggaagggaaaatgtggagccaaggcttccttgcctcctctcatgtagggtttacggtcggatataagctggactgtgttcctcttttttgcactgcattgggccttgtttcacctgatgatgttttatgcctgtatgtatgctattgtttctgtgatgtcgcaagtggtgggtagtggaggcaggcgagagaggcggatatggtgtaggagtagaagagaagggtctatcatgtcttgttgttttgttgccattgccattggttgatgcatgcagagaaagaaatgcctgtccatcaatgtcgtgcttgtgcttggtggcccgcacgcatcagattcgctgactgcacctgcgacggagctcgagacgaaaacccctggagagcatagagacctgctggg

SEQ ID NO: 37642 - DNA, 1587 bp, Zea Mays
gtggattcttatttttctaggcaagtgaatccggcacgcaacagcaacgaccgccccgaaagagagccggaaaaaaagggcaggaaatcgccaccgcccgcacctatttgagcagccgcttgttccttccgcaatccgcgtcctcgctgctcctcaattcgattggctccgtgtcgacctccaggtcaggcgacctttcctcctcttcagatcgctgtatttttttttttgttccctaccccagtccccagcacccagcccggaatctgcaacctcgccagcggttgctgggggttcttccccttgttcgatcggttggttgcttgactgattggcccgcttcctttgttcctggttgagaaggaaagcatcgcgagttcgccatacggatgggttccaaagcgcctttctgtctcacgctcctcttgctgctcgccgcggcctgtggacctgctgcacatgccaacgatgctgtcgagctcccgcatcatggctcagccttgaaggaacatatttcttcaaccaagattcctgcccgtctcaagaggggcagcggactatgctcggcctgtgaaaacttcacgagcgaagccgtcacttatctcggcaaggaacagacacaggacaggatcgtggagttccttcatgatgcttgctcccaatcattctcctttgaacagaagatcacggagatcagaccggaagcgttctgcaaacggtatggcctgtgcagggacacggctcttctctcccggtgtgggaagtgacagcacgtgtgtgttctgccaccatctgctcgatgaaatcatgtccaaactgaaagatccagatgcggagtttgagataattcagattcttgtcaaggagtgcaataagatcgaaggtcacgtccagcagtgcaagaggctggttctgcaatacattcccctcatcttggtgaacggtgagaagttcctcgagaagaacgacgtctgcgcgctcgcacaggcttgtccagcgagcagtaggaagacgttcagctcgatgttgaagggagcgttgtggagtgacgcctggcttgaaggttgaagaagaacacacggagcggtttagcagtggtcagaaatagtgtgaacaagtgctgtgctgtacatataataatgtcgtgtataaatgcatgaaggacgtgtgccctgcattcttttcgtcttgtatcataaattcataaacacgtcgtcttaagtaattgtttatggacacctagaggggatgaaggttaaaatatttggccttgaggtatgatgcagccaatcaatttgtatccacaaagtttcagcgctggcgacttgaaactgcaaatgatgtggtatttttatttgcatcaaagctcaagatttcagagtaggaaagagtggtgtttcagaaacaacagaatacgttgctgttaaaagtgacgctggaacggtttgctgcacttactgtttgtgtgtaaaaatagtgaagttagtggaatgaatgatcctggccagtttctcttaatgaatgattctggccggtttatgttaatgaatgattctggccagttttctcttagaaggtgttccccat

SEQ ID NO: 37643 - DNA, 1592 bp, Zea Mays
gtggattcttatttttctaggcaagtgaatccggcacgcaacagcaacgaccgccccgaaagagagccggaaaaaaagggcaggaaatcgccaccgcccgcacctatttgagcagccgcttgttccttccgcaatccgcgtcctcgctgctcctcaattcgattggctccgtgtcgacctccaggtcaggcgacctttcctcctcttcagatcgctgtatttttttttttgttccctaccccagtccccagcacccagcccggaatctgcaacctcgccagcggttgctgggggttcttccccttgttcgatcggttgagaaggaaagcatcgcgagttcgccatacggatgggttccaaagcgcctttctgtctcacgctcctcttgctgctcgccgcggcctgtggacctgctgcacatgccaacgatgctgtcgagctcccgcatcatggctcagccttgaaggaacatatttcttcaaccaagattcctgcccgtctcaagaggggcagcggactatgctcggcctgtgaaaacttcacgagcgaagccgtcacttatctcggcaaggaacagacacaggacaggatcgtggagttccttcatgatgcttgctcccaatcattctcctttgaacagaagtgtgtcgagctgatggactcttatgcgactctcctgtttgccaagatcacggagatcagaccggaagcgttctgcaaacggtatggcctgtgcagggacacggctcttctctcccggtgtgggaagtgacagcacgtgtgtgttctgccaccatctgctcgatgaaatcatgtccaaactgaaagatccagatgcggagtttgagataattcagattcttgtcaaggagtgcaataagatcgaaggtcacgtccagcagtgcaagaggctggttctgcaatacattcccctcatcttggtgaacggtgagaagttcctcgagaagaacgacgtctgcgcgctcgcacaggcttgtccagcgagcagtaggaagacgttcagctcgatgttgaagggagcgttgtggagtgacgcctggcttgaaggttgaagaagaacacacggagcggtttagcagtggtcagaaatagtgtgaacaagtgctgtgctgtacatataataatgtcgtgtataaatgcatgaaggacgtgtgccctgcattcttttcgtcttgtatcataaattcataaacacgtcgtcttaagtaattgtttatggacacctagaggggatgaaggttaaaatatttggccttgaggtatgatgcagccaatcaatttgtatccacaaagtttcagcgctggcgacttgaaactgcaaatgatgtggtatttttatttgcatcaaagctcaagatttcagagtaggaaagagtggtgtttcagaaacaacagaatacgttgctgttaaaagtgacgctggaacggtttgctgcacttactgtttgtgtgtaaaaatagtgaagttagtggaatgaatgatcctggccagtttctcttaatgaatgattctggccggtttatgttaatgaatgattctggccagttttctcttagaaggtgttccccat

SEQ ID NO: 37644 - DNA, 1527 bp, Zea Mays
gtggattcttatttttctaggcaagtgaatccggcacgcaacagcaacgaccgccccgaaagagagccggaaaaaaagggcaggaaatcgccaccgcccgcacctatttgagcagccgcttgttccttccgcaatccgcgtcctcgctgctcctcaattcgattggctccgtgtcgacctccaggtcaggcgacctttcctcctcttcagatcgctgtatttttttttttgttccctaccccagtccccagcacccagcccggaatctgcaacctcgccagcggttgctgggggttcttccccttgttcgatcggttggttgcttgactgattggcccgcttcctttgttcctggttgagaaggaaagcatcgcgagttcgccatacggatgggttccaaagcgcctttctgtctcacgctcctcttgctgctcgccgcggcctgtggacctgctgcacatgccaacgatgctgtcgagctcccgcatcatggctcagccttgaaggaacagacacaggacaggatcgtggagttccttcatgatgcttgctcccaatcattctcctttgaacagaagtgtgtcgagctgatggactcttatgcgactctcctgtttgccaagatcacggagatcagaccggaagcgttctgcaaacggtatggcctgtgcagggacacggctcttctctcccggtgtgggaagtgacagcacgtgtgtgttctgccaccatctgctcgatgaaatcatgtccaaactgaaagatccagatgcggagtttgagataattcagattcttgtcaaggagtgcaataagatcgaaggtcacgtccagcagtgcaagaggctggttctgcaatacattcccctcatcttggtgaacggtgagaagttcctcgagaagaacgacgtctgcgcgctcgcacaggcttgtccagcgagcagtaggaagacgttcagctcgatgttgaagggagcgttgtggagtgacgcctggcttgaaggttgaagaagaacacacggagcggtttagcagtggtcagaaatagtgtgaacaagtgctgtgctgtacatataataatgtcgtgtataaatgcatgaaggacgtgtgccctgcattcttttcgtcttgtatcataaattcataaacacgtcgtcttaagtaattgtttatggacacctagaggggatgaaggttaaaatatttggccttgaggtatgatgcagccaatcaatttgtatccacaaagtttcagcgctggcgacttgaaactgcaaatgatgtggtatttttatttgcatcaaagctcaagatttcagagtaggaaagagtggtgtttcagaaacaacagaatacgttgctgttaaaagtgacgctggaacggtttgctgcacttactgtttgtgtgtaaaaatagtgaagttagtggaatgaatgatcctggccagtttctcttaatgaatgattctggccggtttatgttaatgaatgattctggccagttttctcttagaaggtgttccccat

SEQ ID NO: 37645 - DNA, 1688 bp, Zea Mays
gtccgaacactgggccggcaggttgtccgccgcatccccttgcgttgcgttcacggttctcctctctgtctctcgcgcacgggatctcgttctccgcggcagctggtgtttcgctcccttctcgccctccgacggctggtgggctgccggcgccggcgccgccaaacgccaggtgctgaggccttcgccagtgtcttcgacggcgacgagcacgtaccagcaccaagcatcatgtcggaaagaggtcgcctggcaggacgattgattgataaccgcagcagagggtaccatgtagtccctctagttgaggatcccagaggccatcctgaagtcctcgtggatggggatcggaggggctactctgacattcgtggggttcagcagcgtcggggctaccctgacacccatctgcttgaggaacctaggggctaccctggtgttcgtgtggtcgaccataggggctatcctggcagtcgtggggttgatgaacgcagggcctatcctgagctccatcaaggctcacgcatgagggcggctcctcccccttacccagctgccttcgaggatgagcttgagttacaggaagttgaactccggaggctttcggcacataaccgtgctctagttgaggagcgtgaactgttaagcagggaaatacaagctggaaaagatgaggtccgccacttgaatgtgatcattgctgacattaacactgagaaagaagcttatatcagtaagcttatggacaagaggaggaagcttgaagctgaacttggagcaagtgagcacttgtgtgatgaggtcaggcatcttcgtggtgaaattgacaagctcgttaccgctcggaaagaactatctgcagaggctgcatctctcgtggaagagctgaacagggagcaatctgttaaacagcagctacctgtgctgaaaacagaaattgatggtctgcaacaggaacttgttcacgtgaggactgcttgcgggttagagcagaaggggaatttggaattgctggaacaaaggaaggcaatggagaagaatatgctttctatggcacaagagatcgagcagatgcgaggcgaattagctaattttgaagttagaccaaggggcccagcatatggcagagttcttatgcaattacctttatgtaacattttaggtggagcatatgggatgcagattgggagttcggaagtgaccttcactaagaacccatatgaagatggttataatgcttatgtgggggttcctgagaaagatcctttgcatcctcctgaatatgcttcgtgggggacatatgacaggagtcgccttcagtaccgctaagaccagaacttagtcattggagaaagaattgccttctaggttttaatggccatgtcttgtcgtttacagtaccgaagctttatgcctgctgcttggttttccattaagagttgtccttttcaatgcttctaatcataactttttccattacaaactggctagattattaaactattggtaccaagatgtccagcaatgtgcggaaagcaccttacatacatgtggttttgcgtgtctgttgacttcaccttctaccataacgtggatgaggatgtgcatagcttccttgtatcccaaatccacgggtttctttttcttctgcggggatatatatgtatttgcatgggtgttctgctgga

SEQ ID NO: 37646 - DNA, 2145 bp, Zea Mays
ctgcagatagagtaatagaatggagtttaaaatatatagacaggggcatagatcatcagacaagatcgcattgcagctgttgtgaggctgttcctctatctacttgttcacagctaacgcaactcgattttttttagaaagagtgcaaaataatagtgatagtgggatgtgtgttttcagtatttcaaggtatctatagcaggtggtatgaataaaacctcaatgaaatggatctatttcgagtcttatcaagtcgggtagtccaagtaatttccttccaaacaaaaagtaatttcttcccaaacaaaagatgcaattactaacaacgtgcagtcgagtccaaaataaataggggcaattttcaagtatacaatacatttagccactcgcttgcctacacttcagaattacaatgtgtactattcaggataaattccgatgcacaacagaaattcaagatcaggattctgaatcgagactgaacctctgtccttaacttgcaatatgaataaaagtcactaattgtacgattttttccactgaactactcaccaggtccgagcaaacaaagtgaaaggtacctcaacagcgccggacgaattcggccacgagggcgagctccttcacggctttttcgttgtcgtgtttaggcaagaagaagacgggcgcctcacccttggtctcgtagagctcgagctcctcctccgagccgcacttcttgattccctctgagtacgcccttgccctctccacgaaccagcactggtccgccatggtcaccagcgcgcggcgggtaccgagctgcctcaactcctccggcgatgccattgggttgacgtagtggtggtcgaggccgaactttccgccgcagatgaattcccaagtgggatcgaatattgcgcggtagccgggatccgtgggctccgcgcccagcagctccttcccctagaaataagggtacaagaggacgccgccgctgaccatgtcgtcgtaaccctcgatgccgccttccttgcgcagccttatcgccacgttgtgcgccatgttaccgccggcgctgtcccccgcaaggacgatgcggaagacgtcgccgtgagcggcgagcgagggctcagcctccgcctcggcgccatccgcgcggcacgcggcgatgaccaccttcagggctgcgaatgtgtcgtcgtaggcggcagggatgcagtgctcaggcgctaggcggtagtcaacggagacgacggcggcgggcaccgcggcagcaagggaggcgacatagatgtggtacagcggggaggcggtggggttgcggacacggacgcggacgcggacgagtcccgggggagtcgcggacggaggcgagccgtggtggacgctctcgttgcatccttatagagtagtagtagaagtagacacaatccctatgacgctgtagcatccccacctatttgtaaacttggaacactcgtgctcacgaatgtgaacaaacatcaccaaacttgatgcagggcacattgcctaaactagtataaatcctaggtccttgagtgctaaccacatgagactctaggcgtatgtgctacaaaaccagcttttttccaagtgatttttattttctaaagaaaaattatttttttataaaataagaattccacggaaaaatagagttgccaaagtattcgctttgttccaaacctgctctaatagtatgacaaaagaaaaaacgaaatgaatacacttttcatctccagagcagctaccgcggtcgtcgtcgtctttcgtcagcaagaaagcacacggttgcctacacacggtcggctggccactgccagcctggcgccgccgtcgacgtctcacggcttggatggaaacaaccctgcacattccggcccgttgactagagaaatttcacgtcaaccgccgcacaaactttgggctagagctagtatcgaagaagaaattggatttataccattaaaagattataactttaaatatatagcattgttaacttaattgtatatagtggcgttaacataattcaattacatatgaaatcaactatatatatatttaaagttacaatcttttaatggtatagatctagttattccaagaaagaaacagaatggaatgcatttgctgttctgg

SEQ ID NO: 37647 - DNA, 3764 bp, Zea Mays
atcaacctctgactttcttttattcttctagattttcctgtaggtggcggagctagtcaagaatttgctactgtcaattcttgcctatctgtaaaagcttggcatatacactaatcaccataccaaccaaataactgctagccacttcatatttgatctctccggtcaaactagggcagctggcaaccatctttcctgaataatattgcactacttcgctgaaaagtcacatgaaaatcaagagatcagcagataaaaacgatagtgaaatcaatggagttcagtctaggttgaggccattttatagtaacttgtaaaaggtgctgatgtgtttagtcctctgggtagtgtgtgtgtgtgtgtgtgtgtgtgtttattagagagaaaaaaaagagagagccctgacctgatattgctaatagtcaaggttgcagagagagagagacatgttgacatttacctaccaatggtgcaattatatgagcttaccattggttggaacaactacgaggttccactaccctagctaggttcaatcaaataccatggcattggccaggagcaaaaaattgtcaccaagacgtacttgactccacttgtaccactattttgcgtggtgccaaacctgcatgatggcaattgaccgcaacagaaggatgcacagaactgtacttggctccaccacttatggaaaactataaagattttttttaacgcctcaatccagagcctacagacttttcataactgagttgacatgtctgcactagacagcacccctacacgatgaagtggtggcggcactgcattctgttcctttattctctttggtgacttgttgccatagcattccaaagaagagaataaacagatataatagtaaatcagctggtatcacagtttgaggagagattctaggagaaactgaacttaaagcttcttttttccttaacaggaaaagggggcagctaaatgagagttgcctaaacaaataaatctgcaaagacaaacatttgagggctgagaggcttccatgaggacagtgcagcatcttgtgatccagatcatgaaaaggcaatattagaaaacaggagaataagaatataggaaatttaagtaaacatcagatcaagcatgccaaatggaattgatagtttcaccgaaaactaaattctaaagaaccatattccttttttcccatttagatccagaaaagccacacttcctaattatacttcttttcatctagatgtttatttttttcacaataatgcatcttaatgtgttcaccagaaaccagacactactacaacttttccggaatagtccatatactttttcctttaaaaaagcgcagagctgatacacaaattcaatatggtaattaagcatcatattctgcagagcgcaaaccgcaaaggcttccacgtcagcaatttttgtctccaagcaaatgaaaaaaatccctttattttccaatgtatctccacaaactgatactaactaacttgccacaaacagctacatagatacgtcattttaagaaaaaaaaacggacaacaataaggtgcttgaagcgtgctctccagaaatctgatggtaacgattttatgtaaaagctcactttttttctatttcggaagggcacggagacaatggcacatgacaatttttgataacatgattaagcttctgcaaagtaactgtaatgcagaccatacatgtagatagtggagaatgattcccaataatacaagatttttactgtcccactttcctagagatgtgttatctgttatgttttcttgtggactccacagtgacctgaaatacttcatttcagtcatgaaagaacaattccgtgcatacgtagtcatcaaagaggggaaaaatgctttgtcccaagaaattcaacaaagaaacatgatgcattgcttgcatagattttatctgtaactgttacagaagtatgatatcctttgttggctttcttggaaaaagtggtacaaccttcctgttgccattgcagctgcatccacaccatacccaactaaaagacacacatgacacatgcctcacatcctctttttatatcctacactcagcagcagcctcataaccgctataaatagaggcttgtcctctaccaatgcccaataagcagctcacagtattcttgagtgcattcgcttgctccattcagtcagagcatttcttgtgcaaaattcaaatacctgtcacaccaaccatgtctaggtctgtggagcctctcatagtcgggcgggtgattggagaagttctcgactcctttaacccatgtgtcaagatgatagtaacctacaactcaaacaaacttgtattcaatggccatgagatctacccatcagcaattgtatctaaacctagggtagaggttcaagggggtgatttgcggtctttcttcacattggttatgacagacccagatgttccaggaccaagtgatccatatctaagggagcaccttcattggatcgtgactgatatacctgggacaacagatgcctcctttgggcgagaggtcataagctatgagagcccaagacctaacatcggtatccacaggttcatttttgtgctcttcaagcagaagggtaggcaaactgtaaccgtgccatccttcagagatcatttcaacacccggcagtttgctgaggaaaatgaccttggcctcccagtagctgctgtctacttcaatgcacagagagaaactgcagctaggagacgttgaaaattccagctcttattgtccacctgatgataataaaggccttctgatcttctttctaggaagccaatgaacttattctacattaaattctcctgagccctaccgtataaataaaccagatgcgttttgctgattgtattagtattagaatgctttgtacgtggcaagaatgagaattacaaatggtcaatgcttgtggtaaaatttgatgtgtaagacatctatcactgaaagtcagaaaccaggcttagtggacacccctcacagggggaaaatttcatcttctgtttgcagcttcgcactttgtgcactttttctaacatgcaaactcctggaaacaaaattcgttggacattttgcgccaacttatagaactataaacaccctaactgcattcgactactacattgttaagcaaggcatgtatagaatatggagatgtctaatttaccaacaggaatataggattgcccactggaagcatgaaaagtatggagacatcaatttttgtgcccctatttttccttcagcttgtccttaagccaaatgaccagaaatccatatcatgtatgcttgaacatgcaagatagctgcatatctttgaattaaaggacagacctagtgttggctgctcccacatgtgtgggttctagggaaggagtaaccaaggcaagccttatctctgcatttttgcagagaggttgaggaaaagggaagagaatcctgtacaaagcaacctccttaccagccagagggtctgaggatgtcacgagctaacactaaaaaatcacctggacacctggcatacaccaagaaatgatccaaccagaatacaaaagactcacacctgaccctctacatgaccttctatgcaaccaaatatgaatgcaaactgaatgctctctttcccattggcttctgtatgtgtttattggctacatacaaacaaactataagatgtaacaatgcaatgtgtacgattgtatcagtttac

SEQ ID NO: 37648 - DNA, 1432 bp, Zea Mays
gcggcagctaatgacagcaaccaagaaacatcgccatctgcatggaggtgaaagatggttattgtttgtgccccagagatgtgtataaatcaaacttgctactgaagctcaacactggttatgacagacccagatgttccaggaccaagtgatccatatctaagggagcaccttcattggatcgtgactgatatacctgggacaacagatgcctcctttgggcgagaggtcataagctatgagagcccaagacctaacatcggtatccacaggttcatttttgtgctcttcaagcagaagggtaggcaaactgtaaccgtgccatccttcagagatcatttcaacacccggcagtttgctgaggaaaatgaccttggcctcccagtagctgctgtctacttcaatgcacagagagaaactgcagctaggagacgttgaaaattccagctcttattgtccacctgatgataataaaggccttctgatcttctttctaggaagccaatgaacttattctacattaaattctcctgagccctaccgtataaataaaccagatgcgttttgctgattgtattagtattagaatgctttgtacgtggcaagaatgagaattacaaatggtcaatgcttgtggtaaaatttgatgtgtaagacatctatcactgaaagtcagaaaccaggcttagtggacacccctcacagggggaaaatttcatcttctgtttgcagcttcgcactttgtgcactttttctaacatgcaaactcctggaaacaaaattcgttggacattttgcgccaacttatagaactataaacaccctaactgcattcgactactacattgttaagcaaggcatgtatagaatatggagatgtctaatttaccaacaggaatataggattgcccactggaagcatgaaaagtatggagacatcaatttttgtgcccctatttttccttcagcttgtccttaagccaaatgaccagaaatccatatcatgtatgcttgaacatgcaagatagctgcatatctttgaattaaaggacagacctagtgttggctgctcccacatgtgtgggttctagggaaggagtaaccaaggcaagccttatctctgcatttttgcagagaggttgaggaaaagggaagagaatcctgtacaaagcaacctccttaccagccagagggtctgaggatgtcacgagctaacactaaaaaatcacctggacacctggcatacaccaagaaatgatccaaccagaatacaaaagactcacacctgaccctctacatgaccttctatgcaaccaaatatgaatgcaaactgaatgctctctttcccattggcttctgtatgtgtttattggctacatacaaacaaactataagatgtaacaatgcaatgtgtacgattgtatcagtttac

SEQ ID NO: 37649 - DNA, 762 bp, Zea Mays
aaaataggccgaaggaacagacatgaaaaattggcatatcgaattggtctctccccccactcctggtgctgaagtagcgaccttcgatattgttgggccagtttgtgagtctgcagatttccttggaaaagatagggaacttccaacacctgatgagggagctggactggttgttcatgatgcaggtgcctactgcatgagcatggcttccacctacaacctgaagttgaggccgccagagtactgggttgaagaggatggttcgattgttaagatcaggcatgaagagaagctcgatgactacatgaagttctttgatggtcttcctgcttagatgtttatttgtgactgctaggggcgatgttttcttggagataattgaatttttctttgtcaagctcattttgctttcttgtggttgttatggaatgttactggatactggatagttagttcggcctgtaggcgtatcctcctgaacttacctctcattgctgttagttttggcaccaagtttgttcccaattgctatttacggaagttattgcataaagggctgtttggttgtaatcttcccgtaagaataagatgcatgtttttgagttagaggaccatgcctgagcgtgatttgtttgggactgaatgttttacctggtgacttgcctgcttgtgatccaaatctgtcacctgggctccggttattcccatcatccatggattagagtccatggattagagaggattggaaaaaaataagaaaga

SEQ ID NO: 37650 - DNA, 1100 bp, Zea Mays
attcatatttgactgaataaagaggttgatatattcagagatgctgcagtgcttatggtgaattatgtcgatgaaattcgagcacaaggttttaagttggagtacctgaatattggaggtggtttgggaatagattaccatcataccgatgcagtcttacctacacctatggatctcatcaacactgtacgagaattagttctctctcaagatcttactcttattattgaacctggaagatccttgattgctaatacttgctgcttcgtcaatagagtaactggtgttaaatctaatggtacaaagaatttcattgttgttgatggcagcatggcagaactcatcagacctagcctgtatggagcatatcagcatatcgaattggtctctccccccactcctggtgctgaagtagcgaccttcgatattgttgggccagtttgtgagtctgcagatttccttggaaaagatagggaacttccaacacctgatgagggagctggactggttgttcatgatgcaggtgcctactgcatgagcatggcttccacctacaacctgaagttgaggccgccagagtactgggttgaagaggatggttcgattgttaagatcaggcatgaagagaagctcgatgactacatgaagttctttgatggtcttcctgcttagatgtttatttgtgactgctaggggcgatgttttcttggagataattgaatttttctttgtcaagctcattttgctttcttgtggttgttatggaatgttactggatactggatagttagttcggcctgtaggcgtatcctcctgaacttacctctcattgctgttagttttggcaccaagtttgttcccaattgctatttacggaagttattgcataaagggctgtttggttgtaatcttcccgtaagaataagatgcatgtttttgagttagaggaccatgcctgagcgtgatttgtttgggactgaatgttttacctggtgacttgcctgcttgtgatccaaatctgtcacctgggctccggttattcccatcatccatggattagagtccatggattagagaggattggaaaaaaataagaaaga

SEQ ID NO: 37651 - DNA, 1080 bp, Zea Mays
cgacaaggatatatgtctgaccatttctaaaggttgatatattcagagatgctgcagtgcttatggtgaattatgtcgatgaaattcgagcacaaggttttaagttggagtacctgaatattggaggtggtttgggaatagattaccatcataccgatgcagtcttacctacacctatggatctcatcaacactgtacgagaattagttctctctcaagatcttactcttattattgaacctggaagatccttgattgctaatacttgctgcttcgtcaatagagtaactggtgttaaatctaatggtacaaagaatttcattgttgttgatggcagcatggcagaactcatcagacctagcctgtatggagcatatcagcatatcgaattggtctctccccccactcctggtgctgaagtagcgaccttcgatattgttgggccagtttgtgagtctgcagatttccttggaaaagatagggaacttccaacacctgatgaggtgcctactgcatgagcatggcttccacctacaacctgaagttgaggccgccagagtactgggttgaagaggatggttcgattgttaagatcaggcatgaagagaagctcgatgactacatgaagttctttgatggtcttcctgcttagatgtttatttgtgactgctaggggcgatgttttcttggagataattgaatttttctttgtcaagctcattttgctttcttgtggttgttatggaatgttactggatactggatagttagttcggcctgtaggcgtatcctcctgaacttacctctcattgctgttagttttggcaccaagtttgttcccaattgctatttacggaagttattgcataaagggctgtttggttgtaatcttcccgtaagaataagatgcatgtttttgagttagaggaccatgcctgagcgtgatttgtttgggactgaatgttttacctggtgacttgcctgcttgtgatccaaatctgtcacctgggctccggttattcccatcatccatggattagagtccatggattagagaggattggaaaaaaataagaaaga

SEQ ID NO: 37652 - DNA, 1108 bp, Zea Mays
cgacaaggatatatgtctgaccatttctaaaggttgatatattcagagatgctgcagtgcttatggtgaattatgtcgatgaaattcgagcacaaggttttaagttggagtacctgaatattggaggtggtttgggaatagattaccatcataccgatgcagtcttacctacacctatggatctcatcaacactgtacgagaattagttctctctcaagatcttactcttattattgaacctggaagatccttgattgctaatacttgctgcttcgtcaatagagtaactggtgttaaatctaatggtacaaagaatttcattgttgttgatggcagcatggcagaactcatcagacctagcctgtatggagcatatcagcatatcgaattggtctctccccccactcctggtgctgaagtagcgaccttcgatattgttgggccagtttgtgagtctgcagatttccttggaaaagatagggaacttccaacacctgatgagggagctggactggttgttcatgatgcaggtgcctactgcatgagcatggcttccacctacaacctgaagttgaggccgccagagtactgggttgaagaggatggttcgattgttaagatcaggcatgaagagaagctcgatgactacatgaagttctttgatggtcttcctgcttagatgtttatttgtgactgctaggggcgatgttttcttggagataattgaatttttctttgtcaagctcattttgctttcttgtggttgttatggaatgttactggatactggatagttagttcggcctgtaggcgtatcctcctgaacttacctctcattgctgttagttttggcaccaagtttgttcccaattgctatttacggaagttattgcataaagggctgtttggttgtaatcttcccgtaagaataagatgcatgtttttgagttagaggaccatgcctgagcgtgatttgtttgggactgaatgttttacctggtgacttgcctgcttgtgatccaaatctgtcacctgggctccggttattcccatcatccatggattagagtccatggattagagaggattggaaaaaaataagaaaga

SEQ ID NO: 37653 - DNA, 1126 bp, Zea Mays
ctatctaagtggcctacaccatcgacaaggatatatgtctgaccatttctaaaggttgatatattcagagatgctgcagtgcttatggtgaattatgtcgatgaaattcgagcacaaggttttaagttggagtacctgaatattggaggtggtttgggaatagattaccatcataccgatgcagtcttacctacacctatggatctcatcaacactgtacgagaattagttctctctcaagatcttactcttattattgaacctggaagatccttgattgctaatacttgctgcttcgtcaatagagtaactggtgttaaatctaatggtacaaagaatttcattgttgttgatggcagcatggcagaactcatcagacctagcctgtatggagcatatcagcatatcgaattggtctctccccccactcctggtgctgaagtagcgaccttcgatattgttgggccagtttgtgagtctgcagatttccttggaaaagatagggaacttccaacacctgatgagctggactggttgttcatgatgcaggtgcctactgcatgagcatggcttccacctacaacctgaagttgaggccgccagagtactgggttgaagaggatggttcgattgttaagatcaggcatgaagagaagctcgatgactacatgaagttctttgatggtcttcctgcttagatgtttatttgtgactgctaggggcgatgttttcttggagataattgaatttttctttgtcaagctcattttgctttcttgtggttgttatggaatgttactggatactggatagttagttcggcctgtaggcgtatcctcctgaacttacctctcattgctgttagttttggcaccaagtttgttcccaattgctatttacggaagttattgcataaagggctgtttggttgtaatcttcccgtaagaataagatgcatgtttttgagttagaggaccatgcctgagcgtgatttgtttgggactgaatgttttacctggtgacttgcctgcttgtgatccaaatctgtcacctgggctccggttattcccatcatccatggattagagtccatggattagagaggattggaaaaaaataagaaaga

SEQ ID NO: 37654 - DNA, 1292 bp, Zea Mays
agcagcactgtgttcatgctctctgcctctctctctgttctctcttctaactatccagttccaattgtacatccatatgttgccacgggaaataaaacatccaaattcgggatccgcaatgagaaattgcaatggtttttgaactctatcaagtcatactcgaatgaaatcaaactcgttggtgttcattgccatctgggatctactattacaaaggttgatatattcagagatgctgcagtgcttatggtgaattatgtcgatgaaattcgagcacaaggttttaagttggagtacctgaatattggaggtggtttgggaatagattaccatcataccgatgcagtcttacctacacctatggatctcatcaacactgtacgagaattagttctctctcaagatcttactcttattattgaacctggaagatccttgattgctaatacttgctgcttcgtcaatagagtaactggtgttaaatctaatggtacaaagaatttcattgttgttgatggcagcatggcagaactcatcagacctagcctgtatggagcatatcagcatatcgaattggtctctccccccactcctggtgctgaagtagcgaccttcgatattgttgggccagtttgtgagtctgcagatttccttggaaaagatagggaacttccaacacctgatgagggagctggactggttgttcatgatgcaggtgcctactgcatgagcatggcttccacctacaacctgaagttgaggccgccagagtactgggttgaagaggatggttcgattgttaagatcaggcatgaagagaagctcgatgactacatgaagttctttgatggtcttcctgcttagatgtttatttgtgactgctaggggcgatgttttcttggagataattgaatttttctttgtcaagctcattttgctttcttgtggttgttatggaatgttactggatactggatagttagttcggcctgtaggcgtatcctcctgaacttacctctcattgctgttagttttggcaccaagtttgttcccaattgctatttacggaagttattgcataaagggctgtttggttgtaatcttcccgtaagaataagatgcatgtttttgagttagaggaccatgcctgagcgtgatttgtttgggactgaatgttttacctggtgacttgcctgcttgtgatccaaatctgtcacctgggctccggttattcccatcatccatggattagagtccatggattagagaggattggaaaaaaataagaaaga

SEQ ID NO: 37655 - DNA, 1446 bp, Zea Mays
ggcgcctaggcgttagaccacctaggcgacaccttaagaacagaggtgtatatttaacggaaatgggaagacactcgaagatcttaaattggctgctgagagtggagtatttgtaaatgtggatagtgaatttgatttagagaatattgtcagagctgcaagagctactggaaagaaagtgcctgttttacttagaataaatccagatgtggatccacaggtacatccatatgttgccacgggaaataaaacatccaaattcgggatccgcaatgagaaattgcaatggtttttgaactctatcaagtcatactcgaatgaaatcaaactcgttggtgttcattgccatctgggatctactattacaaaggttgatatattcagagatgctgcagtgcttatggtgaattatgtcgatgaaattcgagcacaaggttttaagttggagtacctgaatattggaggtggtttgggaatagattaccatcataccgatgcagtcttacctacacctatggatctcatcaacactgtacgagaattagttctctctcaagatcttactcttattattgaacctggaagatccttgattgctaatacttgctgcttcgtcaatagagtaactggtgttaaatctaatggtacaaagaatttcattgttgttgatggcagcatggcagaactcatcagacctagcctgtatggagcatatcagcatatcgaattggtctctccccccactcctggtgctgaagtagcgaccttcgatattgttgggccagtttgtgagtctgcagatttccttggaaaagatagggaacttccaacacctgatgagggagctggactggttgttcatgatgcaggtgcctactgcatgagcatggcttccacctacaacctgaagttgaggccgccagagtactgggttgaagaggatggttcgattgttaagatcaggcatgaagagaagctcgatgactacatgaagttctttgatggtcttcctgcttagatgtttatttgtgactgctaggggcgatgttttcttggagataattgaatttttctttgtcaagctcattttgctttcttgtggttgttatggaatgttactggatactggatagttagttcggcctgtaggcgtatcctcctgaacttacctctcattgctgttagttttggcaccaagtttgttcccaattgctatttacggaagttattgcataaagggctgtttggttgtaatcttcccgtaagaataagatgcatgtttttgagttagaggaccatgcctgagcgtgatttgtttgggactgaatgttttacctggtgacttgcctgcttgtgatccaaatctgtcacctgggctccggttattcccatcatccatggattagagtccatggattagagaggattggaaaaaaataagaaaga

SEQ ID NO: 37656 - DNA, 2561 bp, Zea Mays
agcaggacgccttacgttgccggggcgccttaccgccttaacaactatgcaaatcactgaagaagaagtccccagctagagatgtatataagtttaacataggaagatagcagtactttagttctattacataaccaacatagcctcaaattgattaaattataaagggcaatgcaggttgcagttcaagctgctgcttcatccgcaactgcttcattcttttccacaatagcatcatcatcaagagagggaacaccaacaccaaaagcccaaaagatacagattgtaactcaggctcatcaatgaacatattagccacttcaagaagacctacaccaccaacagaatcaaaggaatatcctgaaacatcccaaatccttgtctcctagtctctattttgtgcaccagtttttgggagatgccttatatttgagggcacagaggcgaaatcctcatcactttctggagttaaggcattttctaacactatggtggaagctgtaagtactctagtttcctttcacagcaagaagatgaggctggttggctaatcaatttgatagccaaactcatgaataaaggcacagactgtccgtctaccaagtctcgagctgagttaaagaacttttaagttaattcaactaacaactcaaatacaagaactttggacttgagtttgtcacttttacatgcatgggtgtagggtggaaaattttcttttgatctaacttccacatatgttctcaacaaaaaatgaatctggaagtagttgggatattccaaaatgctagttaagctatctaacaggcgttgagtttttttagcagaacttgtgtatacaaatactatggtttgcttgtgcagacctgtcttcgatagattcatttttttgtttgcacaaaaagtagatacctgattattttttctatgaaagaataaataatgttacaagagtgttgcatggactataagcccaaaagcaaaagaaccacatgatgatagctattgcagatagtgttgttttaatctagtcaaggattttttgattgccattggttttgcaaaccactcttttagctgtagagctcattgtttctccagttgatggcattttttctgaatagaaagtaactatagtcagtgtctattttgaagatcaggtgtatatttaacggaaatgggaagacactcgaagatcttaaattggctgctgagagtggagtatttgtaaatgtggatagtgaatttgatttagagaatattgtcagagctgcaagagctactggaaagaaagtgcctgttttacttagaataaatccagatgtggatccacaggtacatccatatgttgccacgggaaataaaacatccaaattcgggatccgcaatgagaaattgcaatggtttttgaactctatcaagtcatactcgaatgaaatcaaactcgttggtgttcattgccatctgggatctactattacaaaggttgatatattcagagatgctgcagtgcttatggtgaattatgtcgatgaaattcgagcacaaggttttaagttggagtacctgaatattggaggtggtttgggaatagattaccatcataccgatgcagtcttacctacacctatggatctcatcaacactgtacgagaattagttctctctcaagatcttactcttattattgaacctggaagatccttgattgctaatacttgctgcttcgtcaatagagtaactggtgttaaatctaatggtacaaagaatttcattgttgttgatggcagcatggcagaactcatcagacctagcctgtatggagcatatcagcatatcgaattggtctctccccccactcctggtgctgaagtagcgaccttcgatattgttgggccagtttgtgagtctgcagatttccttggaaaagatagggaacttccaacacctgatgagggagctggactggttgttcatgatgcaggtgcctactgcatgagcatggcttccacctacaacctgaagttgaggccgccagagtactgggttgaagaggatggttcgattgttaagatcaggcatgaagagaagctcgatgactacatgaagttctttgatggtcttcctgcttagatgtttatttgtgactgctaggggcgatgttttcttggagataattgaatttttctttgtcaagctcattttgctttcttgtggttgttatggaatgttactggatactggatagttagttcggcctgtaggcgtatcctcctgaacttacctctcattgctgttagttttggcaccaagtttgttcccaattgctatttacggaagttattgcataaagggctgtttggttgtaatcttcccgtaagaataagatgcatgtttttgagttagaggaccatgcctgagcgtgatttgtttgggactgaatgttttacctggtgacttgcctgcttgtgatccaaatctgtcacctgggctccggttattcccatcatccatggattagagtccatggattagagaggattggaaaaaaataagaaaga

SEQ ID NO: 37657 - DNA, 1595 bp, Zea Mays
cctctctcctgtgccggtcgctgctggagcctttggggccgtcgccgctctgctgctggaggagctgcgtcacacgctctgctgctggaggagctgcaccacgcgctctgctgctggaagagcccccgtgccactgctggaggagccgctgcaccactgttggagccgccgctggcctctcccactcgccttaggtgtatatttaacggaaatgggaagacactcgaagatcttaaattggctgctgagagtggagtatttgtaaatgtggatagtgaatttgatttagagaatattgtcagagctgcaagagctactggaaagaaagtgcctgttttacttagaataaatccagatgtggatccacaggtacatccatatgttgccacgggaaataaaacatccaaattcgggatccgcaatgagaaattgcaatggtttttgaactctatcaagtcatactcgaatgaaatcaaactcgttggtgttcattgccatctgggatctactattacaaaggttgatatattcagagatgctgcagtgcttatggtgaattatgtcgatgaaattcgagcacaaggttttaagttggagtacctgaatattggaggtggtttgggaatagattaccatcataccgatgcagtcttacctacacctatggatctcatcaacactgtacgagaattagttctctctcaagatcttactcttattattgaacctggaagatccttgattgctaatacttgctgcttcgtcaatagagtaactggtgttaaatctaatggtacaaagaatttcattgttgttgatggcagcatggcagaactcatcagacctagcctgtatggagcatatcagcatatcgaattggtctctccccccactcctggtgctgaagtagcgaccttcgatattgttgggccagtttgtgagtctgcagatttccttggaaaagatagggaacttccaacacctgatgagggagctggactggttgttcatgatgcaggtgcctactgcatgagcatggcttccacctacaacctgaagttgaggccgccagagtactgggttgaagaggatggttcgattgttaagatcaggcatgaagagaagctcgatgactacatgaagttctttgatggtcttcctgcttagatgtttatttgtgactgctaggggcgatgttttcttggagataattgaatttttctttgtcaagctcattttgctttcttgtggttgttatggaatgttactggatactggatagttagttcggcctgtaggcgtatcctcctgaacttacctctcattgctgttagttttggcaccaagtttgttcccaattgctatttacggaagttattgcataaagggctgtttggttgtaatcttcccgtaagaataagatgcatgtttttgagttagaggaccatgcctgagcgtgatttgtttgggactgaatgttttacctggtgacttgcctgcttgtgatccaaatctgtcacctgggctccggttattcccatcatccatggattagagtccatggattagagaggattggaaaaaaataagaaaga

SEQ ID NO: 37658 - DNA, 3723 bp, Zea Mays
gctgtgagcggaattagagtcgggcatttcgttccgcttcgccgcggccgccgcctccgcctccgtgtcgccgccgccccgcagaaccctaaaggccgccgccaccatgcgccgcctcccgcccctcccccggcccgcggccgccgtcgcctcgacatccaccccggacatcgtcgcggagctcggccgcgtcctctccacgcgccgctggaacaagggcagcgcctacaagcggctgtccccctccgtgacggccgcgcacgtggccgacctcttccgcgccccggtgtcccctctcgacccggccaccgctctggccttcttcgagtgtgtcgcgcgccgccccgggttccgccacaccgccgcctcccacgccgcgctgctccagctcctcgcccgccgccgcgcgcccgccaactacgacaagctcgtcctctccatgattagctgctccggcaccgcagaggacgtgcgcgaggccgtcgacgcaattcaggcaatccgtcgagtgggtggtaagcgactcgtgctgtccccaaagtgctacaacttggcgctcaggtcgctgctgcgattcgacatgacggagtatatggggaagctgtactcgcacctcgtgcaggagggattgttgccagacacggtgacttacaacactatgatcatggcatactgcaagaagggcagtctcgccatagcacaccggtatttctgcttgttgagggagtctgggatgcagatggatacatacacatgtaatgcactgttgctggggtactgccgaacaagtgacttgagaaaggcttgctggctactcatgatgatgccgctgatgggttgcaggaggaacgagtactcctacaccattttgattcaggggctctgtgaagcacggtgtgtaagggaggcacttgtgcttgtgttcatgatggtacacgatgggtgctccctgaatctgcacacgtatacactcttgataaaaggtctttgtaaggagggcaggattcatgatgccagggggttgcttgatgaaatgcctttgagaggggtggtaccaagtgtttggacttataatgcaatgattgatgggtattgtaagtcaggaaggatgaaggatgcattggggattaaagcactgatggaacaaaatgggtgtaatccagatgactggacatacaacagtctgatttatggcctatgtggtgggaagctagacgaagccgaagaattgctgaatggcgctattgcaaggggcttcacacctacagttatcacattcactaacctgattaatgggtattgcaaggctgaaaggattgatgatgcactcagggtaaagagtaatatgatatcaagcaattgcaagcttgatttacaggcatatggagtgttgattaatgtcctcatcaagaagtgtagattaaaagaggctaaagagacgctgaatgagatgtttgcaaatggtttagctcctaatgttgtcacttacacttctataattgatgggtattgcaaggttgggatggttggtgctgcactagaggtcttcaaattgatggaacatgaaggctgccatccaaatgcctggacttatggttctttgatatatgggttaattcaggataaaaagcttcataaggcaatggctttaataactaaaatgcaagaggatgggataactcctggtgttatcacttatactactctgattcaaggccagtgcaaaaaacatgaatttgataatgctttcaggttatttgaaatgatggaacagaatggcttgacacctgatgagcaagcgtacaatgtcctaactgatgcactatgcaagtctggaagagctgaagaagcttattcatttcttgtcaggaagggagtcgtcctcacaaaggcattatgtaaacaaaaaaaactgaatgaagctttgtctatactggatcagatgactgtaagtggagtcaagtgtaacattgttgcttatacaataattatcagtgaaatgatcaaagaagggaagcatgaccatgctaaaagcttgttcaatgaaatgatttcatcaggacataagcctagtgcaaccacatatactgtattcattagctcgtactgcaagataggtcgaatagaggaggctgagcatctaattggggaaatggaaagagacggtgtcacacctgatgtggtaacctataatatattcattaatggttgtggtcatatgggatatattgatcgtgcattttctactctgaagcgcatggtggatgcatcatgtgagccaaattgctggacttattggcttttgctcaaacattttctaaaaatgagtttgatcaatgctcactatgtagacacatctggcatgtggaactggattgaactgaacatggtttggcagcttcttgaaaggatgatgaagcatggtttaaatcctacagtagtgacatacagttctatcattgcaggattctgcaaagcaacacgactagaagaagcatgtgtgcttcttgatcatatgcttggaaaagatatatctcccaatgaagagatatacacaatgcttatcaagtgttgttgtgatatcaagctctttggaaaggctgtgtcatttgttaccgacatgatagaatttgggtttcagcctcagcttgagtcctaccactaccttattgtaggcctctgtgatgagggggactatgacagggctaaatcactgttctgtgacttacttgggatggactataatcataatgaagttgcatggaaaattttgaatgatggtttgctcaaagctggccatgtggatttttgttcacagttgctggctgctatggataatagacactgtcggattgactctgagtcatattcaatgttgactgatagcattcgtgaggcttctggcagtgtggtcagcgaactcagaggagaagctgcctgaccgatgtgcaagtgtctttggagtttcgtcagaatcaatgcagtgttcctatgattcccgaggaaacagtgtcccaacaatcctcttgatgatgcagagatgcctttatgaacatggaggtcttcaggcagaaggtatcttccgaataaacgcagaaaatagccaggaagaatttgtgagagaccaattaaataatggaattgttcctgatggcgttgatgtccactgtttggcaggtctaatcaaagcctggttcagagaaatgccgaggggggtactggactctatcccacctgaacaggtgatgcaatgccaatctgaagaggactgtgcttgggtatcgaaatgtcttccactagctgaagcagctttgcttgactaggctgttaatctgatggatgatgtagtccaggaagaacagataaacaagatgaatgatcacaatattgctatggtttttgtgccaaatacgactcagatggcagatcctttgactgcactgatgtatgcagtccaagtgatgaattttctcaagatgctggtacaaaagaccctcaaggatagagaggagtccactccagaggatgttttgctgccacagaaggaccaacaacaacaacaacaacaacaacaacaacaacaacaacaaagcctttttgtcccaagcacgttggggtaggctagagatgaaaccccgtatgaaaacctcagagctcaacccccaaagaacagaaaagggaaacaaaggcaaaggagaaccgaaaacaacgaaacggggaaac

SEQ ID NO: 37659 - DNA, 1655 bp, Zea Mays
cttttcttttccttctccccccgcccgcggaatcaagactcgacagctccaggttggccatcgcccacccatcgtcgccagcacggaagaggcaactcgctaggcggcggcggagaactggccacgacgcgtccccggaagggccggttgcttgactgatcctcttcttgggcggcacggtgtcctgtgccgtgccgcgtgaaagattccaccggcatccccaatccccatggcctaccgccggaagcagggagtcgccgccgccgatcaccggagctcctatccccaggactccgcctcgtcccacggctacacgtcgttcaaaagcatagatgagcccaagctcgggctgtggcgaactctggcgaccagagccaaggggatcctcgacgaggacgggttggcgcataagttcgaggacttgcggaaagaacggcctcgtagcgacgccacggcatccagcaaagatcaggctcctaattctcgctggtcatttgagaaccactggaaggccggagacgccgcgtcgcggatcagacccgaggctctttctgcttctgtcaaccagcttagtggaaaaataaagaatgctttggaagaagggctcacgatcgtggataacaagacctccagtattattgaggaaacaaagaaaattcagatcaggaggaaacctgctggctcaagccctcatgtgccgaattcagcggtagataagcatacgcttagcacccctgatctttcactccggcagcctgaatctgctgcccaggagactggactgaaagcttctcgcgacgtaaggttgctaatgcaatggctgctaaagcaaaacttgtactccgtgaactaaaatctgttaaagcagatctagcctttgcgaagcagcgatgcgctcagctggaggaagagaacaggctcttgcgagaaacaaagcagaaagggagcaaaactgaagaagacgatgacttgctggagacattgctgtccgagaaatcgaggctggcgcaggaaaactcgacgtatgcccgtgaaaaccgcttcctgcgtgagattgtcgacttccatcagttcaccacccacgacgttgtctcattggatgacggcgacatggaaggcaccgaaccagaagaagacgacgacaacgacaacggcctcatatgtgctgagaacgttctgcctgcggttgaagaaaatccagtagacgaagaacactgccctgtcccctccaagctagaatctccagtggccagcctgggcgagccatcatcgtcccccaggtccagcgattgtcacagtgcctcgaagccagacgcgtcagcgtctgatgtagcttgatgatgcatgcgacattggtgactttgccatcttgtttggggtttcagttggcgttggttgtgagtgatgcatgtgtgtataatttttttgtccattgtccacattggattggtttgtagcatagttacaggtttctgcttttgtatagagcgtatagtgctgtgttttgatgggaaaactgactcgtatggtccgccaagttttaaggtgcatatggtttggtccacatgtaattacctgtggatttgactgttataaattggccaagtgaaagaatatattgaagactgagattgttgcttgcatgtatatgtatt

SEQ ID NO: 37660 - DNA, 1662 bp, Zea Mays
cttttcttttccttctccccccgcccgcggaatcaagactcgacagctccaggttggccatcgcccacccatcgtcgccagcacggaagaggcaactcgctaggcggcggcggagaactggccacgacgcgtccccggaagggccggttgcttgactgatcctcttcttgggcggcacggtgtcctgtgccgtgccgcgtgaaagattccaccggcatccccaatccccatggcctaccgccggaagcagggagtcgccgccgccgatcaccggagctcctatccccaggactccgcctcgtcccacggctacacgtcgttcaaaagcatagatgagcccaagctcgggctgtggcgaactctggcgaccagagccaaggggatcctcgacgaggacgggttggcgcataagttcgaggacttgcggaaagaacggcctcgtagcgacgccacggcatccagcaaagatcaggctcctaattctcgctggtcatttgagaaccactggaaggccggagacgccgcgtcgcggatcagacccgaggctctttctgcttctgtcaaccagcttagtggaaaaataaagaatgctttggaagaagggctcacgatcgtggataacaagacctccagtattattgaggaaacaaagaaaattcagatcaggaggaaacctgctggctcaagccctcatgtgccgaattcagcggtagataagcatacgcttagcacccctgatctttcactccggcagcctgaatctgctgcccaggagactggactgaaagcttctcgcgacgttgctaatgcaatggctgctaaagcaaaacttgtactccgtgaactaaaatctgttaaagcagatctagcctttgcgaagcagcgatgcgctcagctggaggaagagaacaggctcttgcgagaaacaaagcagaaagggagcaaaactgaagaagacgatgacttgattcgcgtgcagctggagacattgctgtccgagaaatcgaggctggcgcaggaaaactcgacgtatgcccgtgaaaaccgcttcctgcgtgagattgtcgacttccatcagttcaccacccacgacgttgtctcattggatgacggcgacatggaaggcaccgaaccagaagaagacgacgacaacgacaacggcctcatatgtgctgagaacgttctgcctgcggttgaagaaaatccagtagacgaagaacactgccctgtcccctccaagctagaatctccagtggccagcctgggcgagccatcatcgtcccccaggtccagcgattgtcacagtgcctcgaagccagacgcgtcagcgtctgatgtagcttgatgatgcatgcgacattggtgactttgccatcttgtttggggtttcagttggcgttggttgtgagtgatgcatgtgtgtataatttttttgtccattgtccacattggattggtttgtagcatagttacaggtttctgcttttgtatagagcgtatagtgctgtgttttgatgggaaaactgactcgtatggtccgccaagttttaaggtgcatatggtttggtccacatgtaattacctgtggatttgactgttataaattggccaagtgaaagaatatattgaagactgagattgttgcttgcatgtatatgtatt

SEQ ID NO: 37661 - DNA, 2130 bp, Zea Mays
cgcagcctcgctgtcgccagtttcttttcttttccttctccccccgcccgcggaatcaagactcgacagctccaggttggccatcgcccacccatcgtcgccagcacggaagaggcaactcgctaggcggcggcggagaactggccacgacgcgtccccggaagggccggttgcttgactgatcctcttcttgggcggcacggtgtcctgtgccgtgccgcgtgaaagattccaccggcatccccaatccccatggcctaccgccggaagcagggagtcgccgccgccgatcaccggagctcctatccccaggactccgcctcgtcccacggctacacgtcgttcaaaagcatagatgagcccaagctcgggctgtggcgaactctggcgaccagagccaaggggatcctcgacgaggacgggttggcgcataagttcgaggacttgcggaaagaacggcctcgtagcgacgccacggcatccagcaaagatcaggctcctaattctcgctggtcatttgagaaccactggaaggccggagacgccgcgtcgcggatcagacccgaggctctttctgcttctgtcaaccagcttagtggaaaaataaagaatgctttggaagaagggctcacgatcgtggataacaagacctccagtattattgaggaaacaaagaaaattcagatcaggaggaaacctgctggctcaagccctcatgtgccgaattcagcggtagataagcatacgcttagcacccctgatctttcactccggcagcctgaatctgctgcccaggagactggactgaaagcttctcgcgacgtaaggtgccgccacatgcttatatcttgatggcaaatatacatgttattttacatcttctatgcaggaaaccagaattttcttttacatgcatcggaaaaccttcgacacttggtggtccttgtatgtgcatgtcaacatcaaaatctatgttttctagtgactagtcttgcgaaacgaggggcataattagttttcggaaaccagtatcttctgatgttgcccaatgttttgttatgatttgtagcatcatcaaaaccttagcattgtgaccatctgtctcttgctcacactgaattagcataacttttgcttcggtaaaaacataaaaatatggtagtttctccttctcgctatcactatatgaatccttcagataagtaaactggatgattctgctgtagtatgtatctaccaggactgacccctttctgtgcacttgtataaattatttcaggttgctaatgcaatggctgctaaagcaaaacttgtactccgtgaactaaaatctgttaaagcagatctagcctttgcgaagcagcgatgcgctcagctggaggaagagaacaggctcttgcgagaaacaaagcagaaagggagcaaaactgaagaagacgatgacttgctggagacattgctgtccgagaaatcgaggctggcgcaggaaaactcgacgtatgcccgtgaaaaccgcttcctgcgtgagattgtcgacttccatcagttcaccacccacgacgttgtctcattggatgacggcgacatggaaggcaccgaaccagaagaagacgacgacaacgacaacggcctcatatgtgctgagaacgttctgcctgcggttgaagaaaatccagtagacgaagaacactgccctgtcccctccaagctagaatctccagtggccagcctgggcgagccatcatcgtcccccaggtccagcgattgtcacagtgcctcgaagccagacgcgtcagcgtctgatgtagcttgatgatgcatgcgacattggtgactttgccatcttgtttggggtttcagttggcgttggttgtgagtgatgcatgtgtgtataatttttttgtccattgtccacattggattggtttgtagcatagttacaggtttctgcttttgtatagagcgtatagtgctgtgttttgatgggaaaactgactcgtatggtccgccaagttttaaggtgcatatggtttggtccacatgtaattacctgtggatttgactgttataaattggccaagtgaaagaatatattgaagactgagattgttgcttgcatgtatatgtatt

SEQ ID NO: 37662 - DNA, 2591 bp, Zea Mays
gtaacgcgcagcctcgctgtcgccagtttcttttcttttccttctccccccgcccgcggaatcaagactcgacagctccaggttggccatcgcccacccatcgtcgccagcacggaagaggcaactcgctaggcggcggcggagaactggccacgacgcgtccccggaagggccggttgcttgactgatcctcttcttgggcggcacggtgtcctgtgccgtgccgcgtgaaagattccaccggcatccccaatccccatggcctaccgccggaagcagggagtcgccgccgccgatcaccggagctcctatccccaggactccgcctcgtcccacggctacacgtcgttcaaaagcatagatgagcccaagctcgggctgtggcgaactctggcgaccagagccaaggggatcctcgacgaggacgggttggcgcataagttcgaggacttgcggaaagaacggcctcgtagcgacgccacggcatccagcaaagatcaggctcctaattctcgctggtcatttgagaaccactggaaggccggagacgccgcgtcgcggatcagacccgaggctctttctgcttctgtcaaccagcttagtggaaaaataaagaatgctttggaagaagggctcacgatcgtggataacaagacctccagtattattgaggaaacaaagaaaattcagatcaggaggaaacctgctggctcaagccctcatgtgccgaattcagcggtagataagcatacgcttagcacccctgatctttcactccggcagcctgaatctgctgcccaggagactggactgaaagcttctcgcgacgtaaggtgccgccacatgcttatatcttgatggcaaatatacatgttattttacatcttctatgcaggaaaccagaattttcttttacatgcatcggaaaaccttcgacacttggtggtccttgtatgtgcatgtcaacatcaaaatctatgttttctagtgactagtcttgcgaaacgaggggcataattagttttcggaaaccagtatcttctgatgttgcccaatgttttgttatgatttgtagcatcatcaaaaccttagcattgtgaccatctgtctcttgctcacactgaattagcataacttttgcttcggtaaaaacataaaaatatggtagtttctccttctcgctatcactatatgaatccttcagataagtaaactggatgattctgctgtagtatgtatctaccaggactgacccctttctgtgcacttgtataaattatttcaggttgctaatgcaatggctgctaaagcaaaacttgtactccgtgaactaaaatctgttaaagcagatctagcctttgcgaagcagcgatgcgctcagctggaggaagagaacaggctcttgcgagaaacaaagcagaaagggagcaaaactgaagaagacgatgacttggtaatctttccccccctgatcaaacgtatctgttgtcaggttcaatgtctttttcgtggattacatgcatataccttggccttcaattcatcaacaacattccaataggtgataacttgtcaccagactgaccaaaaaaatattagtacatgtgaatctttaaattaaattatataagttgctgttaatatccattcctcttttgaaattcagcattacataaattgagattcatatgaaacaatagtatatggtcatgattcatgaaaatttttggcccggtatcttgtcggtactgtcgcttgttctttaacaacacctaaagagtatcactgcatcctctgaaatgcggtatataaaacatggtcatgtgcttgtgaaccaacgagtgcaacctgttctccgtatctatcgtcactctgaactacccattgttgaatcagattcgcgtgcagctggagacattgctgtccgagaaatcgaggctggcgcaggaaaactcgacgtatgcccgtgaaaaccgcttcctgcgtgagattgtcgacttccatcagttcaccacccacgacgttgtctcattggatgacggcgacatggaaggcaccgaaccagaagaagacgacgacaacgacaacggcctcatatgtgctgagaacgttctgcctgcggttgaagaaaatccagtagacgaagaacactgccctgtcccctccaagctagaatctccagtggccagcctgggcgagccatcatcgtcccccaggtccagcgattgtcacagtgcctcgaagccagacgcgtcagcgtctgatgtagcttgatgatgcatgcgacattggtgactttgccatcttgtttggggtttcagttggcgttggttgtgagtgatgcatgtgtgtataatttttttgtccattgtccacattggattggtttgtagcatagttacaggtttctgcttttgtatagagcgtatagtgctgtgttttgatgggaaaactgactcgtatggtccgccaagttttaaggtgcatatggtttggtccacatgtaattacctgtggatttgactgttataaattggccaagtgaaagaatatattgaagactgagattgttgcttgcatgtatatgtatt

SEQ ID NO: 37663 - DNA, 1827 bp, Zea Mays
tgagttccgacgttgcccgggaggggtggggaggggagcggcccatttggatttggaagcatcctcggcggcgagcggcggcgtcgcattcactctcatctctctctcacacagattccggctccttttccctctcccccaattcaaaatcaacccccctcgtcgcaaggccacaacaactccactcctccccatccctagctagccactagggtttgccagcctttgcagcgtcgcgctcgcgtctcatgcccttgcccatcgacggtagacgagagcgagcggtctgtgttcgtggagcaggggccggcgccatggagatcaacatcgtggacaagtacgagaagctggagaaggtcggggagggcacctacggcaaggtgtacaaggcgcaggacaaggcgacggggcagctggtggcgctgaagaagacccgcctcgagatggacgaggagggcatcccgcccacggcgctccgcgagatctccctcctcaacctcctctcccactccatctacatcgtccgcctcctcgccgtcgagcaggccgctaagaatggcaagcccgtcctctacctcgtcttcgagttcctcgacaccgatctcaagaagtacctcgacgtctaccgcagggggcccagcgccaggccgctccccgcgacactcatcaagaatttcctgtatcagttatgcaaaggagttgcacactgccatagccatggtgtccttcaccgggatttaaagccacaaaacctgctggtggacaaggagaagggtatactgaagattgctgatctgggactcggtagggctttcactgtgcccatgaaaagctacacccatgagagctcctgaagttttgcttggagcaacacattactcaactggcgttgatatgtggtctgttggatgcatctttgctgaaatggcccgacggcaggctctctttcctggtgactcggagttgcaacagttgcttcacatcttcaggttgctgggaacacctactgaggaacagtggcctggagtgagtgatttaagggactggcatgagtttccacagtggaagccccagggtttggcacgtgtcgtcccaacactggaacctgaaggagttgaccttctatcgaaaatgcttcagcttgatccttcaaacaggatatcagctttagctgcgatggagcatccctactttaacagccttgacaagtcccagttctagccgttgtactatgtggttcagaaggcgctaccctcgtacagagagatttccaatggtgttatgaatctcaattgccatctaggcaactggttcatgattttaccaatctgttagtgagtgaaaatcgtgcgagggtcatatgtgttccccttgtcttaaaaatctggtgtggtgtagaacaagagttacctgtgggaggcctgtgataatgccctttatgtctcaacatccattttcgtgcattccatgttcttcaatacggacttgaaacaggaattctgattttcttattactaccttcaagtttcagctttttattttttcctagcaagcctgtgatttaattttttttctcttccatgaagttcaagcaagcattatcaaagtcgagcaaccaagctgaaattcataagtagaaaaaaatgatatctagaacatattgggattaggggctctagctgagtagattagatggttgtactaacactccttaggacttgggtcttcttttgacaaaatgttcaaggagtttgaatgatatgtattggacatgacagtcaagtttggagcatgaaagaaaccaacatacacggtgttccctagggt

SEQ ID NO: 37664 - DNA, 2404 bp, Zea Mays
attttcccccttttgcccctacttggccgccaccccttttcccccctcccacacttggccacccctccaccctttccccttgggctggccatcctctcctcccatggcagcccctctccacggcttcctcctccctctagatctcccccacgcagcaaggatcgagaagaggaggagcacgttgaattgaaggggaagagaggatcaaggagatgttcttccccatctattcttgcaaactttcttggggaaaccctaggtatggatgagatccttgttcctccctataattatgtgcttttggaggttgtggatcatgggaattaaaggattagaggttggattagatgtggggttaggttttgatctcgaatttagttttctgcagaatggcagattcgacactttctgttcatgccagttttccgtggtcttagtagcctcaaaaaattaaacagtctatatatgagtcgtagataatttgtagatctttccgtggctgcgaagaacacctcaatcggacataagattagagagttattgcagtttgattatagcagttttttagtctcttaattctgtacagaatctgttctcttaagatttaggcaattttatcaacagaattaaaccttggatttgtaagagaagatgtagataattttataagctttccagattgttaaagagtgcattcatatgaattatgaaacttcagttatgtttgttttactatggctgtttctgtttgcctgacaaaaaatgagcgggtctgttcactggtaggtttcatcaggtaaatggccgaattggctctcccagctatggagacttttgtagaggaataaaagttcttacttccagcagaatttcatgatttttggttgagtagtttgtgagatatcaaattttgaaagttaactatgctgctgtctaaaacagattcagtcagttatcttgtcagatgttttagaacttatagatggcagaatttaattgtccatcgaatgccgaagttgtagagtattttgtgtagatactcatagagtatttgtttgatatcactactattataattttaaagatacaaaattaacaaacagtgctgctgctgtatgacatgtggttcagagtgggaggttttccactaggtcttggtttcaggtgtaggagcgatttgttgattgttggcaaatgtttgtgaaatatttgtactaagttttatgtcctctacaggtggctacactccagatcatgcctagtacatttttcttcttcgatgaaggcaagtgaatgtaggggtggttgttttcgttctgacctgttatttctatcgcctacactctagtattcagaattattggattttttcataattggactccatggtgatgctttacttgcttgcattatcctgatgctcaatcatataatgatgatgattatgattcgagtacaactcatgagattaattcacacccctgaaggtaaataaagtattatttgaggtttgtattgtatctgaaggtaaatgaagtattattggaggtttgtattgcatgtgaaggaagtgaagtatattgataaatgcagcatgccatatacattgcatgattcacttgcatctgaagttgggtcgtgacctatggtccgaccgtaccggtacaacttagcatcgtacgttgcccgaggaggggtacgatgcggcttcatacccttagaggtataaaggcagaggacatatgcattgcattcatatgcattcattgaagtgatatttgcagatgatgtggttttataccctcagaggtataaagacataatacctacacattgtgttcctatgcatacattgaagtgatatttgcaagtattgttgacgcagggaagtgttatacaaactattgtggttgttcgaggaaatgagatggtatttgttatattgagactactgagttctatatctacaagtatttctgatcttaattgtgattcttttaaaatgttgagtaattcaatttgtggtttaaatatcttgtcaaaacaattcgcttgctgagatgtttcatctcactcttgcattactcaatgcaggtgcttgttgctcatcaagggaagtgggaagtagcagcatatccaccttctctctcataataacgctgcttaggcacagtcatgatttaattagaaacttcttatcaaaggatgttgtttctaactagttgtgcgcactggctgatttagttcatgccgttatggttgtcttcccattgcttgcagattattaatgtatattatgttttcttatcatgatatctatttatactttgttgcttccccatttatgcaattttcaaagggaatgctgtcgaaattttatatatgaatgttagatgtgtagttt

SEQ ID NO: 37665 - DNA, 580 bp, Zea Mays
cttactcttactttttaaataaatgtgagtttatgtgtcacacccggctttaagggacaaagccaggtgcatctcatacatgcgccaagaagacaacatatataataacagagtgtatagagataaatgtcacaaaacatcagagtatttgttacatagcggaagacttattacaaaataaagtaataaagataaaacgaactaaggatcgttggcgccaatgtcaactgagaaacgccacctagatcagatcatactcctcgccttgtggctcctcctgaaccacctgctcttctcctgtgggggggtgtgagacagcaagagtgagctcacatacgttcatcgctcaacaagttgtggggaataatgtgacatgaactcaccaaaggtgggagctcatggagtgtaaggcttatcaaagagaatggttaaagctgagcattgcttttaatgttggtcaaacttttattagcagttactagatgtaagtaaatacccaaaccttaaataaagtaatagaacaaaattaataataaacccatgcaatgcaaatgacaaaattgaatttaagttccataat

SEQ ID NO: 37666 - DNA, 1645 bp, Zea Mays
caccgcgctctcccctagccacccgatctagatcttacagaccggattaatctcgcgaagggctattcccttgatccatccgtagccgttagatgtggatccaacggcgcaaacatggttaccctgagatctaatcttggccgctcaaacctggatcgacggccaacaatgccccttccacctcccgatggacaagcaaggaggcggcgctcccagccaccatggccgtgacccatgacatcgccgccgcgatctggacggcgccccggtgcaccaaatttcgaagcaaatctccctaaaccatgcagagattatggagaatagaatgggggatatattaccagtgattggattgcgcagagattggtccgcggtgacgggcgtgaacgtcgccgagtggacgaacaagcaattgaatgcgtggatgtgggcatggaggggatccagcggtcgaagacggcaacaccccggcgagggaggcatagacggaaatggcatcgggcttgaacccgcccctggtgttctgcaacctgccgaggctcataccgcacgcgacggtggacaggtcatcgatcacaaattctgtggccaggagaacagagggcgagttcgcagtggccgaagaagctccaaggtgatgtggccatggccccgccggcgacgcgcccatccgagcagtgcatagcatggcgataccccatccgtggaccggtgcgggcgagctcgacagcagtggcatcaaatctcaccccccttcacccatgctccgttcttcagtgcttcagatggtgacccgtattagcctcacgtcgagaggaacccacacgcgatggcgacaatgaacttcgatggcagcggcacttagcggaagagaatggtatgcatgggagcctcagatgtacccccacgaggtctgctgcaggtggtgaggagaggaagtaggggcgcggtggagggagcacgccatgggaatccgggagggccagccaagccgcctaggccgggagcacccaccacggatgaacggcgccgcccagccatgggagaggttgttgggggtaggatcgaatcatatatcatgggcgcaccgaaatcccacgaacccagccgatcccggcggctatggattcggcacgaaggagatggagccgccaggtgggtcccccacgacagagacacaaggccaggcacgctggatgcaggccaagcgactgcccagtagggcccatgtgcaagtgagaggggttagggatgctgccatgctgggaagaaatgggctgcgtgggaaactagtgggccgactgaattcttttccttttccttttctttttagatttctcaagttcaaattttaaattctagtttgaattcaaacttgtgaccaatttatccttagatatattgtgccatgacaagttctaatttggagatatatttatatatattatttatatttttataacacataatatttgtttgcttttcttttctaaattctagaatcccttttatattcaagttccactttgggattttaatattttcttttcatatgatttcttatattgtcacaagatgcacacataataaaaaccagcatgatgcatatttttagtggcatatatcttattaattatgttttttt

SEQ ID NO: 37667 - DNA, 790 bp, Zea Mays
attttggacctcgaccttcagtaatcagatccctaatttcttgtatcttagcatcaccaatctgtccttctgcggatttcttgctccaaggtaggttccacatcaataactccttcagtgtgagcaactatccccaggttaagtctcctaaagtcctcaacaatctcatcaggtagctgggcaacaatagctgaatgaacatgctccttgcgactcaaggcatctgcaaccaaatttgccttgcccgggtgatagtgaatctccaaatcataatccttaataagctccaaccaacggcgttgcctaaggttaagatccttctgagtgaatatatacttcaaactcttatgatccgtgtatacttgacacttggttcccataatgtaatgcctccaaatcttaagtgcatgcacaacggctgccaattccaagtcatgaggggggtagttcaattcatgtttccgtaactgacgagaagcataagcaatcacatgcccttcctgcatgagcacacatcctaagccttggccacatgcatcgcaatagatatcaaatcctttctgtaggtctggcataaccaatactggtggcgacatcaacctcttctttagttggtcaaagctatcttggcacttctcgtcccacttaaactctcttcctttctccaaaagtgaagtcataggcttagcaatcttagaaaatccttcaataaatctccgataatatcctgctaatcccaagaaactccgaatctcagtaactgtagtgggcactctccactccttaatct

SEQ ID NO: 37668 - DNA, 423 bp, Zea Mays
gcgagcttggcacgacggggatggtggcgcacagtggcgacgacgggacggctcgggcaggggggtgatgggatggcacgacggggatggtggcgcacacagccgaggggggattttttttcttttttctttttctatttctatttcttatgtctatttctatttcttttatctccttttcttttgaacaaataattagctaaataatcttatgtgctaaaaaaatattctatgtgaggtgcttcttaatatcatagtgatgcatatgatgagatgtcctatgaggtggagtctagggagcaattaagggggggtaggagattagggtttcaaacttggggttaaattttgggatgttacaaacctaccccacttaaaggaatctcgccctcgagattcagactgggattgagaaaaggtaag

SEQ ID NO: 37669 - DNA, 328 bp, Zea Mays
cgggagttgggccgcttgggccgcgagggggggagaaaagcgcgggcgcgcgggagagagagagggggtttgggccgaaaacggcccagctgagggggattttttttctttttttatttttctatttctatttcttatttctatttctatttcttttatctccttttcttttgaacaaatatttagctaaataatcttaggtgctaaaaaatattacatgtgaggtgcttctaacaatcatagtgtatgcatatgatgagatgtcctatgaggtggagtctagggagcaattaaggggggttaggagattagggtttcaaaccttggg

SEQ ID NO: 37670 - DNA, 396 bp, Zea Mays
ggaggagcacgccatagacgaggctctgctgcaacaccccttacacttacacaccgaggaactcaggatgctcttgtccgtcgccgacaagtgcctccactctgatcccgccaacagaccaaccatggcgcaagttgtcaagatgctcgagcaacccaacaacacccaccaccactcatcgtcatcatcatcgccagcagcagcagtagaatcagtgcactgactgtactagcagcactcctccatctctccataatggggcatgtatatgatcgaccaacagatgaattaacacgtacgcgccatcgttgcaccatccatggcggatccaagatccattgtaaggggggctgggactaattatcttttcttttcctcttattcttcctttttttc

SEQ ID NO: 37671 - DNA, 1322 bp, Zea Mays
cggcggaagatcgccggcggcgcctggatctcgctcccgggagggaccccgtcggggaggagagatcctaggtggtgtctaggctcgggccggccgacctagactcctctaatcgacgtagagtcgaggagaggcggagaatttggggattggatagctaaacctaaactagactagaactactcctaagataaaatgcgaaatagaagttgtattgattcgattgatgatcataaatcggccgtatacctctctatttatagaggaggggggctggaccctttacaaactaatttccgagcttatcccatgattttagctaacaaccatagcacaaaactcggaaccctaatctgttctgcgcatgcgcggaccgtccggcccacaggcgcggaccgtccggaccgcggaccgtccggcctcagggccggacagtccgccggctcattttggtgtcaaacatatgcccccctgccttttggtggagctgagcgaaccaaaagcaactaactcgatgtgatcacatcagttttcttaggcatcttgacacttgctaggatgatacgtagtggccttagtcccgatggttgactcaatggacgtgactcttttagctttgatcgaactgtcagtcccaacaccgtcgagcatcatagcgatcctgaccaatccgtcaccttactttttctaattttccaagtgttctggcgtagcttcgtagtcgaccaggtcttccccttgtaggtcatcttcctccatgggtgtcggtacatcgttggtggtgtcttggtgtagtgcggatggttcggcctcaggggtcggatggtccgcgtcctgtatgattggtctggtctttatagccggactgtctgctatacctgcaaagagctgcacagttgctgttttattttctgtctttatggccgtttgattttcctcaacgacctttggtctccatctcttttgtggtggcggatactgcggatgtgtgtcattgaatattttttccgcctccttctcctgattctcctttgctctaaggcgttgtaattttcgcttttgcgatcgtgtcaatcccgatgggcaccatcggggcatggagtattttggatcggctattttattgacagtcgtactttcttttttgtttgtgttggccgattcaccaaaaatcatcggcccttcgttattttgttgtacgacgacatctgtcgttcctattttaatgacgtctcccttttcgtactgttggaggttgtagttgtatgccccctgccgaattagtcagcctttgggggccgaattgttcggcaatcttgctg

SEQ ID NO: 37672 - DNA, 994 bp, Zea Mays
cccatcttctccccaaaagcttggcgtcccgcatccactgtctttggtcccgcaaatttccgtgtcgcagattttcccccaatcgccgcagcgcgcgcacgtaggtgttcccgcgcatatatttttttgcctcgctcgacgtagctgctcgagcgacggtggaaggagccagcgagagaggtttgtgcggtggtggagcaggcggcaggagaggcttcaacgacgatggaggaggcgtctgtggcgtcgactagtggaagtgtgacatgccggtcgcacgctctggtgcttcgaatctgccggcaccttgcatcgtctgtaggattccacaaaggcagatggccacgatagcggcgatacaaacaacattactgaaagacaatgaagtggtatattttttaacggtgggaaaattggatactacaggcgttgttaacaatggagcctgaacctgcaccttgcaattgaatttagcacgtagcatttaagtgccgaatagtacgctgcccatatatctttagtttgttttcaaatctcggtaccaaagtggctatccacaatacacatgtaatgctggtggaagatccattaccgatgttcttagactttactgcaatgttaaaccaagctttcagtaggatctgttctcagacttcactgcaatgctaaaccaagctacatggctttattattggccaccgagagcatatgcccttattttcctcccctgtcagggacccctatggatttcccaattacttagtacttgtgacgtaatgttcttacacaattacttagtacttgtgactgaatgtgcttacatgtgcaggtactaggtgcttgcatctggaaagacagaaagtgccagtaggtgcttgaatctaggaagaaagtgtcacccccattcagtcctacccgattgtcggggaccataattaggggtaccctcaagactcctaattctcagctggtaacccccatcagcataaagctg

SEQ ID NO: 37673 - DNA, 1119 bp, Zea Mays
tcaccgagtcaccgcctcaccggtaagtcaccggctcacccgtcttcttccccttctggccttctacggtgcttcccagaactgctctgtgttggatccttggcttctcgtgctcgatccactccccagatccgctccccagatccgctccccagaactgttcttcggtaaggcgccggtaagtccccactccccagatccgctctgtgttggatccttggcttcccgtgctcgatccactcctcggttgcgcgactacggtgctccctgctctggttttcctaatcctacattcctacctaaccctaaatccttaatactccctgctctggtgctccactgctcctcaatcctcatcctctggtgttcctcatcctcatcctcggctggcgaccagtagccagaaggtgactcggtgctccgattgcgttaggtatgctgttgattgctccttaataaatctgttgattgatgttagtatgttgaggtcattctcattgtgtatgaactttgaatggaggtatcggtcttgttccggtgccgcgcagttgttgaggagccgtggtcgccatggaactggatccggccgctgaggatgatgcggaggaataccgacttgaggcacataacgaggagcaggatgcaagggcctttctcggcatcggcaacgatgatgctcctgttgctggtactggtgaaagtcgcctagaggggggtgaatagggcgaaactgaaatttacaaatataaacacaactacaagccgggttagcgttagtaataaagaaatgagtccgcgagagagggcgcaaaacaaatcccaagcgaataagaaagtgagacacggagatttgttttaccgaggttcggttcttgcaaacctactccccgttgaggaggccacaaaggccgggtctctttcaacccttccctctttcaaacgatccacggatcgagtgagctttctcttctcaatcacttggaacacaaagttcccacaaggaccaccacaagattggtgtctcttgcctcaatttacaagtgagtttgattgcaaagaatggatcaagaaagaagaaagcaatccaagcgcaagagctcgaaagaacacaagcaaatc

SEQ ID NO: 37674 - DNA, 1125 bp, Zea Mays
gtttcaccgaaatccaaaccttcgacttgggagtatcccttggccacaagtcgagctttgttccttgtcaccataccatgctcatcttgcttgttgcggaagacccatttggttcctacaacattttgattaggacgtggaactaaatgccatacctcattcctcgtgaagttgttgagctcctcttgcatcgccaccacccaatccgaatctaggagtgcttcctctaccctgtgtggctcaatagaggaaacaaacgagtaatgttcacaaaaatgggcaacacgagatcgagtagttacccccttatgaatgtcgccgaggatggtgtcgacggggtgatctcgttggattgcttggtggactcttgggtgtggcggtcgttgttcctcatcctccttgtctttatcatttgcatctcccccttgatcaatgccatcattttgaggtggctcatttgcttgatcttctttttcatcaacttgagcctcttcctcaatttgggttggtggagatgcttgcatggaggaggatggttgatcttgtgtacttggaggctcttcggattccttaggacacacatccccaatggacatgttccttagcgctatgcacggagcctcttcatcacctatctcaccaagatcaacttgctctacttgagagccgttagtctcatcaaacacaacgtcacatgagacttcaactagtccagtggacttgttaaagaccctatatgcccttgtgtttgagtcataaccaagtaaaaagccttctacagtcttaggagcaaatttagattttctacctctcttaacaagaataaagcatttgctaccaaagactctaaaatatgaaatgttgggctttttaccggttaggagttcatatgatgtcttcttgaggattcggtgtagatataaccggttgatggcgtagcaagcggtgttaaccgcctcggcccaaaaccgatccgaagttttgtactcatcaagcatggtccttgccatatccaatagagttctattcttcctctccactacaccattttgttgtggagtgtagggagaagagaactcatgcttgatgccttcctcctcaaggaagccttcgatttgagagttc

SEQ ID NO: 37675 - DNA, 485 bp, Zea Mays
ccagcaggcaccgctgggaatcagccgaactcgcagtacagtcacgcacaccgcccggccgtcccgccggcggcacggcgtgctctttggctcatccgcgttgttgcgccaccgccggggctgtggcagatttatcttccagtcactcggggagcgtaccctgcccgtcgtcgtctattttccactggcctgtgctccttgtctgtactagtcattttgctacagcgaactgcggttgtttcgaaagccgtggtgcaagcattcatatcgaattttcacccttccattggccaaaacttaccgcaaccactttttagccaggtggagctactgcgaacagaacgcatgcaggcactatatgatttcgtgaaaggtaaggccattctcaattgtaattttaggccttgtttggtagggctctggcttctctaaaaacgactccgactctagcttctcgataagggcagctcttcctaagaagtcag

SEQ ID NO: 37676 - DNA, 773 bp, Zea Mays
cctcgagcttaattcccagtcctacttatgccttctttctcgcttccagtcatgtcatcctcactgagtccgcctccccgctccactccgagccaggccccgtccacctcgcgttcggatccctcgattccgacctcggcgcgccacagttgtacgcgtgggggcgtcccgtgagcgtgagcctcctcccgatcgaggcccaacccatccccactgcgaagcagaaagctgagttctactggcccaaccacgcggcatggttgctcgccgcgatcgacgcgctcagcgacgcgaccaaggaggagctggccggtctgatccgcctcttccacgcggttggcgctgctggtgtgcaggctctatggggtctggatgtcccctgcggcttacgcgtcgccactgtggatggtctctgaacgacagttatgtacgattttccaattgttggaagtggagattatcagtagggagaagacgatggtgcagaccagattctttgtaatggaggcatgtgaagtgatcatggggttgcacagcgaggggctggtgttggggtgcctcggaccctcggtctggactgtttctgcctcgttcgctttggagtttggacactgtctgcttgatttcaatcaggcgatggccttgtactggaatgtgttttcataatgattgctcatatttccttgtgtcattgtgccttttgcttttatatctaatacaaataacagttatgcccattttttggcttccatatattttttactaagtttgtt

SEQ ID NO: 37677 - DNA, 50 bp, Zea Mays
acgtactctagcttggtactaaaactaagagctgattaattgagtgaaag

SEQ ID NO: 37678 - DNA, 472 bp, Zea Mays
gtggtttctacctgcgaggtgtggtagctaggagtgttgtacgttgtatacgtgctgcacctttgtaataagaaggttgtgaaatcaagtggtggtaaaacaatattcttatgtggttaaacagtttgatattattttacttgctgagatgtgtcatctcactcttgcattactcaatgcaggtacttgatacatgttgggaatgaggggagtagcagcacgtccactttcactctcataatagcgctgcccaggcgtagccatgatttaattagaaacttgttgtcaaaagaagtttatttttttgctagtcgtgcgcactggttaattcagttcatgtcgtatgtttaacttccctttgctagacgattaataatacttggtatgtttttgtcatgttatatgtttatacactgttgtcccccccccatttatgcaattttgcaaaggagatgctgccaaaattttatat

SEQ ID NO: 37679 - DNA, 486 bp, Zea Mays
agtaacgtgtgcatatacattggtggagctaggccgtaacggaagcctcgacaccatccattgtcatcgcgccttcagctacaccactaattgcttgaaaacctcagcaacacggtcgaacaactcacgagtgcgaacttggtgatcgtggcatttgaggagatagcgtcccagtgctacatttcgtcgaacaccatgtatgcgtcctcaagagatcgtacacgaattgagcgtgagcagcactgcagcctgccggtaagtgtagtgtttggggaagtaggtagacccacagccacatggaggcgaagaggacgagcacatcacggtggaaagaggcggcgacgagcgcgtgaatcaataggttgaagcagcagacagtggtgttacagcacttgcgctgctgtcatcgagtcactttggtggtgtggacgcggatctcgtgtcaattcctatgtcatcctccgcgctcacgtgtggatgcaggtg

SEQ ID NO: 37680 - DNA, 495 bp, Zea Mays
cgcctctcttctttatttgatgatcatgacattgaccaatgctggaaaatttcatagaaacagtactgccacggtatccatgtcctcacgagggcgtacttggaagcaaatgatttgaatagtaagtaattctagccccttaatctccttcaattctcttgcttcaaaacaagtcacggatggatattggtatttgaaaactgaaaagtgttcgagaaaaggaggtgaaattcacgaatactactactagctgactaatggaggtgtgtgtgtgtgtgtgtgtgtttttttttttttttttgaaagagggacgcctcggatgtcggatagtggtggtcaatccagtgcggtgcggtgcagggatggggaattttgtcgccgggacatgagaccaacaacagcagcagctccttgaatagagtgatggagcctgggctaagctgtgctgtgcagcctgtaggagtacatcagccaccaaaaaaaaagattcccgag

SEQ ID NO: 37681 - DNA, 177 bp, Zea Mays
accatttcaaaagcatcaactggccgtttactcttgagcccagcatatttggaggaatccaagttatctcattaacattactctggactctggactcccatgatatagaagttacaggaaatcatcaatgctctgctgttttcctggatccacactacttttcttgttcaatctgaa

SEQ ID NO: 37682 - DNA, 210 bp, Zea Mays
acatccctggtgatgatgatatcaacgacctcatcgacggatacgcgtaatcaaaatagctattttcttgaagtcgatggaggcagaggctgatcgagttgggagcagtggcggcgtagtgctggggcaatggtgactgctagataggatggtcgacggcgattgcaggctctgggcgtggtgtctgtgtctctctcctacatgtacgct

SEQ ID NO: 37683 - DNA, 528 bp, Zea Mays
ctctatttagttgatttttcgaagaaggaagccgatctagatgcatgcttaatcgctaagactagcatgggctggctgtggcatcgtcgtctagcacatgtggggatgaagaaccttcacaaacttctaaagggagaacatgtgttaggtctaacaaatgtaactttcgaaaaagatagaccttgtacagcttgtcaagcaggtaaacaggtgggaagttcttatcatagcaaaaatgtgatgaccacatcaagatctttggagctacttcacatggacctcttcggacccgtcgccttcctcaacattgggggaagtaagtatggtcttgttattgttgatgatttttcccgcttcacttggatattctttttgcaggataaaacagaaacccaagggaccctaaagcgcttcctaaggagagctcaaaacgaatttgagctcaaggtgaaaaagataaggagcgacaacgggtccgagttcaagaatctacaagtggaggagtaccttgaggaggaaggaatcaag

SEQ ID NO: 37684 - DNA, 399 bp, Zea Mays
ctcagctccgcgcttgtccgtttgccaacccagatcttttcgtatgctgctcctcacagaacaagccgttggcatggacggagcgctggatccagctgaaaatcctcgtccggagacgtggacagagacctaacttgggcgaggaagacagatggcgacgacatagacgaccattcagcgcgtgtgcgactcattccctctgcgtacaacgtacgtactcacagtttgattttttttttgttttgattttttttgttagagtcgacgtggtggccagcaatttagcagatactactgttgagaaaccctaaaaggggtttaatgggctaataccgaaactgcccctacgggtacacaggttatatatatgtacccatacccatcataataaagatagac

SEQ ID NO: 37685 - DNA, 295 bp, Zea Mays
tagcaaatggagatgctgagatccaaccatatgattcatctgtatgttattcccatccgcaggtaagaacaaacggacaggcgacagcattatcatcatatacatattcttcatttatttcattaattagacaatggagattcttggcttcatcagaatatcagatttattatatcgatcatactgtgggcgtcgatcctagaaggctatgacctaataactagaagctatagatgccagggggacgatgtgtattcttggaatatgatatcttttctctgacgcaatgcaaaaa

SEQ ID NO: 37686 - DNA, 230 bp, Zea Mays
gtgccgtacgtatgcatgtgtggagcggtagtagtagcagtaaaagccactggtttttttttttttttttttgcatggatggaccccggagctagcagcagcctagcaaggtagcggtgcatcgtgagttcgtgacacgcatagacacagtggacagtgtgcttccatacctgccggacgcagtgtttccgaccgagctcgttgtggaggcggtagcggacgcactggtg

SEQ ID NO: 37687 - DNA, 646 bp, Zea Mays
ctcatttgcaccacgggttttgtttttgtaaatcctttgtaaaattcttttcaaaaaccttttgcaaatggtcaaaggcatttgaataagattgaaagaagcattttcaagatttgaaattttctccccctgtctcaaatgcttttcctttgacataaacaaaactcccccttaatgaaattctcctcttagtgttcaagagggttttataaatttttgaagataccccccctttttgaacataataagatactaatttgaaaacttcattttgaaaatccggtggtggtgtggtccttttgctttaggctaatactctctccccctttggcatgaatcgccaaaaacggatactttgagtgaaatataagccctttggaaattctccccctttggcaaattagataggagtgaatattataccaaatttggagagcgttgcggagcgatggcgaaggatgagtaattcgatggagtggattggaagcctttgtcttcgccgaagactccatttccctttcaatctatgacttagcatgaaatacacttgaagaacacattagtcatagcacatgaaagagatatgatcaaatgtacataaataggttatgtgtgcaaaatatcaatcaaaattcctagaatcaag

SEQ ID NO: 37688 - DNA, 716 bp, Zea Mays
cacgaacgcaagcgaattttaatgagcaattgagcataacatggactcatcagtcatagtaaatggacttgattgagatgggaaacaacatgctagtgaccacaatcacgtcccagcacataatgtggatcacacaccagcaaggactattacgctcgaggtcacacacgacctgtgtcatacgcatcaaacaactccaggatcagtgagataggtcacaggattgattcagccgatttggtatcctactttcaccgcaaaagctcgagaacacctccttgggtgtgcagaaagttgttcagtctgtctgtctgtgcgctaacgtcggtaaggccatcataataaaaaaaatccaaatcgtacgagacacgagtagttagagaaataaaaattcacaataaaatattgtctatctatcattttctcatatttttaaacttttatagataatttagaaggggtctgtttgtttcatcttttttccgacgagtttttcgtgctgtggcgagaatctaggctgaggggagaatccacgcgatttggggcatcacaatcgcggactaccctcctcgtccatgcgcaatagattgtgtggtggcttgccataatttgaaatgcactgtccatatttatagaaatgcgatgaaattaaatgccgtattctacattttctcatgcctttttattatttgaactcttttagttcgagtttgttc

SEQ ID NO: 37689 - DNA, 512 bp, Zea Mays
ttatctcgcaccggggtgctcgtagtaggggttacaagcgtcgagagagagcgagggcgagagtgagagagagagagagagtccctgcgtgcgtccgtctctgcctgtctcgtctgccccgcctccctctatgtcaacgtgtgtccacgtgaacgtctgcccacttgaacgtatctcgacgtgaacgtgaacgtgaacttattgtctctctgtccacgtgccttaggaaggccctggacatccccttttatagatacaaggagatgcccagctgtacaatggggtatagctatatatgtgctaacgtggctggcggagaagcgccttgagccctgtacgcgagctaacgtggccgtcggagaagtgccttgagccatgtagaagcacagctgtcggcggcatggatcctgctgacgttgtcttgcttccgtagggggcttgagagcaaccgacgtcatggatgcatgcggggaaccatcattacctgttaccggagtaaccttagatgggac

SEQ ID NO: 37690 - DNA, 1169 bp, Zea Mays
aaaatatcgcaagggtcaaaggcgataatagatgagggtataagagaaaagatgaaggcatagaagaatcagtggtataagtacaataaagaatggaggtatgtcaaggcttacacgcgataaagaagaggatgttgccaaggataagataagtaaaacatcgttctcaaattgggataggagattggagattttagataacagaaataatgtcatcaccaaggtatggtcgagagatgggaaaggtcaaggcaacgctaaatagaggcacaacaaaggatggagttgaagactcacaagcgacgaggaagatgatacgaccaagggaaaagtaggtaaagtacaacgctcagattgagatggaaaagaggagattttaaagggccaatataagataaacgtcaaggtaagatatagaggtgataagggtaaaggtgataacgatgaaaagcataaccatggatagagttaaggctagactgacgaagtggagaaaacaagcaagggtaagataggtaaggttccaacaagatggttgaagtaaccgaaattattaccaagggaagttataaggaagcgatgagattctcaagggcgtgtgaaatataatggtcgctcatggatcatcaagaaataagggtggtcaaaagcatgttaaccggaatgtcttaaacatgcattgggatattaaggtaagcatatataaaaataagaatatggaagattccaaggatacgtgcataccaagataagggaataaaaaaaccgaaggatgacgacgtagcagtagaataggaagggatctcggaagacaagaaggtcatggacatatagactggagtgtttaagtaggcgagagaaattcaggtgtaagtatctgaaacaagagtattgaagaatattaaagaatctaggggtacgagcatgtcaatatcaagggaatagtgatggtcaaatataagcaatttaatgacgaaagagaaaagaattccaaaagacaagaaggttatggtcagggggcatctacaaagatgtcgcaagcacaagagtgagatcagatctaatagattgagagaagtataaaccatactagaataaaatacttttggcaaggaagcatataagagcacaacatagaattagtcgagatgactaatattttgaagcag

SEQ ID NO: 37691 - DNA, 454 bp, Zea Mays
gaaagaaaaaaaagactggtgaaaagattcaacttcgcgaagaattaaggcggcaagctcttgctttggcttatgtatgccatgctgccatgcacttcaaataaggctgtttatttataaagaggcagtggtggtacgatatgtttttttttggttgatttatacagtaagtacccaatgttttgaagtcattgcattgcattgggcgcccgatgttctagtgctttaacgaaagaaatgcaggcaagtttgcccacgcttcagtgccaccgcttccatccggcaacaggcaacaggcaacagccagtggggggtgttggtcgatctctgtggccgtccgctgatgctggtagttgactgcctccatccgcgtgacgacggataagatgacggtgcctaggcaagatagacgagctgaaacgctggcccaacccaaaatcgtatgggtagtatg

SEQ ID NO: 37692 - DNA, 203 bp, Zea Mays
gtggtttagaacgaatggggggctagattaataacgcagcagtgcaccccactgactaaggatatgatcatcccgcccaacgaatgatcgatcatcccgtcggctacagcgggggaagcacgcagtcaatacccgtggtcggcagcccgcagcccgcagccagcagcccccgcagaccgcagaccgcgcagcagtacctccag

SEQ ID NO: 37693 - DNA, 1803 bp, Zea Mays
tatagagataaatgtcacaatataatcagagtacttattacatagcagaagtcttacaaaataaaagataaatataaagcgaactaagtccattcttggcgccataaagtcgactgggagacgccacctagatcaaatcgaactccttgttgtgtggctcctcttgaaccacatgttcttctcctttgggggggtgtgagacagcaagggtgagctcacatacgttcatagctcaacaagttgtggggaataatgtgcataaactcgctaaaggtgagagctcatgtgaagtgtaaggcttatcaaagagaatggttacagttgagcattgcttttaaagttggtcaaaattttattagcaattactaagtaggagtagataccaaaccataatgataaataaacaaaattaataacaaatcccatgcaatgcaaatggcaaattgaatttagttccatgatttaatcatgcgagagtcctaagctgcttttgaccatgagctcgtctagtataccagttttacactctgcagaggttataccatgtacccacaagtcgtgtatcccatgtcaccagggtttgcaaggcccttagacactaccgaggtgaatggctagggatccactacgaggcctttacaaagttccactagcttccgaaaacccgctacagtttatgggaagagcatttgtaagaatccctcgtctgatcggcatcacagcaaaatcaacccgagaacctccctacatgcaactcccctgctgcccttgcccctttcgggtaaggtagtcttccactagctttcctaattagtcagccaagggcgtcccattccacccttatggtggcacgtgtttctcaagttaagctccatgttctaattaaagataatgatgatcttgacatgaacataaataaaataacaggataattggaacatggatataatgaaatattaaccaaaaaccatataaagcaatagtaaaactacccaagtgattcaggggtaaataaggtaaaagataatcaaactagagtgatctattgggcccatcaaaattaaacctatgcatgaataagtgataataaagagcattattgggtaaatgaaagtgatcaagggcacaacttgcctgggacttgagattccaggtaccaggatgatcctcagattctcatgatctcactgctaatcgtagcaatacaaacaaacatggtatagacaaaattaacatcacatcaaacataagtacaaattgaataataataatctacgcattgctacgagatcgcgggatcgagaactactaagatcggagtcagggttacgaagttatgatttatggaagatctacgtgatttaattattacactatattataaattggttagtgtaaatcatatgagagattactctatgaataattattctcaactttagttttaattataacttgactagagttcattataattatggacaagttaaatttgatttagaagaggtaatctagtagacataggatgagtaaatataaaagtatgtgatatggtataattaatattgttactgtatagtaaatatttatacgaagctaacgcaactggaatgagccaattcggaattaaaacagagaagttatgaatttccgaagttcgtatgtgcttgctacaaaattaattgtgtgataaattttttaatatggttttcatgctagaacagtgttactcagtgatagacaatattactaccaaattataggagctataatggactaaaaaggagctaatatgaattttct

SEQ ID NO: 37694 - DNA, 386 bp, Zea Mays
gaaaaggggaaagagtgtttcttggaggtaagaggtgttttcttgttaaggcaacttttaaggtcagggctgtggtctacggccagtcctataggctccgataccacctgaagcgtcccgatcctttgggactcaaatgtgatataattactagtcccaggaggctagtaaccacattcattacttcaaatagttacagagtctgaataatgttattacaataccggggatacaagctcgaaagtgagccgaaaaacataatgcgcagaggaagataaaatagcccaagccacaggcagaactgggtgaagacacagccccatcaatcaagcatagcagaaaagaagtcttcagctgctgaaaaacataaatgaatctgggtgaat

SEQ ID NO: 37695 - DNA, 53 bp, Zea Mays
ttgggtgaggaggcgagatttgcgggagggggagggcgaaagcggagggccgc

SEQ ID NO: 37696 - DNA, 741 bp, Zea Mays
gttatgtggtgtaagtcataaggctcaagaacaagctctaagaaggagatcaaggtcactagaaggagaacaagtgtcaaaaccaggactggaagcagcccaaaagagctaagttcatcttgatctttagtttgggttgttcctatgtttggaaatgttctatgtgacctttgcaggatgttggagctaagaaatgtcaatccagatcaagtcaagccgacttgatgatttatgaatccaacatcaaagctcaagcatgtgaaatgctatggacgtaataattaagtgaaggtatgtttctagacttggtacattggttttagtgtactaatatacttgtctaagtgatagaaacagaaagaagaagaaaaggaacgaggtgcaaaggcttggctgtgtacagtcaaggttctgctcagtctgagtgcaccggactgtccggtggtgcaccggacagtgtccggtggtgcaccggacagtgtccggtgcgccaggctaactctggtgaaaaggccgctctcgggaattcgtcggtgacgttcggctataattcaccggactgtccggtgtgcaccggactgtccggtgaaccaacggtcggccgggccaacggtcgaccgcgcgatctgcgcgggacacgtggctgaaccaacggctagatggaggcaccggactgtccggtgtgcaccggacatgtccggtgcgccaacggctccaagactgccaacggtcggtttcgcc

SEQ ID NO: 37697 - DNA, 183 bp, Zea Mays
cctcactcacgttttgctttgctttccagcccacacaaccccgctgaacttgtgccgctccgctccgcatcaaccggccaacttttctggattttagtccatcagcactaggatatcgttcgccttacagctagctggactctttgaatcaggtacccaaaaaaacatcagactgactgtccc

SEQ ID NO: 37698 - DNA, 71 bp, Zea Mays
tgcacctgcaatgcaacgatcggtccctctcgagcagtagacgcccggttccttgtactttggcaccccca

SEQ ID NO: 37699 - DNA, 288 bp, Zea Mays
ccgacttgatgactccccctcccagagaatctgttcaggaggcatgcatgcatgcatgcagcagagacagagatgctctcgatccgttactatttcttttttttttttttgtcacagcgaaaaaccggccggcgacgcggacgcagctgtggcctcggttcgcgagcggtcgaggtgaccaaagcggaaggggccggtggtggcaggaatatagtacggagtactacctactggctactgggtctcggagcaggtacgatcggtcgatccgcagccgtccaatcgggg

SEQ ID NO: 37700 - DNA, 456 bp, Zea Mays
gggacttttaggccaatagaaatgtggcgaacttaattaatgcgctaatcatttctctaattcccttatggtgccaggtcaaaggacaagcctgataaagtggtaagagttgtctcactgaatcatcatgttgcgggttcgaaaaaacctctctgtatttagggaaatgcttgtcttggtttatcaccattctctagactccattaataggaatctcgtgcattgaatgtatctttttttattgtgtcaggttccaccggtacaagggcattatcaccttgatcatataacataaataggatgataaaagataggtcagattgaaactgtacttgctgtagtctgacatgggcaggctaatggaacagagaagccatttagcaagaacagtccagatatgactaatataagtacgcagaaggtatatgaagcagatatatctatctgaagcctgac

SEQ ID NO: 37701 - DNA, 194 bp, Zea Mays
aataacagagtgtatagagataaatgtcataaaacatcagagtatttattacatagcggaagacttattacaaagtaaaagaataaatgtaaaacgaactaaggatcgtcggcgccaatgtcgactgagaaacaccacctagatcaagtcgaatgcctcagtgttaggcggctcctcttcgaccacctgttctt

SEQ ID NO: 37702 - DNA, 180 bp, Zea Mays
aggagccgcctaacactgaggcattcgacttgatctaggtggcgtttctcagtcgacattggcgccgacgatccttagttcgttttacatttattcttttactttgtaataagtcttccgctatgtaataaatactctgatgttttatgacatttatctctatacactctgttattatat

SEQ ID NO: 37703 - DNA, 1002 bp, Zea Mays
acaggagttgcgccaaagagcgagaggagatacgccaggaaaggagggcacaacaacagcagctgcaacaacaaatgcaacagcaacaacagcagcagcagcaacaacaagtaccactgcctccaccaccaccaccagttccaccccgagacaagcatagagagttcatgagtcataagccacctacatttgcaagctcacctgatccactggacgcggatgattggctgaagtctattgagaagatgctgaatattgcacagtgcacggaccgggagaaagttctttatgcctcaggtcgtctgacaggtcctgctgctgactggtgggattcttatactgctgcccacgatgctgctgatactattacttgggcggagttcagtacacagttcaggaactaccatattccagctggtatgataaagatcaagaagaaggagtttctgtcattgaagcaaggcaacatgtcggtcagcgagtacagagacaaatttattcagctgtcgaggtatgctccggaggaagttgctgaggatgaaagaaagcaggagcactttattgaaggacttaatggacccttgcagtatgcactggttgcacacacctttccatcatttcagagactactggataaggctcttgctattgaacacaagcgtgttcaactgagtgatttgaagaggaaggctatctcacagggacagggtagcagcagtgttcgtccccgctacgtaccgccacagggtacaccgactcgaccaggaggaccacgcccagttcagtatgctccacagggctctccacggacacctactcgtcaggccactccgactggcaccccgacgaggtctacaggacagaagactagccctacatgtttcaagtgcagtcaaattgggcattatgctaatgcttgcccgatggggaattctggtacaccagctaagaacaagcaatagacccctggcaagggatattctatagccagggtgaatcaag

SEQ ID NO: 37704 - DNA, 281 bp, Zea Mays
aacacaatagtgtacattataataaaataattcccactcatcaagatagtttaaacatcatgttcaaatacacaccaaagttcatataaacataagtagatcatcaagtttgtttgtgtcatatcatatacttagttaagaagaggtttgtaagataacacatcgctgatgtagaacaattaccgttaactactagtgcactctcctttgcttcacaagtatcttttttggaaacactttcttctaggatccttttgtagtacatgtttgtccaacttaat

SEQ ID NO: 37705 - DNA, 2383 bp, Zea Mays
cttctctccatagttttcattataaaaatccaaaaatgatcaaacttgttttgttagttagatgttgtcatactccatctaagaaaaatataaaacttatatgttgttcactgttttcttggtgtgttaattaaaacaagttaaatagagaaaagaagatgtatttgcttgttatttttggatctgtagctctagtgctccaaatgggttgagatttttacagtagactcttggtgtgatgtttggtgacgggtaaaaatttcatgaattgttgtgcatgtatgattaggttagtgatttaacttgtttaatgcaccttaagtagttttaaatgatttaaaaataatgtatagatgcaaaaatgaaaaatggcgttccgctgttcttgcatgatactatagtagcctgagaaaacttaatatggttatgcatccacagaaaataattagttttagatttaacttgctctcacaagctttattgcattaacaatttgttatttttgtattaaataaaatagaaaacctgcgcatgtgaaatttatacattggtcatgatttgttattacctatgtctcaaaaaaaaaatctcagccccaaattagatagtttcatatggtgctaaaatgacacacgttttataataataggaagaattagagacaaattagaagtaagcaaaccatgcatgttggaatggtttatgtcatgcaataagaattgaaatgtgaagaatggatagggtatttaagaaatgttagccaataggttcggtcaagcatggtagaggttgaatcaattatgttgtagaattgatgctcaacataatagaccccctaaaatgtgctattttaggtgacttgtgtgctaaccaatttaagttgagcaatggttaagaaaagatgattaatctgctccaacccatgtttttgagttacaatgtctaaaatggtttgctaagtttatattgtgttagccaaatcatgttaagtaggagtcgattgcgttaagtgattgttatatacatattgtgtctcggattgtgatgataatgggttagtcaacttgttagatgacttgattaagctcataatcacggtaaattgcttgttgtggtctaaatgtgtatggttacagtcgcgggtaaaaaatagtagtgctcatgtgatgtctaatttaaaacgcaaattgttgggtgattatcgtggagaatgtgttgttagttggttgtagtaattttagtgcactaaatgacttgaataaaatttgcaagtcgacttgttggttctaattgattgtcgtaactcgaataaatagtaaagcgttagagtaattcaagtctctcgaacgccgcgattcttgaattatataggagctaaaatttattgattgctgttttggactgcacgcactgttgtagttgtgttgtatgcttgatgaactaaattgtgttttctgtagatatgtgctatagaaaagtggtagataactttattatcttgctggtgttaaaatttgacagccataggtctgacagtttaggagttatgttgttcacaaattcagtaactgaatctgtccaaattctatacagattttagaaactgcattgtttgctcaatttaatgttgcaatctgttcatggtcgttataagaaagttgtagttgcttttctgatcttgcttgtgttaaaatttcacaaccacatgcctgatagtttaagagttatgaattttacaaactgcttgctgtgttctgtccaccgtcaggacagatttcgaaaactgtgttgtttgatttagttaaacattgaatcacttcttggtgattataaaagttatgtggtgcaattgccaagctttccaaaaagtcttggatcactatttttggtggtctgaagattaagttatggatgtttaaagtctgaagactgaatctgtccagttctggacagcacagccttcatagtgtatttcaccctagatacatgttaaaccagccagtgatgtttataaataatttgtagaacatttaattagctttccagaaagtctaaaatcactttgtttggatgtctgaatcttcagttgtgaatttttgaagttgcaagcctgaatctgtccaaatctggacagagctgttgtgtttgcacaattcgaccttgctaagtgtttaatcaggttgtgatgacaataccaaagttgtagagcactttttaagctttccagaaagtcctagcttgatatttttggactaacaattgaagagttatgattaaaacaagcaactgctgtattgctgtccaaaaattctgctagtgctcatttgattgttagttcacccgtttggctaaaaatgtttggttagcacttaaataaatgtag

SEQ ID NO: 37706 - DNA, 1617 bp, Zea Mays
cccagctgctcgccgcgtcaccgaccgcaactccgacccgagccgagaacggacgccaggaagtccgcccgcgcgacgaccgtgccatgaagccgagccttccgttcctctgcgttaaggaattttactgcgtccgttaatccctccccattactctccatgaaagaaaccggcgaccattcatggccgccatgaagcataccggcgacctctgctctccctccctctctctataaaaccccaaccgagccctctccttctgcctgcccaagcctcttcccttcttctctctcgcaacgccgcctcaccagaacagtatgccgtcgaccgcgcagctcgccccaagccaccagacgttcgctcccgtgccacgcggccaggccagcgtggtcgagttctgttgccagagctcgcccgcgcagcaccccgtcgaccacgcccatgccgccgctctgctcacgcgcacccgctgttgagccctgctcgcgtcgtgcccagctcgctgtcgtgaagctcgtcgccggaccgtccgcatccgtacgccgttcgccatccctggagcctcgccggagttcgtactcaccgttcgcgtccctcggccggagctccgtccgaacgctcaccaacgatcgcgtcgttccctgcccgtcgaaccccgctcgtcgatgttcatccctgcgcatgaacgaaatcacaaggttgaagacaatcctgaaatatttattttctaaatcatgttttgaatttattgtgaattactgttgtaatattgagatgatgcgatttggcgaatcacgtggatgattttagagatgcgatatatacgtgtagccacacgtttagccaaaatcgaaccccgcgacaatactttgaagatacgtatgatttataatttaaaaaacatgaacacagtcactattcgctactttagtgattttcatactagaaatgtttacggatttgttttcacttttgtgggtggagcgataattgttagtagtatgttaagtataaacttatttgcataaagaaatagaagaaatactaggccacgtattttcggtcaaataaggatatagtttactattcataataaatgaattcataagtatggcacttaagtacttagaattagtatgatatttatttatgtcataataaccatgaataggttattaaaagtcccatttagcaatttacaattaattcttagtatattaatgttagaagaattaaataaacaatttttagttatatgtataaattctatttagaaaagaaaggagaaaactgaaatagtagaatttataatagtgttaaaatgacttaactaggcacttatactttcctaataaagaaaatgataatatgttgataaatataggtttcttactaaagaagtagagaatttgtttctaactgtaaaatgacctttttaaaagatatcatatttaacaaggttcgttataaatgtttaagtataaccgtattaaatagaagcttaaaagaatatataaatcgtttgttttttactagaagataaatatatgtcccattaataaattatttcttaattaaaagataactaaggtcattgcttttataaactaaaataat

SEQ ID NO: 37707 - DNA, 105 bp, Zea Mays
atcccttcctcccacctctgcacatctccatcggcgcccgcgcctgcgctcgcgtcgccgtggccgagccccgcgacggcagcgtcgagctcggcgtgtaggagg

SEQ ID NO: 37708 - DNA, 117 bp, Zea Mays
gtctggcttgacaccttttgcttttatttccctaaataacatgcttattttctccctgtcatgcagtttctgagctgcatatgcaattacagtaaaaccgataagatcaagcttgac

SEQ ID NO: 37709 - DNA, 345 bp, Zea Mays
ttcggtacgtaacttcatcaacgacattcctctccccaccatattgttcttcacctccactgcctcaagaacacgattgtttctgcagagaccatacatcaacacattgtatggcacaacactgcccttaacaccctcactttccatcctcgccaacaatctccttgcgccatccaaattccttatctcacagtaggcccaaatttcggccgtgtaaacatactcgtccaagtgaatttatattgaagcatttcatcgaacaggtcgcgagcaagagcaaattaccggatcttaatgagagcaaaaagtatctgcaaagcggtgtattgcttcatcgcaatgccg

SEQ ID NO: 37710 - DNA, 4415 bp, Zea Mays
ctaatcttgtgtataggatggatcaatgaatatatgtggttggtagggcttgagtaagtcaactagatgacttggaatgttgcttgggctcccactccttgaagtggccggttggggtggtatttatagccaccatccaaaaactagccgttggtgaagtctgctgtcgaagggcgcaccggacagtccggtgcgccaccggacagtgtccggtgcgccgccacgtcatcttcccgttaggtcttggagcttgtcgaccgttgggggctttgtcctcatgtggcaccggacagtccggtgcgacaccggacagtccggtgcccctctgaccgtctgctctgacatctgatttgcactgtacactttgcatagtcgaccgttgcacgtagatagtcgttgctccgctggtacaccggacagtccggtgaattatagcggagcggcgcctgggaaacctgaaggtgaagagttcgagctgaagcaccctggtgcaccggacactgtccggtggcacaccggacagtccggtccgccagaccagggagcacttcggtttccttcttgctcctttctcttgagacctaacttgttcttttgattgatttgtgttgaaccttttgcacctgtagaatataatcttgaacaaactagttagtctaattatttgtgttgggcaattcaaccaccaaaatcaaataggaaaaaggtttgaccctatttccctttcaatctccccctttttggtgattgatgccaacacaaaccaaagcaaatatataagtgcataattgaactagtttacataatatatgtgcaaaggttgcttggaattaaaccaatctatatttcataagatatgcatggattgtttccttttcattttcaacattttggaccacgcttgcaccacatgttttgtttttgtaaattctttttgtaaatcctttttcaaaatccttttgcaaatagtcaaaggtaaatgaataagattttgagaagcatttataagatttgaaaatttctccccttgtttcaaatgtctttcctttgactaaaacaaaactccccctcaataaattcacctcttagtgttcaagagggttttaagatatcaattttgaaaatactactttctccccctttagaacacaaagagataccaatttgaaacttactaattgaaaatcattaattttaaaattagggtggtggtggtggtgcggtccttttgctttgggctaatactttctccccctttggcatgaatcgccaaaaacggatgcttagagtgatatataagcccttttctttctctcctttggcaaataaaacatacgagtgaagattataccaaagtggagaactatgcggaataccgacaaagagtggataataccgatggagttgagtggaagcgtcgtctttgccgaatatttcatttccctttcaattctatgactaagcatgagaatacacttgaaaatccattagtcatagacataaaggagatatgatcaaaaggatatatcaaattaagcatgatcatagttctatacaacatagattgctccccctaaatatgtgcatggagaggaagaacacatattttggcctaaaatgccaattgcacataattaggttaatgagaacatatctatatcatacagaaggtgaagtgcattgtgtcatagaataagtgtgatgctcatgacagtttatgcacttatgaaagcatgttgtaaacattttgagcattttcccttaaggttttcaaagaggcttaaggaccatccaccttttgaacaaaggtagcttatcctcgttacaaggttaagctttaagctctttgacaaataaatcacttcatctagtttcaacaaggatacattaaagcatgaatgaatttttgagaagttaaactagatatgaagcagggataatgcatggacatgctttctcttccttctacacaagatatgcaaggaatgtatacaaaaggaagatttaggtacatatgtaaatgaatggaagtagttttaccgttttgtaccttcacatagagacgctcccttcattgtgccttgtctttggttttagatgcttaagacctatactcaatgacaatatacggaaatattttgcacaatagagagttctacaactagtgatccttttctaagtcatgattagcatatattaagtggatcacaaattgcatagatgaatcatgaattctctttttaacttagtgcatatcaagagatattgattgatagaatatgcggcactaagaggcatgattgttaaaagaagtcattcaatgatcaaacaaataacagatgtgatcaagagaacaacatacacaataaattatcaattaagcttagagtaggagaatccagcacatatgctactttagagtgaaagataataattggaaaatagtagcatacttcatgagaaactcattctcatgcatgagactatatgaaattactaagataaagtaatagtctcaacataatcaagatatagaaagagactccccctagagatatgcatcaagaatttgaatgagatgaatagatgcatttaatttagagatgtgcagggagaagcattatacatcttgatcaaggcttataaaattttgcagtaaacaacttaagcctaacattcacattatgaaaggatttagaatactcaacaaccacaccatagattgttttgtagatcttactatccaagtagggtggtgttgttcttgatatcctcctctttcatttgagagtcctccctttgtagttgtttcttttttttttctttcaaacttattgaaaatactcaagaaagatgttagtaatacaagggagtatataatgagggatgatttcttttagatagaaaataagcacaattcatcatccataagtcacatagacaagaagtaaaatccttaacattagtgcatttcatttgagaaatatgagtgagcaccttttaagcattttaataatcattggatattttactttatcacattgaatttagttaatcattacttggaagcaaatcaatatgataacaaatatagcaaaggcatgaaatagattctaatggataagtgcattgatgagaatgagattgaatgcacatcttagtcaatttaaatttgataaagaatctatttcttcacagagatataatcagagtacaaatttaaagtttcgaaggcctagtccccattgaggagtccacttaaggacaggtctttttcaaccctttccctctctcccccgatcacacaaggatcagtgagctcttcttcttctcaaggatcactctcgatcccacaaggatcaccacactctttggtgtctcttgctagcttttacaagcctccaaaactttggaggaagtttgatgggagtcaatactccgcacacaaatgaacacgaagatgtagaacacactatctctcaatgaatctcacaaggcgctagggctaaactcaattgagtagctctcaattgcttgctctctcttttgtggcacttgtgttggttgtagtggtctaaatcttgtgtataggatggatcaatgaatatgtgtggttgagagagcttgagtaagtcaactagatgacttggaatgttgcttgggctcccactccttgaagtggccggttggggtggtatttatagccaccatccaaaaactagctgttggtgaagtctgctggcaaagggcgcaccggacagtccggtgcgccaccggacagtgtccggtgcgccgccacgtcatcttcccgttagttcttggagcttgtcgaccgttgggggctttgtcctcatgtggcaccggacagtccggtgcgacaccggacagtccggcgcccctctgaccgtctgctctgacatctgatttgcactgtacactttgcagagtcgaccgttgcacgtagatagccgttgctccgctggtaaccgggcatgtccggtgaattatagcggagcggcgcctgggaaacctgaaggtgaagagttcgagctgaagcaccctggtgcaccggacactgtccggtggcacaccggacagtccggtccgccagaccagggagcacttcggtttccttcttgctcctttctcttgagacctaacttgttctttttgattgatttgtgttgaaccttttgcacctgtagaatataatcttaaacagactagttagtctaattatttgtgttgggcaattcaaccaccaaaatcaaataggaaaaaggtttgaccctatttccctttcagagcgtccagcctccccaccgtgctcgctatccgtctgaggaggtcgtcggtggagagggggctcggggacatccgtgaaccctccaaattgacccccggcttcatttctg

SEQ ID NO: 37711 - DNA, 1558 bp, Zea Mays
cgacaaactaacttaaaaactcggagcctgaccatgcacccgggctgcggccaggccgcatgagggaacaacaaggccgaccgaggaatcacaagaagaattaagacctcagaggagtcaaaccactcctccgaggcctcgggggctacacccggtgggtgcgctcgcgcgcacccatcgaaacaaaatactactaaaaaagaccagtcaccttacaaaaatccggtagaaccttcaagcgagtgcctacactccctttgaggctcgggggctactgtcgggtaccataatgtaacaccccgggctttaagggacaaaaccgggtgcatctcatacatgtgccaaagaagacaacatatataatatagagataaatgtcatagtataatcagagtacttattatatagcggaagacttacaaaaataaaagataaatataacaggatctaaaatctatccttggcgccacaaagtaaactgggagacgccacctagatcgaatcgaactcctcgagatgcggctcctctcgaaccacctgttcttttcctatggggggtgtgagacagcaagggtgagctcacacatgttcatcgctcaacaagttgtggggaataatgtggcatgaactcaccaaaggtgggagttcatgtgaagtgtaaggctgatcaacaaaataaaggttgaagctgagcattgcttttataagttagtcaaaattttattagcaattactaagtataagtatataccaaaccataataaataatagaacaaaattaataaataatcccatgtaaatgcaaatgaccaattgaatttaagttccatagtttaatcatgtgagggtccgagccgctcatgatcgtgagcacggctagtatactagttttacactctacagaggttgcacatctttacccacaagccgtgttacccatctgccaaggggtcatgaatcccatacacctctaccaaggaagcgaggcagggtaacactacgaggcctttacaaagttccactagcttcagaaaacccgctatagtttataggaatctccagtgcaggaatacctcgcctgaccgccatcgcagcaaaatcaacccaaggacctccctacactgaccactcccctactgcccttgcccctttcgggtaaggtagtcatccactagctttcctagttaatcagccaagggcgtcccattaaacccttgtggtagcactgtttttccgggtggtcgctccatgttccaattaacataatgatcttatcatgaacataaataacataacagaataattggaacatggatataatgaaatattaacccggaaaccgtgtaaagcaatagcataactacccaatgaatcaggggtaaacaaggtgaacaggataaacagactagggtgaccaattgggtcccatcaaaattaaacctatgcattgataagtggtaataaagaacattattgggtaaatgaaagtgatcaagggcacaacttgccttgcacttgagattccagttaccagggtaattcttcagatcctcgaaac

SEQ ID NO: 37712 - DNA, 533 bp, Zea Mays
tgcttcttctgtgaactggtcccacgcgcccgacgaacaccgagggcttgcccctgttctctcaactccatctcggtcggaaaatggcaacgacggatcccgtgtccgattcacattctccggcgaggtggtcaggaaggagacgcccaggacacgagcgtcgatgcctgctcaacggtggcgtcgaggaagacgggaatggaggagagcgccatccacgggcgggactggaacacgacctcccctgctgtttatggtactccggtagcggcctttctctctcgacctctctctgtcggtggtgcttgcacgcaggcgcagccgagttttggtctaggaggcactaggcggaaaccctaggggtcgcgactttatctccaggcgcggaaggcttcgctcccagctcccccggccgcaccgtgcgggctgttgcaacgactggtccgcgaaaggaggaagaccaaactgaccgatgagggccacacgacggcgtcaggaagaaagtgagcacggcagcggtatggggagaagat

SEQ ID NO: 37713 - DNA, 416 bp, Zea Mays
ggctatttctgctgcaccgaagggcaagaaaaatcaaggttttgaaccataggcccagatatattgaaacagccacaatgccgaaatttggtgaggacacatcttccgctgccgaggcggaaccggctgctcccgttgctgaggaatcgactgtggtgccaaaggtgcctatagtcaagccagtcgaagccgaaaatgagacaaccagaaagctagaattagaaaaggcaacagatttgccagaaattccaagccaaccaatagaagcggaactgtcgaaggttggaaaagctcccgccacctctcccaagaggagaagaatggctagcgtgctagacgctgttgtggaaacgacaagagcgctgactcctgctcctgtgaagaaggttgccgaagctgctaaagcacatatagaa

SEQ ID NO: 37714 - DNA, 285 bp, Zea Mays
ttgagccttcggcgaaaaaacacctttccttctttccatgcttcctaaagagagatgtcccttctatggccagtctgatacaattgcgtttctcgaagtttgcttcatgcctcagcacactcatttaacaaagtattgccaaaaatttacttcgtgtccaatagttttgttgttaatgtgatatgatgtatgatgtaatgttgtgcgaaatgatgctatgatatgatgaaatatgatgatgatgtcgaaggcacacacacacgcacccacactggaatagacatg

SEQ ID NO: 37715 - DNA, 120 bp, Zea Mays
gcaagattaagtaaacacaaatcacacaccaatacttttgcagcggaaatcttattaccaaattttacaagttacattaggtttacattgtacatgatcggagtgattacaaaagtgatt

SEQ ID NO: 37716 - DNA, 517 bp, Zea Mays
ctaccattcaaatcaaaattgtcggctagctgattaaaatcacaaacctatccttcgtactaagaactgagaaatactagacgatacgattaattcaacacgtatcactcttgttaaaaatacgagaatcatcgcaactaatatatttaatcgttctacttatccaccaaaaaaataggagtagtgacgtaactcaccagcatccaagcgattagaaatttcacgcaaacggcgatgacttcctgcttcaagctttttaccgaacacccgacaagcattgtgcgtgtctgctttcttctctatcaacctccttagatttttctctccaagcagcgatgtgagagcagcaagcacgaaggtcgaccacgtggctccaaagcacagtggacgacgaacacagcaatgccgcgaggcaaattctcatgacagtgacttggcgtgcacagggaaaggatcgagacgctatggggcgagttggaggagaggcagatgagctcggcaaggtgcaagggccgag

SEQ ID NO: 37717 - DNA, 647 bp, Zea Mays
cgagaactgaagaccagcgacgaggagccgaggagcgagcgccgaggccacaggcgtggtaaatcgacagcgagcatgacgcggatcagggagcctgcttaggagtcgaggaggggaggacggggttcgacggcgaacgacgcgacgacgagggcataggacgtgggccacacgacacggacaaaggacgagtgccggggctgtcagctcgtcgcgcgatcggttgacgacgacgaatagccgagcgcggtaagaagctggacaacaacgacgggcctagctgctgtggggaagagctcgacgcggccatggagatgagcttgagggagaggaacgccgacctggacgagctccatggaaccaacggacggacgagcagggccccccccgagctcgacggcgtccatggccagagcgagcatggccgagggagaccgagctgagcagcggcaaataaataaaaataatctgcagaagacgagctgcacctggcaccagaggagagctcgcgccggagctctcagcggtcgacggcggacgcggccaacgtgatggtcgagtgttgctgagacagcatggtgtttggagacaaggagaacagagatggctggaccagacggcaccagcgagctccaaaactgcggcaa

SEQ ID NO: 37718 - DNA, 86 bp, Zea Mays
caaggtgaacagcctctagtcgatagaataatgtaggtaagggaagtcggcaaactagatccgtaacttcgggaaaaggattggct

SEQ ID NO: 37719 - DNA, 988 bp, Zea Mays
gttgtctctgaaactatgagtataattactattttctattgttaaattaatttaaaattaacaagaaattgattattgtatattttttttgctctgtctcgcgagctaaacgagtcagatcgagctaactctgtgactcgttagcttaatgagcagagtcgagccagctcgttagcttaacgagccaattcgaatgaagcgagtcgaactggctcgatatctagccctatcagtggcctatccgtgtttgatttctcgaactaaagttttgtattgtacatgtctacctaattattttttatttagactatatttaatattttaacttgtatctaaacatgtaatccgatgtaatgaaactaaaaaatagctcaacccaagagcccctcaattcgttgtcccctctctcgcctcatgttcacttgtcgccactcactcggttctaaattataactcgttttaccacctattagacacgtcataatatcgagaaggacgccggttaaatgaatattatctatggtcttgttcagcaagctagtatttgatacacacagggttccaatacagggctagattgagtgaatctatttcatatcaactaaacagggtcgttcctgactttttgggggcctagggcgaaattcaatatggaggccccatccaccatgtatatacactatatatataattataaacataaattattgaacattcaatggaaaaaacttctatgtcacgccttaaagtttataagatgataaatataaattagagccataacacttacttgtcacatgtcacatgatatcacgctatttagacatgattacacaaaacactgaaaataatatatatatatcacaaattgaagggtaacataagaatgattatacatatctaaatagcgcagttattattattaattagttaccttaaatttgtcaattagattaagtcaacaaatcaacaatcagttaccttaaat

SEQ ID NO: 37720 - DNA, 733 bp, Zea Mays
gagatagcggtaacaggcagcgcgatcagggcaggcgaacaggcgcatgcaggcggcgggcagaggaataggcgtaggcaattggattagcgtctggactctgggcctctggcgtagcaggctgcaaatctgcaattgtcgctgtggcctgtggaatattgtttatggggtgggggcccaccagctttgtggggcccggtgcggtggcaccgactgccacccccagggccggccctgtaactaaaccatgtgtgttttagttacatgtgagatttaataaaaaaatttcttcactgttcgattacatcgcttgtataaagaacagcttgttaaacacacataggttccaaaattgataaattacaacatcaatacacaagttataaactgcaacatcaatatacaagtatgaactggattgagttgaacacaatagcgtgttaacacacaagtgaattgttttatcctatgaagaaaatatgcaggttccatttgatcacaggttccatttcatttctcagccaccaacaacacttcctttgtcctgcatgcaagtgaatatgtcaatctatagtgtaacattagctaacatttattcatcaattccactttgttacaaagcacgccattttgcaatatatgtagatgaactgacaataaacacactgaatgaatgaattcataattcatcgatcactaaatggatcactatgttaaaggaacacttcaactg

SEQ ID NO: 37721 - DNA, 243 bp, Zea Mays
gtccctgatgtgctctttctatcaattttacaccctacccaatcagcatctgaataacctattaaatcaaaagtggatcccttggggtaccaaagaccaaacttaggtgtatgaactaaatatctcaaaattcttttcacggccctaaggtgaacttccttaggatcggcttggaaccttgcacacatgcatacgtaaagcataatatttgatcaatatgcacataaatagagtaaagatcct

SEQ ID NO: 37722 - DNA, 594 bp, Zea Mays
ggctaactttgattgtggcttttttagcttgtttagttgatataaatgacactttatatcaaaaaagttatgtgaacacccctcagtctatctttatacatctatctttatctccactttccaccaaattaaagtgcgaaacattttttaatgtacttttactataaaacactagtttgcaatatcgttgtgcgtcaatactttaaaaaacacttatatttttttgtattcaaccatggtctaagcctccccatcactgctccctccccacatttggtaaaaaatccttatatatcttgtaatactcagggctcctccccacttttacaaaaaaaaaaaaaaaactctttcatttctttgtaatcaacccgtggtctaaacctcgctcatcggagctctctccccacttttgcaaaaaaaactttatatgtcttggtaatcaacccgtacagtctaaacctcaatcatccgaacttcgtccccacttttgtaaaaaaaacttatattcctttgtaatcaagtcgtactttaagccatcgtaatcaacgagcattgtactagtgtaatttttacttcacaaaaccctttgtatct

SEQ ID NO: 37723 - DNA, 136 bp, Zea Mays
attgtaatttgtttcgttcaactatatagggagaacccagatctataccttgaagatcttcgggcccgatattcagaactttcagagaaatttgatcagaggaagcgacataaagttaatggtggtcagacaaacg

SEQ ID NO: 37724 - DNA, 524 bp, Zea Mays
cccctcccacacttggccgcccctctctccttttcccttgggctggctgtcctctcctcccatggcagcccctctccatggcttcctcctccctctagatctccccccgcgcagcaaggatcgagaagaggaggagcacattgagttgaaggagaagagaggatcaaggagatgttcttccccatcttttcttgcagaatttcttggggaaaccctaggtatggatgagatccttgttcctccctgtaattatgtgcttttggaggttgtggatcatgggaattaaaggattagacgttggattagatgtggggttaggttttgatctcgaatttagttttctgcagaatggcagattcgacagtttctgttaatcccagttttccgtggtcttagaggcctcaaaaaaataaaacgactatatataagtcgtagataatttgtagatctttccgtggccgcgaagaacacctcaatcggacatcagatcagagagttattgcagtttgattatagcagttttt

SEQ ID NO: 37725 - DNA, 1442 bp, Zea Mays
aacaaataacattgttgttgtatgacatgtggttcagagtgggaggttttccaccaggtcttggtttcaggtgtaggatcgatttgttgattgttggcaaatgtttgtgaaatatttgtactaagttttatgcccgctagcaggtggctacactccataccatgcctagtacatttttcttcttcgatgaaggcaagtgaatgtagcggtggttgcttccgttctgacctgttatttctattgcctacactctaatattcagaagtattggattctttcataattggactctatggtgatgctttacttgcgtgcattatactgatcctcaatcatatattgatgatgattatgattcgagtatgactcatgagattaattcacacccttgaaggtaaatgaagtattatttgaggttggtattgtatctgaaggtaaatgaagtattatttgaggttgtattgtatgtgaaggaagtgaagtatattgataaatgcagcatgccatatacattgcatgattcacttgcatctgaagttgggtcatgacctatggtccgaccgtactggtacaacttagcatcgtacgttgcccgaggaggggtacgatgcggcttcatacccttagaggtatgaaggcagaggacatatgcattgcattcatatgcattcattgaagtgatatttgcatatgatgtggttttataccctcagaggtatgaagacagagtacctacactttgtgttcctatgcatacattgaagtgatatttgcaggtattgttgacgcagggaagtgttatacaaactattgtggttgtttaaggaaatgagatggtattggttatattgagactactgagttctatgtctacaagaatttctgatcttaattgtgattcttttaaaatgttgattaattcaatttgtggtttaaatatcttgtcaaaacaattcgcttgctgatatgtttcatctcactcttgcattactcaatgcaggtgcttgttgctcatcaagggaagtgggaagtagcagcacatccaccttcactctcataataacgctgcttaggcgcagtcataatttaattagaaacttcttgtcaaaggatgttgtttctagctagttgtgcgcactggttgatttagttcatgccgttatggttgtctttccattgctagcagattattaatgtctattatgttctcttatcatgatatatatttatattttgttgcttccccgtttatgtaattttcaaaggggatgctgtcgaaattttatatatgaatgttagatgtgtagtttagtagcattctgggtgtttgaggatcccgggttacaaaagaaaacttggatgtaaacattttttatgtttcttaatgtacttcatggatttgtgaacaaaaaaacttggaagtaaacatttttctctttctt

SEQ ID NO: 37726 - DNA, 670 bp, Zea Mays
ctaccattttggtatatagacttttagctaaatccttctagattttgaattccccttttgggctagttttagggtttcaaatgagtttcatttgtgtttcagcttcttctagggattcatccctttgatccctccacctagagcaaagttactctctagctcaagatccaatcttctcaagtgttacttccactagactaacacttcaaaacaaataattccaggttcttaaagctttcctttaatacttaagactccaagtcatcatattacttgctcaagagatgatcttccctcattttgcttaaaccaggtccttaactaagtccactactcaacacacaacatcacactttttgtaaagttttaacctagtaaatgcattctaggtgtaacaagcacattaatgcagatgcttatgatgacatgtcagagttttagtttacgtaacaccaggggtgttacaattggtgatcccctagtccaaattggtggttcggcaagcatcgtagacatatgagaaagcttaaacgagggagaggggaggatgaactgaccggaatggggctggccgcggtgaggttggtttcggggtggcggaagcttgatttggggaaaaaccgaaattcaagctcactggtgcacgattgctagcgattctcggtggctg

SEQ ID NO: 37727 - DNA, 406 bp, Zea Mays
caggactctcgcatgattaacttatggaactaaacttaatctatcatatgcattgcattgtgagtgttattattaattgtgatctcttatttaattgggttggtatctacttacacttagtaacaactaataaaattttgaccaactttaaaagcaatgcttagctttaaccatcttctttggtaagccttacacttcacatgagaccccactgtaagtgagatcatgcacattattccccactacttgttgagcgatgaacatatgtgagctcactcttgttgtactcacatccccctaggtcaagaacatgtactgctggataaggagcatggaggatgtcgcgatgagtttgtgagaggtctaggccgttgtctcccagtcaactatggttgcgggattgttg

SEQ ID NO: 37728 - DNA, 181 bp, Zea Mays
aagaacaggtggtcgaagaggagccgcctaacactgaggcattcgacttgatctagctggcgtctcccagtctgctttctggcaccaaggatagattttagatgcgatatttatctcttattttgtaagacttccgctatgtaataaagtactctgattatattgtgacatttatctctat

SEQ ID NO: 37729 - DNA, 112 bp, Zea Mays
ggcaaaggggcgcccgacatctagccatgggggcagcacttgagggctctgtagaggagcacctacgtgtgtccacatgggagcctagaggaggcaggaaaagcttcgggag

SEQ ID NO: 37730 - DNA, 164 bp, Zea Mays
taagactgcggttaaactagttgtatgtacatcattaggcaatcttgagttgctagacgatactatgtagtagttcctataattaagatctcatgcaagtttgtgccatcgagtgcagcaataagttgattgcatctgctagagactaaacatgtgtgcttgca

SEQ ID NO: 37731 - DNA, 548 bp, Zea Mays
gacattactatgttactattgtggtttctacctgcgaggtgtggtaactaggtgtgttgtacgttgtatacgtgctgcaccttggtaataagaaggttgtggaatcaggtggtggtaaaacaatgttcttatgtggttgaatagtttgatattattttacttgctgagatgtgtcatctcactcttgcattactcaatgcaggtacttgatacatgttgggaatgaggggagtagcagcacgtccacttacactctcacaataacgctgcccaggcgcagccatgatttaattagaaacttattgtcaaaggaagtttgtttttttatagtcgtgcgcactggttaattcagttcaggtcgtacgtttatcttcccttgctagccgattgataatacttagtatgtttttgtcatgatatatgtttataccctgttgcccccttatttatgcaatcttgcaaaggggatgctgccgaaattttatatatggacgtcagaagtgtagttcagtagcattctgggttgtttgtggaacccggggtgttac

SEQ ID NO: 37732 - DNA, 437 bp, Zea Mays
aaaaaacatgacaagcaataagtaactcatcttcggagttctaaactattttggatattcaagtagagttctaaattattttggatatgaaaatactacataacaggctacaagtttcttcaatcagaatcacaatctataagtaactcatcttcggagtcctccgtcgcgcaatcctcaacgacaacctcattccacttgctgcattgtcctgcatcacacttgtcaacagttctcttgtaatgattggcttctgcttcatctgcagcttgggagaatagctcatcctcagcctcagcctcaacctcatcagacttctgcttgtaataagccgcctctacctcttcggcggcctgagacataaactcgtcctcttcctcttgagcacgtaatcctgcctcagctagtgtgatgagctcactcaaccttgatgtgtc

SEQ ID NO: 37733 - DNA, 117 bp, Zea Mays
cgatcagcaagattatccaacatctgtttctcggctcgagccgctttccattcccttgtatcctgtgctctcttctcatctgccgccttcaacctcctatactctgcacgcttcggg

SEQ ID NO: 37734 - DNA, 115 bp, Zea Mays
ttcatttatagccactaagtttgtggaaaagcatggcatcccctctacacccctagaaattcctttggtcacccgaaccccggggtcagaccttctatgccagctcaagtgctcc

SEQ ID NO: 37735 - DNA, 540 bp, Zea Mays
cttttcctcgctctgacactcgtgtccgcctgctccgctggcaggcaggagcaggagcggatcgattagtcaaagcggcggtcgtcgaagcgactccgtgatgcggacgctggctgggccaagggccaacatgaccggcggtctgcctcggccggagcaggatccacaccaccgacgccgtgtcgccgacacccttctcaagtcagtgtcacacacgcagcacaatctcttctccctgcccagcgtccaatgccagcagcagcctgcccaacccgggccactgttgcagtttgcggcttcggcaagcaaatgtttcgcagtgctttctcgttgctctcactctctcagctagatcggatcggggtacgcatctgggaatctgccgtcgcagtcgctgtgtacgcatacaaatgttctcactttttcatgtgtttaattaaacataaaaaatgttactactcaagaagccagatttcattatttctgtagtactcgtaagacgttgagagactatattttcgtgaactttcgtgaatttct

SEQ ID NO: 37736 - DNA, 605 bp, Zea Mays
aatttcgacaacatctcctttgaaaattgcataaacggggaagaaacaaagtataaataggtatcatgataagaaaacataatagacattaatagtttgctagcaatgggaagacaaccataacggcatgagctaaattaaccagtgcgcacaactagttagaaacaaacatcctttgacaagaagcttctaattaaatcatgactgcgcctaagcagcgttattataagagtgaaggtggatgtgctgctacttcccacttcccttgatgagcaacaagcacctgcattgagtaatgcaagagtgagatgaaacatctcagcaagcgaattattttgacaagatatttaaaccacaaattgaattcatcaacattttaaaagagtcacaattaaaatcagaaatacttgtagacatagaactcagtagtcccactataaccaataccatctcattttctcgaacaaccacaataggttctataacacttccctgcgtcaacaataatacctgcaaatatcacttcaatgtatgcataggaatgcaatgtgtaggtactctatcttcatacctctgggggtataaaaccacatcatctgcaaata

SEQ ID NO: 37737 - DNA, 590 bp, Zea Mays
aataagctgacaagaagccaataacatctgcgcggcacagttcatcgaagaaatgccaagaactctacatagagcactgacagcccaacaacaacacaatacttgcttaacccatgtcactatacttcattcaacatctcaactaagaaaaatatccaactagcatggttaacctacacataatataagtcttcatctactgtagttcataaacttacatttcattctatcatatgatgcactcaaagtactagacctaaagggtcaatactaactgcgtaatccttcacacatttggcaaacatctcaagctaatgtaaaaaccacatcatttaggaataggtgactaaccacacactaccagttctaggcttggcaatgacttcattcaaaccaatagataagtggtccaacaatggctccacaaacatgcatcgggaagagaaccatcagattctcaacgtattaatacataatcaatggatcaagaaaatcaaagattttattctacaattagcatgactaacatgcaaccactttaaaccacatctaggctttgtggctactaaaacacacaatagaagagagac

SEQ ID NO: 37738 - DNA, 1959 bp, Zea Mays
atcatctgcaatatcacttcaatgaatgcatatgaatgcaatgcatatgtcctctgccttcatacctctaagggtacgcccctcctcgggcaacgtacgatgctaaattgtaccggtacggtcggaccataggtcacgacaaaacttcagatgcaaatgagtcatgcaatgtatatggcatgctgcatttatcaataaacttcacttccttcagatacaatacaaacctcaaataatacttcatttaccttcagatacaataccaacctcaaataatacttcaattaccttcaggggtgtgaattaatctcatgagtcatactcgaatcataatcgtcatcaatatatgattgagcatcagtataatgcaagcaagtaaagcatcaccatagagtccaattatgaaagaatccaataattctgaatattagagtgtaggcaatagaaataacaggtcagaacggaagcaaccaccgctacattcacttgccttcatcgaagaagaagaaaatgtactagacatgatctggagtgtagccacctgctagcgggcataaaacttagtacaaatatttcacaaacatttgccatcaatcaacaaaacactcctacacttgaaaccaagacccagtggaaagactcccaccctgaaccacatgccatacagcagcaacgctgtttgttaattttgtatctttaaaattaaaatagcggtgatatcaaacaaatactctaggagtatctacacaaaatactctacaacttcagtattcaatagataattaaattctgccatctacaagttctaaaacatctgacaagataactgactgaatctgttttagacaacagtatggttaactttaaaattcgatatctcccaaactactgaaccaaaaattatgaaattctgctggaagtaagaacttttatccctctacaaaagtctccatagttagaagagccaattcggccatttactagatgaaacccaccagtgaacagacccactcacttttgtcaggtaaacaggaacagccacagtaaaacaaacataactggagtttcacaaatcatatgaatgcactctttaacaatctggaaagcttatgaaattatctacaacttcttttaccaactcacagtttaattctgttgataaaattgcctaactcttaagagaacagattctgcacagaattatgagactgaaaaactgctataatcaaactgccataactttctgttctgatgtccgattgaggtgttcgtcgcggctacggaaagatctacaaattatctacgactcatatatagactttttatttttttgaggccactaagaccacggaaaactggcatgaacagaaactgttgaatctgccattctgcagaaaactaaattcgagatcaaaacctaagcccacatcaaatccaacctctaatcctttaattcccatgatccacaacctccaaaagcatataattacagggaggaacaaggatctcatccatacctagggtttccccaagaaattctgcaagaagagatggggaagaacatctccttgatcctctcttccccttcaattcaacatgctcctcctcttctcgatccttgctgcgtggggggggatctagagggaggagggagccatggagagggtagggggaggctgccaacagggaggagagcaagagagagagggggcggctgcaacccaattggggagaaggtgagggggcggctagggttggggaggagagggggggctcccatccaccggatcaagatcaatggcccaaactcgctctcccctttgagctcccaatccccagtggaaaaaaatgccaaaagatctactgttttctgaggaatgcctcctgaaactctaaaccccaatgcctcagaacatcaaagaaaagaaaaaataagtttaacttcttttcagaaaattg

SEQ ID NO: 37739 - DNA, 580 bp, Zea Mays
ctttggccgcccccctctctcttcctatattccactcttgcagccgctccaatccctctccttcttccccaagtgattgcagcgccacccctcaaccctagccgccccccacctcttcctctccaaggtggagcctccccgcttggtgtccgtcgtgtgggtgcgagtcttccatgggagtttggagggacgaagaaggaagaaaagaaggaggaaaggaggaacccaaggtgattttcgtgatcattttgttgtatttgtgctgcaatccaattggttacatgtttacctatgcgatttggtagaggtgctgtccagaaatttagtggatggacgaacagcagtagttctagggatttctgggaatttttcgtgggcaattagtggggatcagtgggagaatcatgtagagctttgtcatacctttccaacaagtacttatgcgctcgattcggagttataatttatgagatatcgttgtttgaatcaggttatgttgctgtccaaaaaaaacagaattttcaggtgggtgaacagcagtagtattagcagtttctggaaatttttcgtgggtaattag

SEQ ID NO: 37740 - DNA, 313 bp, Zea Mays
attactcaatgcaggtacttgatacatgttgggaatgaggggagtagcagcacgtccactttcactctcacaatagcgctgcccaggcgcagccatgatttaatttgaaatttattgtcaaaggaagtttgtttttttaactagtcgtgcgcactagttaatccagttcatgtcataagtttaacttctctttgctagctgattaataatacttagtatgtttttgtcatgatatatgtttatacactgttgccccctcatttatgcaattttgcaaaggggatgctgccgaaattttatatatagatgtcag

SEQ ID NO: 37741 - DNA, 1199 bp, Zea Mays
gtacatgcaccacctcccttgcgacccggacaagctcggacgtgagccaatctgctcatccgtgcaggctgtccacgcacggagctcgggatgcatctgcacacgctgccgttacaacgactaaaacacacacacacgcacaagacagtcctcgtgcgtggtttattccaacaatcaccccctaaactacgacgcggggatgtccgcctttcacaggagcgtcggctcgtcgtcagcgtcgacgacgagaagggccttctctttcttctttgcacggcagtccttggccatgtgtcctcggtcgccacagtcgaagcatcgcccacggtagcggctcctagcgcgtatggagctcgggctgtcgctatcgtcgtcggagtcgtcgtggccgtcgctacagccacctcctttctcgcggccaccacgtcgtcgatcacccccgtgcgcacgattcttgctgcgccgacgcgcctgccactgctcctcagtgagaagcaggcgcccaagctcatctgtcgtctcctccaggcagaagcggttctccgccacacggagccgcccgacgagctcctccagcggcattgtcttgaggtcgcacagcatctcgatggacgccgcgacttgattgaacttcggtggaacaacgcgaagtagtttccgcacgacgcgtacctcctccacctcctcgccgagctcgcgcatctccgagacgagggagctcagtctcatggcgaagtcgtccaccttctcgccttccttgaacttgatattctcgaagaccttgagcagcctttcggcgttggcctcccgaacacgcgcatctcccatgcgcatgcttctcacagccgcccacgcctcctttgcgctcttcttcacagcaagccccgccttcatctccggcggcactgcgcgcaggatggcagccaacgccctccgatccttggcacgctccctgcacacggcctctaccgcgtcccacagctccatcgcctccagcgaaacctgcatgaccaacgcccactcgtggtaattcgccttggtcagcagcgggagctcgacggagttggtgttgacgacgcgctccgccgcggcgctcgacgagcccacgccggtgagctcgcccaatcccggcgtcctcggtgtggccgacatctccccccaccaccccggctctggtaccaaatgttggcttcgtccag

SEQ ID NO: 37742 - DNA, 226 bp, Zea Mays
acgcactagctttggcttctgcatagtgacaatataaacggagctagcagtggaaaaaaaaaactaacttcaccaactttgtgagaagaggagagaaaataaagaaagaaaagctcatgtaaacagtgcagcatagtgcgcgaacagtacgtaacccgtagctagctgatgtaaaaaaaaaaaaagctagacccggtagaaggctagggatcagcgtgagcttccc

SEQ ID NO: 37743 - DNA, 457 bp, Zea Mays
ctcatgacttgtgaagcccgtcgacatgtagcgcaatcatgacctacgtgcccccctcaggttgcgacacactcatgacctatcaagactagacctaagtgcacaggccgtctacagggcctgcaacgcgacgagccacgccgagacctaggctacggaggctagggcttggcttggcgcggatgtagtaatgatggcgctggggccctgcaccgcccacgtcatctgtcataatgagcacgaggagaaaataccaagcaaccaaaacacatacgaacaatgtggcctcaccagggtaaaacacctggttttaccatggtatagtggctccttctcaaggaagccaccaatggctgacccccaccttgtactataaaaggaggaagtcgatcacgaggacgagggattatactctcaaaaccggagacactcggtggaaggcaatggcacacgagac

SEQ ID NO: 37744 - DNA, 577 bp, Zea Mays
tggctggacggtggagtactgtactctcgggtcgcgtgaacctattctggtcttgagaaacctgtgggcgagttgacatatgcaagggttaagtgctacatatgtcgtgtggttggagatcctcagctgagtattaatcgattcggatcgccgttacttctcggatatgaagactggatcactgccctgcatcgtagataacaagtgaaactaaagatgctaaaataaagttagtgtaggacaaatgaatgctctagattaggaaaatctagattcaggtaaagtacttaactggtgaagtaaaagcttggcataaggatccactactagtaagctattctgcaaaaatgagtctttgaaatttgataagctttaccttgattcccaataaaacagcatacccttgagagtcttttctttagtcgggtaagtcttgctgagtaattgcgtactcagggctttattccctgttgtttttcaggttataagtttgttctgttgtggatggtgctaagtgccggtgggctcggccttcttatataactatatcccatctttagcttctttattgaggact

SEQ ID NO: 37745 - DNA, 492 bp, Zea Mays
tgtgaccactccagacccacatgctccatgtgccatatacccgaaccccctatcccacacatgcccgtgaaacctcgagagtcgactctgataccacttgtaacaccccgtccaatacctggaccaacggtacttactcttggcagctctctaggatcatatattatccccatagaccaacacgagtcttttgtgcgtactttgtcctcactcatgcgcatccgagaaaacatctcggtaggtcacccaccccaaattgctccaatacaagcacgcttaacttggagcttttttcgagatatgcttccgaaaaagaagatgcaccctgttggtatgaatacactattaattctattaagccttgggccaggatatcccatcttaggaaccaggatataacaatctagacgacgtagagtcgaataggggtgacggtgaatatgcagaaagctacaactaaagatatgttacatctactcctagggcaggaaa

SEQ ID NO: 37746 - DNA, 442 bp, Zea Mays
gtcctcttctctcttttcgccttgcgcacactagtagccacatccccgtgctcgccaccgccgtgagaagagaagtcggagggagcaacgtggttgttccaccgccggtgaagctcgtcattgcggagtgttagccctcggtgtagggttgaggtggatcgtctgcatccagggttgccgtccgtgtccacggctggaaggcggagctcgcggaactgtggcaattcctcgccgtcaatcacgaattgccagggaaccgtgggtgaccgtggactgcacgcctgcgcgcacgattcttggtatggatcccttgcccgtatttgccttcatttccgcaacgagtagaaccgtttgattcgaagttggtgcacctttgtcgaggattcacctcgccggcaatggcgctcgccgtagctgtaacgcgagcgccgttcttagtttt

SEQ ID NO: 37747 - DNA, 587 bp, Zea Mays
ggtagatcaactgtcctgagcctgccactacgcaggtgaaacctgggccactggattgaccgtgatgggttcagatacgatcaaggttgttttgaatccggatcgttggaatgtaaggggaccgtcggaatcatgtgtaggacagcggtatcgtcgggttgacgtgggcccttggattctgatctagcagcatgggagttgggtggccttcaatctaatcggatacattgaagttagatccggcggctagaatactgcgataccccttcagccctgtaaaactacaaaagggaccctctgttattttagtatcaacccgccgtccatattcactatgtactgagtctagaaaataatgcgcagaggcccctgctgatttctgtaattatgcccccggtcccgagatcagagaaatttgataattaataacagaaattgatttttaatgtataaataaatgctagaacttattcaattcacataaaattcatatgaagtccaaactaatccattccagtttctataattctgtatattattgtttatcaattagatccactattttgacataaaagccacattaaaat

SEQ ID NO: 37748 - DNA, 336 bp, Zea Mays
tttgtattgtggcgagtagaagagctagtggctaaggatcctagtgttcatcagatagaagttgttgagcaagagctcattgaaggcaagttatgcccttgactactttttacccaataatgttctttaatatcactcattaatgcataggtttaattttgatgggacccaataggtcaccctagactgtttatctttttaccttgtttatccctgaaacatttgggtagtcatgctattgctttacatggttttgggttaatatttcattatatccatgttccaattattatgttattttatttatgttcatgtcaagatcattaattttaattg

SEQ ID NO: 37749 - DNA, 854 bp, Zea Mays
aagctagtggaagactaccttacccgaaaggggcaaaggcagtaggggagtaggcatgtagggaggttctctagttgattttgctgcgatggtggtcagacaggggattcctacaattgctctttccataaactgtagcggggttttggaagctagtggaactttgtaaaggcctcatagtgttaccctgcctcgtctcctcggtagagatgaaagggacttctagaccccttggcaaccgagtgacatgacttgtgggtaaagggtacaacctatgtagagtgtaaaactggtatactagccgagctcacggtcatgagcagcttaggactctcgcatgattaaactatggaactaaattcaatttgtcatttgcattgcatggaatttattattaattttgtttattatttcttattatggtttggtatttacttacatttagtaactgctaataaaatttgaccaacttattaaaagcaatgctcatctttaacccctattattgatcagccttacacatcacatgaactcccaccttttgtgagttcatgcacattattccccacaacttgttgagcgatgaacatgtgtgagctcacccttgctgtctcacacccccataggagaagaacaggtggtacaagaggagcctcacagcgaggagttcgacttgatctaggtggcgtctcccagttgacttatcggcgccaaggatggattttagttcattttatattttattttgtaagacttccacgatgtaataagtactctgatgttattgtgacatttatctctatacactctgttattatatgtgttgtcttctttgatgcatatatgagatgcac

SEQ ID NO: 37750 - DNA, 426 bp, Zea Mays
accaggaagggaggaggaattgatttgcctaccaacccattcaaccggagggtacttagacaacaacaacaacaagccgagatgaatcatccgaatcctccaaatcctccaccagccgaaactgatccaacagttgcagcccagatgtagataatgcaacagatggctgatactatggcggatatgcatgcgcagatacggcaggaacaccaagagatgcgccaagagcgagaggagatgcgcaaggagggaagggcgcaacaacagcaagcaccactgccaccacctccaccaccagttccaccccgggacaagcaccgtgaattcatgagccacaagccaccgatgttcgttagctctccagatcctcttcacgctgatgattggctgaagtctgtggagaagatgttgaacattgcatagtgc

SEQ ID NO: 37751 - DNA, 59 bp, Zea Mays
gaacaagcagcagactccgggatcaagcaagagattttctatcgctagggttaatcaag

SEQ ID NO: 37752 - DNA, 418 bp, Zea Mays
ctaaaatggaaaatgcatcattctgagatttcattttgtgtgcttttgtgacaatttaaaaataatgtaaaaataaatatattaaagtccatagtggaatttaagatctaaaagaaattctagaatttagaaaagaggagaaagaaaatattatgtgagtaaaaataagtataaaaatatatataataaaatatattatttctacactaggatttgaatttgtatatttgactcaaaggtgaaactcataacaagattcaaattcaaatttgagattcaaatgaaaagaaaaagaaaaaaaaacataaaagaaaaagaaaaaccctgcactgggccgcctctgctcattttggcccattaggattcgcggccgcccagccaagcctgaggatcggcgccgacaatggggacccactgg

SEQ ID NO: 37753 - DNA, 314 bp, Zea Mays
gtgttcagcagatagaagttgctgagcaagagctcattgaaggcaagttatgcccttgaccactttttacccaataatgttctttaatatcactcattaatgcataggtttaattttgatgggacctaataggtcaccctaggctatttatctttttaccttgtttatccctgatacatttgggtagtcatgttattgctttacatggttttgggttaaaatttcattatatccatgttcccattattatgttattttatttatgttcatgtcaagatcattaattttaattggaacatggagcttaacttgag

SEQ ID NO: 37754 - DNA, 326 bp, Zea Mays
atttatttcatttggaataatttttgattgcgcatgattgattttcggatattaatagcatttcgtctgaaatgaaaatcctagtaaataatatatatgataatattagtccaaaaataattattttatttaaaaataattttggtttaattattatgctttttagggttatttaaaaatgtatttcgaatttagaaaagggaatagaaaaaaaggaaaaaaagaaaaaaaactaacgaaaccctaaactaaaccctaaagcccattaggcccatctaaccccagccgccgctccccctagctcccaagccagtcgcccctgcttg

SEQ ID NO: 37755 - DNA, 313 bp, Zea Mays
aataaataaaagtgttgtaaatagtagaggttatattcactaggaaatttgaagttcaaaaataagggttgaatttgaacttggaactagaaacaaatttgaagtttaaatagaaaatggaaatgaaaaacaaaaaaaaagaaaaacaccagaactcgacttgggccaaattccaaaatttcggcccactaacgcgtgcatccgttcctgcccttttgccgccgcgctcagtctctgactagtgggcctaccttgtcatcctcagtccacctccgcgcatgcacatgtgtgtggggtcgctgccagtgggtcc

SEQ ID NO: 37756 - DNA, 448 bp, Zea Mays
cggcgaggcgtcacggaccgatcctactattggagtattatacagttcgtcgaggacggacgagtggattatggatgggatggggcagctggatggagcctggagccaaagcggaatcggcgggctgtgcagcagcagcagcaggccagcagcagccacggatcggaggaaggaagcaggggtgcgcgcggtggtcggtcgacaggcacagcctggacggagcacagcctgccgctcggccgcgctacacaacaacacatccattcaagccaactgctcctgctgcatggtttttcttctcgtctgcgtgtatacaacaatcgcagaattttttttgctgtccaggcgcgcatacatacgtagcggcaccgccagtggcctcctcaactgctgttttaccgcttctgttgtcctgcccatatatatcatgcactcgatctgaatctgt

SEQ ID NO: 37757 - DNA, 1279 bp, Zea Mays
ggagagggtcttgtgtgtgccgtcgcgcctcacggccctacctgtgcagcgcccatgtcctgcaccggcacttgccgctcgccgcgctgctcgcctccagcaccgacgcgtgtgccctgctccctggccgcggctcttcggcgagcccctgtgcagccctgtccattcgccgtcgatagccccgctcgccagcgagcccaactatagcagtgtcatgcccccgcgcgatccctgtttttctctatcggcgaaaacatgcggttctatggaaggagagaagaagcaagggtcttgtgggtcccacggccccacccacatgtgcatgcacgcatgcgactagaggagaaaacggttcccctttcctcacgtgatccccaatttgctatggggattttctgtggccaagtcatccagttccttagccatctttgcatataaggctgcctccaacaagaccctctaaagggtcctgtactctaaatttagaggacgagacttcctccagcaacgtcctctaaacggtctctaaatttagagaacgctgctgaatcctctatatgtagagtttttctaaacggttctctatctatttgaatactttaaacaaccggtttaataaaactaaaatatgtacaatacatttaagagtatgacaaatacgtatgtacaaaaattaaaaaattaaaaatgtatttaatataggtatttacatatagaggacgtgatttagaggacgttgttggagagagtagatataggacatggaatcttttagagaaaactgtaaaggacagatatagaggatgtatatagaggacgttgctggagacagtctaagtccgtgttccttcagaaaattaatttcttgttttctgagtcatgtgaaaatcacttgctaccccgtaggatatacagttaattacatataggatcgagaattattaagtacacgatatattgtgtgttataaatctgtttttttcattcacgctgcgttaacttcataacaacgtcgcctaggtgttaggaatattactttgtcatgacgcatattttatttacttaattaattgttagtttgtccattgactattaagataaaatttagttaacaataatttatagttttaactcatgcttttataaatataaatattaattaacttgattaataccagtttaaatacttttaattaattatttctttgttgttgttcgcgcgcgacatcgtttgtgtatcatcgtgctgtttcgcgcgcgtcttcacgtgtcgttcggg

SEQ ID NO: 37758 - DNA, 612 bp, Zea Mays
gtcacgcgttgtcatgcgcgctgtacgcgtgctccttcgcgtgtgtcacgcgcgttgttcgctcgagttgtgcgcggtgtcgcgctgttcgcgcgtcgttcgcgcatgtcgcacgtgttgtttcacgtgtcgcgcgctgtctgcgcgcgatattaaaatgtgtcgcttataatcacttgtgttaattaattaattacttgtttaacccgacaactattagaatagaagattaattgaaactaagtagtagtttttacttaataaaggtcgattaatataatcaagccgaatcaaatgttttaactagtacttgtttagcgtaaacgcgataacttctcgatcgtagctccgactgtcgcgtttcttttcgtcgcgtgaccacagtagcgagctctatttttgcatgttttattatgtttttctttgaatggtgtaatgttcttatacacatatatatgtttgtttgctggtgtctgttcgtcttcgcttcgcgttgcgattaaatcacgattcgtttccgagcttcgaggaatcgacagtcaagcttcggtgaccaagtggtcaggttcttcgagttctacaaagttgaagaccctgagcatctgtttggtg

SEQ ID NO: 37759 - DNA, 485 bp, Zea Mays
tctaatcgcttggatgttggtgaaatttctaatcggagttatgccagttttatttattaagatatagtcgttgctcggctctaatagtcattattttctatattcggtgaccgattaaacatcttagggagacgggagtgtaaattagacaaggaatgcttaggtagatgtgcaggtctggtacgctggaatcaattataggtctacgacatgaagtataacgatgatgcgtgaaataggtttagtgtttccaatgactagctgatgtgttcttctcgagtaaccgattctattggtttgagttaaaggctcgaattggaacccacaatcgatgtggtagtttcgagtgaatttagtattagtgcggtatttaacgtgtaatcgagaaaagcccagattaatattcgttaatcgatgttgtggatctaagctaaatttattattgacgcgtatttttgttagccgaattgttagatagattaaat

SEQ ID NO: 37760 - DNA, 355 bp, Zea Mays
tgcacaggtcctcaactatgccatacaatgcaccttcagtcaagttctccgggcttccctgttgaaattgctgtaaaggaagtttataaacatcatctatttatactcaataataacacatttgcatctttaatgacataaatacatacgtgactattactaataataccttgccagggttcgtgatgtatcgttcgttcattctcatgaactcgcacacgtagaacccacataggaccgatccgggtggttgcttgtggcactatataacaggagattggttatttagttgcaacattgtcctatgtacgtacatgtatgatatgtattcataaattcacatacttaccggcca

SEQ ID NO: 37761 - DNA, 1121 bp, Zea Mays
aaactgttgaatctgccattctgcagaaaactaaattcgagatcaaaacctaaccccacatcaaatccaacctctaatcctttaattcccatgatccacaacctccaaaagcatataattacagggaggaacaaggatctcatccatacctagggtttccccaagaaattttgcaagaagagatggggaagaacatctccttgatcctctcttccccttcaattcaacatgctcctcctcttctcgatccttgctgcgtggggggggggaatctagagggaggagggagccatggagagggtagggggcggctgccaacagagaggagagcaagagagggagggggcggctgcaacccaattggggagaaggtgagggggcggctagggttggggaggagagggggggctcccatccaccggatcaagatcaatggcccaaactcgctctcccctttgagctcccaatccccagcggaaaaaaaatgccaaaagatctactgttttctgaggaatgcctcctgaaactctaaaccccaatgccacagaacatcaaagaaaagaaaaaataagtttaacttcttttcagaaaattggggtatcacactctacccccccttaaaaagaattcgtcctcgaattcgaccactccaacgaaacatccaaggtaccccatatagcagcactatgcaaaacatgggtccattattggtcttaattaacataagaacttctacattgactaattgtctaaggaaactacagcacctaacatcaagcatgaaccaacatgtaatgaagttcaaaccaagtcatagatgcaatcaacactacgatttcacaacatcgaatttggatgcagccatacatcaacatcaatgtcttacaacgacactcttttatgaaggggtaatacgcactaagcacaacctttaccaactttaacaattctttttaattcaatggtgaaacatccacactagatgaatatataagaagatcaaacacctcacctcacagcaccacgaaacaagtagttctattgaaacaaaactcctaatcttcctaaaccttgttcttgccataatgaaaagataatcatgtaatctaatatactttgca

SEQ ID NO: 37762 - DNA, 823 bp, Zea Mays
catacctgtatatcaccagcataatagcaacttcaatctcacaaaagaccagcgatatcaatcacattaataaaacaatatcaaaatttagaaatgaattatatcaggcattaagtcctaaacaacttaccacatcaccgtaaaggattagggagggtgaaattattttatctgcacttcaaagacattaacatatatcaaagatatttgaacccatacccttcctatatgtgcaagtgtgtcaaatttatcttcaaattgccaagaatctaaagcctatgctttgataccaactgtaacaccccggggtccacaaacaccccagaatgctactaaactacacatctaacattcgtatataaaatttcgacaacatctcctttgaaaattgcataaacggggaagcaacaaagtataaataggtatcatgataagaaaacataatagacattaatagtttgctagcaatgggaagacaaccataacggcatgagctaaattaaccagtgcgcacaactagttagaaacaaacatcctttgacaagaaagcttctaattaaatcatgactgcgcctaagcagcgttattataagagtgaaggtggatgtgctgctacttcccacttcccttgatgagcaacaagcacctgcattgagtaatgcaagagtgaaatgaaacatctcagcaagcgaattattttgacgagatatttaaaccacaaattgaattcatcaacattttaaaagagtcacaattaaaatcagaaatacttgtagatatagaactcagtagtcccactataaccaataccatctcatttcct

SEQ ID NO: 37763 - DNA, 526 bp, Zea Mays
gttctgatgtccgattgaggtgttcttcgcggctacggaaagatctacaaattatctacgactcatatatagagtttttatttttttgaggccactaagaccacagaaaactggcacgaacagaaactgttgaatctgccattctgcagaaaactaaattcgagatcaaaacctaaccccacatcaaatccaacctctaatcctttaattcccatgatccacaacctccaaaagcatataattacagggaggaacaaggatctcatccatacctagggtttccccaagaaattctgcaagaagagatggggaagaacatctccttgatcctctcttccccttcaattcaacatgctcctcctcttctcgatccttgctgcgtgggggggggggaatctagagggaggagggagccatggagagggtagggggcggctgccaacagggaggagagcaagagagggagggggcggctgcaacccaattggggagaaggtgagggggcggctagggttggggaggagag

SEQ ID NO: 37764 - DNA, 654 bp, Zea Mays
ctcaatttcagtttttagccgcaaaatttaattggaggccacaaccacaaatatggtgaagctagaacctctgagtatgaagacgagtgaccagtgagcggaggacgacgggggatggcggcggcgagccagagtccccggacgcctgtgctggtggcagatccgcgtgaactatgcactccctcgctgtagcatgctcaggggtccatgcatccggcgccgcctcggtgaagcagcggcggtggcggcgccttcgagttatacgtgcatgttggaggctaggcgttcagcgccaagaagttccatggggtggcgctcgccatcttcggcatcgtgctcacacacatcttctcgtgatggaccgctgccttgctctacgtctgcatcacctgtggtgaggatttcagccagctccaagctcctgcgtggcagcttcactagcgtccgtgttgctggaatgtctgttggctggtggctgcgtgcagttcaacttgggcctggcgtcttctctagtctcagcttgggtagggaggtggccaccgtcgtcggagaaggggtaagtgtgcagcagtggtcctgggcgcgcgtctgcaggtggtgcacgtgccggcggatctggcgcgtcgcagcggctgctgccaggggtggtcggcg

SEQ ID NO: 37765 - DNA, 1294 bp, Zea Mays
gagctctctgctcatcgcgactccccagctcctcctagctgcgcctgctgtccatagccgccgtcctctgctccattcttccctgcgcaggtcgcccagctcggattcgagccgtcttcaccgtccacgcgccccctgtttctccttggctgaaactctttcccatggccggcgtacggcttcacggccgcccaatctccctgctcggttcctgcctgctcgtttcctgccggtgcccagctctattaccgtgccctgccgttctcagctgctcgctgtggccggctcctgcttggccgccatctcccatggcgaactcgtccctacgcgccgaggtcgtgtgtagttcgcgccctgctcagttgctgctccttgttccccgtgtccgagttcgtccaagttctgctcggatcttgcctgaacccgagcagagctccgtccatagccgccgtcgagtccctgacgcgcgctccgctgtgtggcttccccgcgcgtcttctctgtttcctcgactcgctccttccccaaaatcccatggcgcccggcctcagcgccgctcgctctcccctgccgcgctggctccctgtatccatggcgattttcctctgctcgagcttgcccggcccgagttcccggtcgccgcgtcctgtcgagcttggctccgtgcgcgcgcttctccctgtgtaccgcgctgctccctgcgtgcccagcctcaatttcctgtgcgcgcgctccactgctccctgggcgagttcctcgctgccacggttgtccagtgtttggcccgcgtcgattcgcattcgctcatatcgccatcgttatgttgtcgctggtgatagcttcgcgtgcgcgtcaaactctcgcgtcgagtctttttcctgctcgcagcgtgccctctcggctcgctcgactttaattcctgaccgcgtggtcgacctcgtcgttcgccgtcgctcgtcgtcgcgtcgtttgccgtcgagtcgtcaaacacgtcatcccctgctcaaccctacctcaccagctcgttccagacttcaatcgaaagtcgtcgtcgttctacgcatcagcaagaaattctaagaatcgggtgaagacgaagccagccgagtaatattcaccgagtgcgcgacaaaaagctcgaaccagtcgtcaatcatctcgacaacaaccacatccaagactccaccgttccaataattttgtcgcatcacccttcaaatccgagtcctcgtccgtaggatcgtcgttgacctcgcaacttcagctcgagttaattatggtaagttgatttatt

SEQ ID NO: 37766 - DNA, 197 bp, Zea Mays
cgtgtgtagttcgcgccctgctcagttgctgctccttgttccccgtgtccgagttcgtccaagttctgctcggatcttgcctgaacccgagcagagctccgtccatggccgccgtcgagtccctgacgcgcgctccgctgtgtggcttccccgcgcgtcttctctgtttcctcgactcgctccttccccaaaatccc

SEQ ID NO: 37767 - DNA, 574 bp, Zea Mays
ctcgagctcgcccggcccgagttcccggtcgccgcgtcctgtcgagcttggctccgtgcgcgcgcttctccctgtgtaccgcgctgctccctgcgtgcccagcctcaatttcctgtgcgtgcgctccactgctccctgggcgagttcctcgctgccacggttgtccggtgtttggcccgcgtcgattcgtgttcgctcatatcgccatcgtcatgttgtcgctggtgatagcttcgcgtgcgcgtcaaactctcacgtcgagtctttttcttgctcgcagcgcgccctctcggctcgctcgactttaattcccgaccgcgtggtcgacctcgtcgttcgccgtcgctcgtcgtcgcgtcgtttgccgtcgagtcgtcaaacacgtcatcccctgttcaaccctatctcaccagctcgctccagacttcaatcgaaagtcgtcgtcgttctgcgcgtcagcaagaaattccaagaatcgggtgaagacgaagccagccgagtaatatttcaccgagtgcgcgacaaaaagctcgaaccagtcatcaatcatctcgacaacaaccacatccaagac

SEQ ID NO: 37768 - DNA, 396 bp, Zea Mays
gttgatcttgatgagataggtgatgaagaggctctgtgcatcgcgctaaggaatatgtccattggggatgtgtgtcctaaggaatccgaagagcctccaaatgcacaagatcaaccatccttctcaacacaagcatctccaccaactcaaaatgaggatgaggctcaagttgatgaaggagaagatcaacaagatgagccacctcaagatgatggcaatgatcaagggggagatgcaaatgatcaagacaaggaggatgaagaaccaaggccgccacacccaagagtccaccaagcaatccaacgagatcaccccgtcgacaccatcctcggcgacattcataagggggtaaccactagatctcttgttgcacatttttgtgagcattactctttt

SEQ ID NO: 37769 - DNA, 1472 bp, Zea Mays
ccgcaagccattgttgcgcgcaactactttggatgaggcaaacccttagggactacggttacaaattaaccaaagttcctcttctatgtgataatgagagtgcaatccgcatggcggataatcccgttgagcatagccgcactaaacacatagccattcggtatcatttcttaagggatcaccaacaaaagggggatatcgagattgcatatattaacactaaagatcaattagccgatatctttaccaagccactagatgaacaaacatttaacaaacttaggcatgagctaaatattcttgattctaggaatttctcttgatgtcttgcacacatagctcataaatatacctttgatcatgtctcttttatatatgctatgactaatgtgttttcaagtgaatctcaaaccaagtcataggtgtattgaaagggaattggagtcttcggcgaatacaaaggcttccactccataactcatctttcgtcgtcgctccgagcaactctccatctttggtataatcttcactcatatgttttatttgccaaaggggagaaagtagttagaaaagggcttatatttcactctaagtatccgtttttggcgattcatgccaaagggggagaaagtattagcccaaagcaaaagaaccgcaccaccacctaattttaaactatgattttcaaattggtatctcattgtgttcaaaagggggagaaagtagtattttcaaaattgatatcttaaaaaccctcttgaacactaagaggaggattttactgagggagagttttgtttagtcaaaggaaaagcatttgaaacaaggggagaaaatttcaaatcttgaaaatgcttcgcaaaatcttattcatttacctttgactatttgcaaaaggactttgaaaaggatttacaaaaagaatttgcaaaaacaaaacatgtggtgcaagcgtggtccaaaatgttaaaaataaagaaacaatccatgcatatcttatgagtatttatattggctcaattctaagtaacctttgcacttacaattatgtaaactagttcaattatgcacttctatatttgctttggtttgtgttggcatcaatcaccaaaaagggggagattgaaagggaattaggcttacacctatttcctaattgattttggtggttgaattgcccaacacaaataattggactaactagtttcctctagtctataagttctacaggtgccaaaggttcacaataaaccaataaaaagatcaagaataggggttcaaaacaaaggagccaagtataccgaagtatcccctggtctggagcactggactgtctggtgcaccaggaaactcgacgcccaactcttcaccttcgggaattttcagaggagctccgctataattcaccggactgtccggtgcaccaccggacagtgtccggtgccccaagggagagcaactctgaactcgcc

SEQ ID NO: 37770 - DNA, 220 bp, Zea Mays
cgcgctcccaaacaaccgtccggcctcctccccttccattctcctccccacgccgccattcgctctgctccaaccgcgcttatagcttctatccctcaccggttgttattcctctccctagataagctttatctcaccaaactaatcacgctataaacaaggacccgatttcatccagtaatcccgctataaacaaggaccagatttcatcctttgcgag

SEQ ID NO: 37771 - DNA, 373 bp, Zea Mays
cttgatataagaaaaatgttggcaattcgatgggttcggaccgtggatggatgattcccttcgtagtcagaaatatctcctcagcccatgaacctttgcttgtttacggaaaaaggaagtgcatgggcaggcccaatagcgatatatacttttggcacgttttacgtctacaatgcaagcacctgtaatcggtccccttttagagcaactccagtagttctttaaaagactttctaaatcaataatttagttagttaacataaaaattattctccaacagtttctaaataaactttctaaatttaacaacttgtcatctaaccttattttctctctacatttggcaaccatttaacaactcgctaaataaaaa

SEQ ID NO: 37772 - DNA, 301 bp, Zea Mays
ctttttccaaagcttcgtttctcagtttgataactttggagcgtaaattattaaacgcaatttcataactttcatcttcggcgctcttttgcgctcttaacgcgttgcttaggatcaggccctatatgaaaaaagaattcatataagaaaaaaggaatgagttgcgtaaaaaaaaaaaaagaaaaaaaaatagggggttttctttctcaagtgtttaattcccgtaccttcaggctgttgtacgcgaggctgtctgcgagatcctctttcgtcatggcgcttaacccagcttcaagcttcg

SEQ ID NO: 37773 - DNA, 618 bp, Zea Mays
aaagttttgaactgagaacaggacacatgcttccaagttgcaatcttctgcacggcctgacaccgcaaccaatcgattcttcatattcctgacgcgctccaacatcagcctgctaacttttctaaggctgggtaagcttccttctccagagtcgtgtttcgctagctccgtcgtgtggggctcccccgcggcagtggcctgcaccaccagccacttggctcttcatggcgctcttccgcccgtcatgggcaccgatgatggtggcagcttgcactccatggcccccggccgcctgctggctcgtctcgtagtagtccgtggcgaagctagggatctaggactgtaccagctagcgttggtgccgacccacgctcagaatcagccgatcagcggaggccggcgggctaggttgggtcgcgctcgcttgctgagggactacgtcgctgggatcgccctctttctcggagactcgctttggttctagagaggataggtcgctttggttctagaataatcgactatcatcgagtatgcgacaacaccaaggcgctcgtccggcgagggcagttgcatgaaggaaaacatgaaacggttttcaccgtcggaattggatcggac

SEQ ID NO: 37774 - DNA, 346 bp, Zea Mays
ggaaggaccgaaaatcgaggaaggaagagcacgagcctcaccttctatcaagaaccatgacgagggtccattgacactgcatcttgatgttcacacctcggaaaggcctgactgggccgtcggagagctctccctcgctttgaccgcaagatgctcaggcccccaccatcttaccaagttcagaccctgccacggcaatccccttagtagtggcacctcgagcggcaacgcgagccctgtgcctcctctaaaggctaggctgccaccgaacaactgatgtctaggctcgggggagaaatttgctattatggagatcctcacgtgcggcttcgacgttttggaggcg

SEQ ID NO: 37775 - DNA, 297 bp, Zea Mays
caggagaaggtgctaggaggctagggggctgggggttttccgctgggaattggggatgcggctaggtggctaggggcttggcggctagggctagcggcgggtaggttttgttttttttttctttttttatttctttttctaaatttgaaatacatttttaaataatcctaaaattcatagtaattaaaccaaattatttataaataaaatattaatttttgtgctaataatattatattttttttatttactaggatttttatttaagaagaaatgttattcaataaccaaaaatca

SEQ ID NO: 37776 - DNA, 906 bp, Zea Mays
cgaaacgccgacagaggttttcaaaacctgtaaataaaactaacagcaccatggctaacatccacacatatacatcaaggcctcgataaccacatatacatatttgtactcacatattcatgcatcgttgttctcacaattcacaatcacacacaaaaacaatagttcactaataataaatttcatacttacagttcaaaataacttagcacaacttcacaagtcacaatttcacactcacaactaaaaataactaggtccaaacatcaattgctagccaaacatcatacaatttctatgtgtgttgcaaatggcaaaaaagagtctttacctttgcttgatcgaagcactggagagggcacggatccgaggtggcggtgcattagctggagcgggggaccgatggacgaggatggccggagccagcggggacaaggggccggagtcggcgtggacggtggcgcgttggccgatggcgctcaggcgggcggcacgagagtggggaggcgctggcgcggcggcgagcgggcgggctggcgatggcgagcgggcgggctagcgacggcgagcggcagttgagcatgcgaaagaatgggaccgcgggcccagtcagtgttaagtaaacgttctttgccgagtgccggcgacctagcactcgtcaattttttttatttaaaaatatactttgccgagtgtcatggatcttacactcgacaaagattattttaattcaaaaactactttgccgagtgtccctttgtaggtactttgccgagtgtccctctatagatactttgccgattgtctgatctaggacacatgacaaagtatatttttatttttatttttttcaccaaactttttgtggtttgttcctatagtatagacctacatgttctattggca

SEQ ID NO: 37777 - DNA, 392 bp, Zea Mays
ttgaaaacaaaatatccccaactccaattctccatctggtcatctatgcactttcattaaactctaaaattgtgttgcttgctcgtttttttgctaaactttggtctacttggttagaatggaaactgaaattctcgattttacatgtcctagatacatattttggttatagttttctaaaaaccgattttctaaaaaaacaaataaccaaagaatcacgcctagttggaaagtaaacatggccaatgggcagtgtcaggccgaacaacctaaacccgtcatgggtcaagccgatttaatcaggtcgagaaacaacatagataaatagcgggtcatgtcatgctctgtgggtcaaaatatgagcccaaacatgacctgactaggtttaaatg

SEQ ID NO: 37778 - DNA, 407 bp, Zea Mays
catttgcagcggaaataaattctttattgcaaaatgattacatgttacaataagtttacattatacaattatcggagtgattacaaaagaaaatgattaaaaagaattacaatttaaaatgtataaaatatttataagttttaaaatacatgctagcttaagtgacaatcctcaatagagaaactaaagacgggatatacttatagaagaaggccgagtccaccggcacttagcaccatccacaacagaacaaaattacaacctgaaaaacaacagggaataaaactctgagtacgcaattactcagcaagacttacccaactaaagaaaagactcagtttgatggtttgatgggaatcaaggtaaggcttaccaaatttcaaagactcagttttgcagaaaagctt

SEQ ID NO: 37779 - DNA, 532 bp, Zea Mays
attctttattgcaaaatgattacatgttacaataagtttacattatacaattatcggagtgattacaaaagaaaatgattaaaaagaattacaatttaaaatatataaaatatttataagttttaaaatacatgctagcttaagtgacaatactcaatagagaaactaaagacgggatatacttatagaagaaggtcgagcccaccggcacttagcaccatccacaacagaacaaaattacaacctgaaaaacaacagggaataaaaccctgagtacgcaattactcagcaagacttacccgactaaagaaaagactctcaaggatatgctagtttgatgggaatcaaggtaaggcttaccaaatttcaaagactcagttttgcagaaaagcttactagtagtggatccttaagccaaacttttacttcacaagttaagtacttctcctgaatctagattcgcttgatctagagcattcacttgtcctatactagcttcattttagtatctttagtttcacttgttatctac

SEQ ID NO: 37780 - DNA, 345 bp, Zea Mays
ccagcttctagtctccaccgcaacttctgcagcacattacaacacatgttccctgcaggctgcaacacatgttccaagtacaaacgcatgtaggccctgctaccgtgattggaggttggcagaggctgctggagtgcgagcaggagcacgaatcgggcagggcacggctggagtggaggttagactggcgagcggcggtgccttgctccctcttccacgagcagagcaggggctcggacaggacagtgccttgctctccttccacgacgaagcgagagcagggccgacgcaaactgggcggccggccggccagagctcgagcagggcctgctgcggcggtccggg

SEQ ID NO: 37781 - DNA, 1070 bp, Zea Mays
ctattggtttgaaggaagtccttgcctagcctagagttggttgggtgtggctagtcacctactcctagatgatgtggtgtttacatcagcttaatatgtttgtcaaatgtgtgaaggattaggggttattattattgactttgtatgtctggtactttgagtgcatcgtatgatagaatgaaatgtaagtttctgaactacagtagatgaagacttatattatgtgtaggttatccttactagttggatatttttcttagttgagatgttgaatgaagtatagtgacatgggttaagcaagtattgtgttgttgttgggctatcagtgctctatgtagagtttttggcatttcttcgatgaactatgccgcacaagatgttattggcttcttttggctttattgctccattagttctatagattttctcccttttggtggggtgtaaggaatgttagattacatgattatcttttcatgatggcaagaataaggtttagaaagattaggagttttgttccaatagaactacttgtttcatggtgctttaaggtgaggtgtttgatcttcttatacattcgtcgggtgtagatgtttcaccatttaattaaaattaatggttgaagttggtaagggttgtgcttggtccatattaccccttcataaaagagtgttgtcttaagacattgatgttgatgtatagctgcatccaaatttgatggtgtgaaattgtagtgttgattgcaactatgacatgctttgagcttcattacatgttgtttcatgcttaatgtcaggtcgtgtagtttccttagacaattagtccaaggtagaagttcttgtgttaattaagaccaataatggatccatgttttgaattgtggtgctatatggggtaccttgggtgttttgcttggagtggccgaattcgaggtcgaattctttttaaggggggtagagtgtaatatcccaaaaaaatgttgaccaaaagttaatctctggtgcgtggatgaggtaaagggttgtgggccattggatgcaaagatagaagtcatctgaggcgtcgtttct

SEQ ID NO: 37782 - DNA, 286 bp, Zea Mays
ttaatcgggttgatcatcgattaatcgtgattagtcggctgatcgcccctctggcgatcagaaacgatcaggcaatctgaaaacattggccgccaaacctccagagcgactcccgcgagccgtgagcaccatagccaaatcaacgcaccagaagctttcacggagctgtctcgtccacgagtgtttcagctgactcctattccctgcgtcaatggcgagctctggcgatgaagggcgtgtggtggtggacctcggctccgcggcggagtcggtggctgccgacgag

SEQ ID NO: 37783 - DNA, 1038 bp, Zea Mays
gtcgaagatgacatgacgagagatgatgatgcggtgggaggtgaggtccagacaccggtaccccttgtggtcaggggagtagccaaggaatagacagcgggcggagcgaggagaaagcttatgtggagcggtagcggaagtgttagggtagcaggcacagacgaacacgcgaaggtgttcataggaaggggctgtgccgtatagggcgaagtgaggggtagggtggcgcaccgccttcgagggaagacggttgaggaggtgggtggcaatgtgcagggcatctgcccagtagctggcagggagagacgcctggaagaggaggcagcgaagcatattagtggtggtgcggatcatgcgttcggctcggccgttctgtgcagaggtgtaggggcacgagagacgcaactggacgccatgagtgaggaagaaagagcgagaggcgttgttatcgaactcgcgaccattgtcacactgcagagcacggaccgggcgacgaaactgagtggatacccaggtgaagaagtgtgtgagggtggtgaatgtgtccgacttcaaccgaagcgggaaggtccagagaaagtgggaaaaatcattcaaaatcaccaaatagtatttataaccagaaagactgagtacaggggaggtccaaagatcacagtgaaccaggtcaaaagcctgctcagcccgagaagaagaagtagtaaatgggagatgagtatgtcggcctaactgacaagcatgacagagaccctcaaaatgtcccctgctacatgaaggatctagactactggtaatcttggacatgacgtcgggtccaggatggccgagacgacgatgccatgtggtggaggaggtggtggagaccaggacagggggtggagacacgccggcggtggagggctggagcatgtagagcggccccgagctgtcacagcgggcgagaagggtcctggtggccagatccttcacagaaaaaccagaggggtcaaactcaatggaacaggagttgtcagtggtgaatcgacgaacagagtgaag

SEQ ID NO: 37784 - DNA, 781 bp, Zea Mays
cctaaacctaaacctaatttgataccatgttggaatacgaacccatacccctaaccagggatggggagtagtattaatagacttagtaactgggccagggccattacagtgaggggtgagacggtaattacaaggggaacatcccaaaccctagaatcctggacgggtagtctaacaagaacacctctgctgcctttatttctgtaccatggattttgcatgtatttttcatagttgaatcttgaaacttccaccggaaaatttccttctttattgttaaggtacttattgtgaatagccattaaccacccggagaggctgcaatggttgaatatcttggtaatatgcaataattagctatgtgacagtttgttggaatacatgtctctgattctgttgattttttggatcctatatttattccagagctattgatattcatgatatgaggcctgcccaggatgtttattaagatttgaccattgttggttgattcagaattccagatattgtatttcacctttgaactgttgatttttttggggatggggctacattggtatcgaacaagacgtaagtcttttttttgttctggatggtttctagttggagctatggtttatggcttcacaccactaaaacaggcattgtttggttgaatttaccaaacatgcttgcattgacatatcaggataacaggacctgaaacatagctgcaacccttttattaggttcctgaatataggaatggaacatttgtggtatccctgacctgtctgct

SEQ ID NO: 37785 - DNA, 1694 bp, Zea Mays
caaaataaaaacaaagtcatctgattccaaggttcttgaaagcttaaatttgaaagtactataggttttaattctctatcaagaactagtagtgttttggcgaacatgtataaataattcttgggtaacattttgcttaatattaaacgattcagccaaaattcacaccatcaatatatgtgatttatggtggtcaattggaacatgtataatgtttccagaagtttatttgacactatactgaagtttattatacactaggagtcccatgcagactgcatttttttcacacaaattctagaaagccctaattgaagcctaaaccatactatttcatcaaaatttaaccaagaagcatctaaattaaattgcagaaactcaaaatagagaattagttagaacgatccatttccggaaaagtttggaatcataaaagaaggcagtgccaatggttcaaaggctagaaaagtccaaaatggatactggacaccctttgttggccaaagcagagttagtcgtgtagaaggatgaagtgttatattgcatagagaatgggtacaatatatagtctcaaccctaaccctaatgggccggcagcccaacagtggtgccggcccccacacactcacacacacagtctaacatccccccgcggtcgcaacgggggcaccacacacgatgagactggagtagaggccgaaggtaggagctgacgggttgaaatccccccgcagtcgcagcgtcgtgatggtgcgaatgttgcggctgaagtagtgacctgtgtgtgctccaagaagacgatagcccctaaatgctgaggtagccgaagtcgaggtggtcacggtcgggagacgcgcagcagaagcctgatctttgggaggggtcgacgttcgagcgtcaacgatcggcagggcgacacaacaaaagggcaccggcaggccgaccttcctgcttcttcgatcatccgggcgtcaacgagccccgccagggaggccgacagtagcgcacgcgtctgcgccggtcatagtgtccgcgcccgcggcagaatagaagggggaaacggtagattcggccggaaaggccacgacagcgacggatccagccaggaagacgcgatccagccaaagggacggcggatcgagccggaaaggccacaacaacgtggatccgaccgggaaggccgcggcagcgacagatccagtgaaggcgaagaaaggggtgggcggcggggcgggtccagccgggtaggggcccgcgccagatttggcaagaggtgtgaacggcgccggcgacgggagaaggtcgaagaggaggcactgctgggtgacgatgcagttagaggcgcccggtaggcgcgaccatcgacgtggtccgaggatcagcccgccaatgtcagcgaagagggagtcgacgactagatccaaaaccatggggcgcgcgcgcccagcacggcagcgacgtctgcgtcgggggactcagaccctttcgcgactaagagcacgtgcaggacggtgatggagaggtggccggagctggaggccgtggtggctgcttctccggcccagtagtccccgccgcggccgaagcagaaatagaaagctagcaggagggaggcgagcaggacgaggaagccgagcgcgatggcgatggagtaaccgaggccgaggagaggaaggacaccgcgatggtcttgc

SEQ ID NO: 37786 - DNA, 7963 bp, Zea Mays
gttacacctatttcctaattgattttggtggttaaattacccaacacaaataattggactaactagtttgctctagtgtataaattatacaggtgccaaaggttcacacttagccaataaaaagaccaagaattgggttcaacgaagagagcaagggttaaccgatggcagccctggtctggcgcaccggactgtgtccggtgcaccaggggacttcaagccaaactcttcaccttcgggaaaatccagaggcgctccgctataattcaccggactgtccggtgtacaccggacagtgtccggtgctccaggaatgaagcatctctggaactcgccagcttcgggaattcgctccgctataattcaccggacatgtccggtgtgcaccggactgtccggtgagccagcggagcaacgactacttcgcgccaacggtcacctgcagagtcatttaatgcgcgccagagcgcgcagaagtcaggcacgcgcgaagtggcgcaccggacactctacagtacatgtccggtgtgccaccggacattcaggcgggcccagcagtcagagctccaacggtcggaacccaacggcctagtgacgtggctggcgcaccggacactgtccggtggcgcaccggactatccggtgcgccatgcgacagcagcctccaccaaacggctagtttggtggttggggttataaataccccaaaccaccccacattcaagtcatccaagttttccaccttccaaccacttacaagagctaggcattcaacacaagacacacccaagtgatcaaatcctctcccaattccacaaaagcattagtgactagtgagagtgatttgtcgtgttcttttgagctcttgcgcttggatcgctttcttctttctcattctttcttgtgatcaatattcacttgtaaccaaggcaagagacaccaattgtgtggtggtccttgcggggaagttttgttccaagttgatttgagaagagaaagctcacttggtccgagggaccgtttgagagagggaaggggttgaaaaagacccagcctttgtggcctcctcaacggggagtaggtttgcaagaaccgaacctcgaaaaacaaatccgcgtgtcacactcttttattcgcttgcgatttgttttgcaccttctctctgacttgattatatttctaacgctaacccggcttgtagttgtgattaactttgtaaatttcagtttcgccctattcacccccctctaggcgactttcaattggtatcagagcccggtgcttcattagagcctaaccgctcgaagtgatgtcgggagaacacgccaagaaggagatggagaccggcgaaaagcccactacaagccacgggaaggcttcatcggaagagtcccacaaaaaggggaaagggaaggagaagaaagcctcttcccacaagtcgcatcggagtggcgacaagaagaagaagatgaggaaggtggtctactatgagaccgacacttcatcaccttctacctccggctccgacgcgccctccgtaacttctaagtgccatgagcgcaagaagtttagtaagatccccttacactatcctcgcacttctagacatactccattactttccgttccattaggcaaaccgccaacctttgacggtgaagattatgctaggtggagtgatttaatgaaatttcatctaacctcactccacaaaagtatatggaatgttgttgagtttggagcacaggtaccatccgtagggtatgaggattatgatgaggacgaggtggcccaaatcgagcacttcaactcccaagccacaaccatactcctcgcttctctaagtagggaggagtacaacaaggtgcaaggattaaagagcgccaaggaagtttgggacgtgctcaagaccgcgcacgagggtgatgaactaaccaagatcaccaagcgggaaactatcgagggggagctcggtcgcttccgtcttcgccaaggggaggagcctcaagacatgtacaaccggctcaaaaccttggtaaatcaagtgcgcaacctcgggagcaagaaatgggatgaccacgaggtggttaaggttattctaagatcactcattttccttaaccctagtcaagtataattaattcgtggtaatcctagatatacactaatgactcccgaggaaataatcgggaattttgtgagctttgagtttatgatcaagggctcacagaagatcaacgagcttgacggtccctccatgtccgaagcacaaccggtcgcatttaaggcgacggaggagaagaaggaggagtctacaccgagtagaacacccatcgacgcctccaagctcgacaacgaggaaatgacgcttgtcatcaaaagcttccgccaaatcctcaagcaaaggagagggaaagactacaaaccccgctccaagaaagtgtgctacaaatgtggtaagcccggtcattttattgcaaaatgtcctatatctagtgacagtgacaggggcgacgacaaaaaggggagaaggaaggagaagaagaggtactacaagaagaagggcggcgatgcccatgtttgtcgcgagtgggactccgatgaaagctctagcgactcctccgacgaggacgctgccaacatcgccgtcaccaagggacttctcccaaacgtcggccacaagtgcctcatggcaaaggacggcaaaaagaaggttaaatccaaatcctccactagatatgagtcttctagcgatgataatgctagtgatgaggaagataatttgcgtactctttttgccaacttaaacatgcaacaaaaagagaaattaaatgaattaattagtgccatccatgagaaggatgatctcttggactcccaagaggacttcctaacaaggaaaacaaaaagcatgttaaagttaaaaatgcttatgctctagaagttgaaaaatgtgaaaatttatctagtgaactaagcacgtgccatgagactataaacaaccttagaaatgagaatgctaatttgttagctaaggttgattctattgcttgtaatgtttcaattcccaatcttagaaatgataatgatgatttgcttgctaagattgaagaattgaacatttctcttgctagccttagagatgaaaatgaaaaattgcttgctaaggctaaagattttgatgtttgcaatgctaccattttggaccttagaagtagaaatgatatattacatgctaaggttgtagaattaaaatcttgcaaaccctctacatctaccattgaacatacttctatttgcactagatgtagagatgttgatattaatgctattcatgatcacatggctttaattaaacaacaaaatgatcatatagcaaaattagatgctaaaattgccgagcatgaactcgaaaatgaaaaatttaaatttgctcgtagtatgctttatagtggaagacgccctggcattaaggatggcattgacttccaaaagggggacaatgtcaaaattaatgcccctcctaagaaattgtccaacattgttaagggcaaggctcccatgcctcaagataacgagggttacattttgtaccctgccggttatactgagagcaaaattaggagaattcattctaggaagtctcactctggccctaaccatgcttttatgtataagggtgagacatctagttctttgcaaccaacccgtgctaagttgcctaagaagaaaactcctagtgcatcaaatgatcatgacatttcatttaaaacttttgatgcatcatatgttttaactaacaaatccggcaaggtagttgccaagtatgttgggggcaaacacaagggatcaaagacttgtgtttgggtacccaaagttcttgtgtctaatgccaaaggacccaaaaccatttgggtacctaaagtcaagaactaaacttgttttgtaggtttatgcatccgggggctcaagttggataatcgacaacgggtgcacaaaccacatgacaggggagaagaagatgttctcctcctacgagaaaaaccaagatccccaacaagctatcacattcggggatggaaatcaaggtttggtcaaaggattgggtaaaattgctatatctcctgaccattctatttccaatgttttcttgtagattccctagattacaatttgctttccgtttctcaattatgtcaaatgggctacaactgtctatttactgatgtaggtgtcactgtctttagaagaagtgatgattcaatagcatttaagggagtgttagagggtcagctgtacttggtagattttgatagagctgaactcgacacttgcttaattgctaagactaacatgggttggctctagcaccgccgactagcccatgttgggatgaagaatcttcataagcttctaaagggagagcacattttaggattaacaaatgttcattttgagaaagacaggatttgtagtgcatgccaagcagggaagcaagttggtgctcatcatccacataagaacattatgacgatcgacaggccactggagctcctacacatggatctatttggcccgattgcttacataagcatcggcgggagtaagtactgtctggttattgtggatgatttttctcgcttcacttgggtattctttttgcaggaaaaatctcatacccaagagacattaaaaggattcttgagacgggctcaaaacgagttcggcttaaggatcaagaaaataagaagcgacaacgggacggagttcaagaactctcaaatcgaaggcttccttcaggaggagggcataaagcatgagttctcttctccctacacaccacaacaaaatggtgtagtggaaaggaagaatagaactctattggacatggcaagaaccatgcttgatgagtacaagacttcggatcggttttgggccgaggtggtcaacaccgcctgctacgccatcaaccggttatatctacaccgaatcctcaagaagacatcatatgaactcctaaccggtaaaaagcccaatatttcatattttagagtctttggtagcaaatgctttattcttgttaaaagagctagaaaatctaattttgctcctaagactgtagaaggctttttactaggatatgattcaaacacaagggcatatagagtctttaacaagtcctctggacaagttgaagtttcttgtgacgttgtgtttgatgagactaacggctctcaagtagagcaagttgatcttgatgagataggtgatgaagaggctccgtgcatcgcgtttaggaacatgtccattgggaatgtgtgtcctaaggaatccaaagagcctccaagtgcacaagatcaaccatcctcctccacgcaagtgtctccaccaactcaaaatgaggatgaggctcaagttgatgatggagaagatcaagcaaatgagccacctcaagatgacggcaatgatcaagggggagatgcaaatgatcaagacaaggaggatgaagaaccaaggccgccacacccaagagtccaccaagcaatctaacgagatcaccccgtcgacaccatccttggtgacattcataagggggtaactactagatctcgtgttgcacatttttgtgagcattactcttttgtttcctctattgagccacacagggtagaggaagcactacaagattcggattgggtggtggcgatgcaagaggagctcaacaacttcactaagaacgaggtatggcatttagttccatgtcctaatcaaaatgttgtaggaaccaagtgggttttccgcaacaagaaagatgagcatggtgtggtgacaaggaacaaagcccgacttgtggccaaaggatactcccaagtcgaaggtttggatttcggtgaaacctatgcacccgtagctaggcttgagtcaattcgaatattattagcctatgctacttaccatggtttcaagctttaccaaatggacatgaagagtgccttcctcaatggactaatcaaggaagaggtctatgttgagcaacctcccggctttgaagatagtgagtaccctaaccatgtttataaactctctaaggcgctttatgggctcaagcaagccccaagagcatggtatgaatgccttagggatttccttatcactaatggattcaaagtcggaaaggccgatcctacactctttaccaaaacacttgaaaatgatttgtttgtatgccaaatttatgttgatgatattatatttgggtctactaaccaatctacatgtgaaaagtttagtaggatcatgacacaaaaatttgagatgtctatgatgggagagttaaagtacttcttaggatttcaagtgaagcaactctaagagggcaccttcctaagccaaacaaagtacactcaagatatcctaagtaagtttgggatgaaggatgccaaacccatcaagacacccatgggaaccaatgggcatctcgacctcgacacggaaggtaagtccgtggatcaaaaggtataccggtcgatgattggctctctactctatttatgtgcatctcgaccggacattatgctttccgtatgcatgtgtgcaagattccaagccgaccctaaggaagctcaccttacggccgtaaaacgaatcttgagatatttagtttatactcctaagtttgggctttgggtttggtatcctaggggatccacttttgatttaattggttattcggatgccgattgagtggggtgtaaaaataatagaaagagcacatcggggacttgccagttcttgggaagatccttggtgtcttgggcttcaaagaagcaaaattccgtagctctttctaccgccgaagccgagtacattgccgcaggccattgttgcgcgcaactactttagatgaggcaaacccttagggactacggttacaaattaaccaaattcctcttctatgtgataatgagagtgcaatccgcatggcggataatcctgttgagcatagccgcactaaacacatagccattcggtatcattttctaagggatcaccaacaaaagggagatatcgagatttcatacattaatactaaagatcaattagccgatatctttaccaagcctcttgatgaacaaattttaacaaacttaggcatgagctaaatattcttgattctaggaacttcttttgttgatttgcacacatagctcatttatatacctttgatcatgtctctttcatgtgctatgactaatatgttttcaagtgaatttcaaaccaagtcataggtatattgaaagggaactggagtcttcggcgaagacaaaggcttccactccgtaactcatccttcgccgtcgctccgagcaactctcaatctttgggggagatagcataagtcccaagcaaaaggactccgtctttggtataatcttcactcatttatttacgaccaaagggggagaaagtaattctaagggctctaatgattccgtttttggcgatttatgccaaagggggagagagcatgagcctaaagcaaaaggaccgcaccaccaccaatttaaatttttttggtctttcaattggtactaattttaggaagagtttttatggtctttcaattggtactaattttagaaagagtttttaaattgatatgattttcaaattggcatctctttgtgttcaaaagaggaagagggtaatattttcaaaatcaatatcttaaaaccctcttgaacactgaaaggaggaatttatcaagggggagttttgtttagtcaaaggaaaagcatttgaaacaggcagagaaaatttcaaatcttgaaaatgctttgcaaaatcttattcatttacctttgactatttgcaaaagaacgttgaaaaggatttacaaagaatttgcaaaaacaaaacatgtgctgcaagcgtggtccaaaatgctaaaaatgaagaaaca

SEQ ID NO: 37787 - DNA, 57 bp, Zea Mays
ttataagaacatgtcagtataagtaaatgatctcctgattttatgatttgaagggtg

SEQ ID NO: 37788 - DNA, 1308 bp, Zea Mays
ggaagatatagagtacaaaatgtgacgcaaaagcaaaatgccaagtcagcgtgaacaatacaggagtactgttcatctatttataggcacggatcgcagcccatgtaaaattacatccaggccctttgcatttgctaataactctatagtaattcatcggggtctagatagccttttcctctttaagtcggtttcctctttcctgtcatcatgccgaagctcccttgcgcacagcttcggctctgttccatccttcgtttcccttgtgcttcttcatactgtgattttgactcaagtccgaagggtccaagtccgaaggtacatgctcatgtattatactccagaaacattgttaaatcacgtttttgaggaccttcggaagccgaaggcccccaacaggagtccattttgaaatgtgagggtagcgtagggggatcttactaaacttcttgcgctcatggcgcttagaagtgacgaacggagtgtcggagccggaggtggatggcgacgaggaatcggtctcgtagtagaccaccttcttcatcttctttttcttgtagccactccgatgcgacttggtatgtgaaggggctcccttcattttgttgccggactcccccgatggagcattcccatggcttgtagacttgtcaccgccggtcacgatctccttcttggcgtattctcccgacatcacttcgagtggttaaactctaatgaagtgtcgggctttgataccaattgaaagtcgcttagaggggggtgaataggcgaaaactgaaattacaagactttaagcacaactacaagccggggttagcgttagaaataaaaccgagtccgaaagagaggacgaaaacaaatcaaccaagaaataaagtgagtgacacagtgatttgttttaccgaggttcagttcttgcaaacctagtccccgttgaggtggtcacaaagactaggtctctttcaaccctttccctctctcaaacggtcacttagaccgagtgagctttctccttaatcaacgggtcacttagaccccttacaaggatcaccacaacttggtgtctcttgcgttgattacaagtgtcttgagaacaagaatggaggaagaagaaagcgatccaagcgacaagaactcaaatgaacatgaaaatctctctctcacaagtcactaagtgtttggagtggttttggactttggagaggatttgatctcttgtttgtgtcttggagtaaagtctagagctcttgtattgaatgcaatatgctggaaacttggatgccttgaatggtggtggttgggggg

SEQ ID NO: 37789 - DNA, 215 bp, Zea Mays
tcaggatataactttgtgctgctgtgatggtgttaagtgccagtgggctcggccttcttatataagtataccccgtctttatcttcttactgaggatggtcatttgagctagcatatatttcaaacttatactcttgtaatcactccgataaaatattgtaaaatttttgtaacctgtaaaatttgataataagatttccgctgctaaaatgttg

SEQ ID NO: 37790 - DNA, 387 bp, Zea Mays
tacaggtgccaaaggttcaacacaaaccaatcaaaggtccaagattgggttcaaaagaaaggagcaaaagaaaaccgacggctaccctggtctggcgcaccggactgtctggtgtgccaccggacagtgtccggtgcaccagggtggatcatctccaactcgctaccttcgggtttctggaaatgtcactctgttataattcaccggactgtccggtgtagcaccggactgtctggtgtgccagcggtgcaacgtctacagcgcaacggtcgactccaacggaaacctgtaaaagcgctacagtgcgcggatagtgcgcgcagagtcagagcatgtgccagaaggcgcaccgaacagtgaacagtacttgtccggtgcaccaccgga

SEQ ID NO: 37791 - DNA, 280 bp, Zea Mays
gacgagttctaggtgtgggttggcggcaacccccagtcagctgcctgtgaaggccctatcttttctgcgtttcgcttagcacattgatttacccgttatttggatgactatgtggatgtctctgactctgtgttgtaataagttaatactcttttatgttattattcgagcactatgcgatgatgttcatttatgtaatcgctgtgtacgtgagttctgatcctggcacgtacatggttcgcattcggtttgccttctgaaaccgggtgtgacattcttc

SEQ ID NO: 37792 - DNA, 564 bp, Zea Mays
tgcagcttcatatccttagaggtatgaaggcagaagtcatccttgcatttgcagacatttgcattcatgaggaatatatgaagtgtgacattactatgttactattgtggttttctacctgcgaggtgtggtaactaggtgtgttgtacgttgtatacgtgatgcaccttggtaataagaaggttgtggaatcaggtggtggtaaaacaatgttcttatgtggttgaatagtttgatattattttacttgctgagatgtgtcatctcactcttgcattactcaatgcaggtacttgatacatgttgggaatgaggggagtagcagcacgtccacttacactctcacaataacgctgcccaggcgcagccatgatttaattagaaacttattgtcaaaggaagtttgtttttttatatagtcgtgcgcactggttaattcagttcaggtcgtacgtttatctttccttgctagctgattaataatacttagtatgtttttgtcatgatatatgtttataccctgttgcccccttatttatgcaatcttgcaaaggggatgctgcc

SEQ ID NO: 37793 - DNA, 326 bp, Zea Mays
aaagagtgttgtcttaagacattgatgttgatgtatagttgcatccaaattcgatggtgtgaaattgtagtgttgattgcatctatgacttgctttgagcttcattgcatgttgtttcatgcttgatgtcaggttgtgtagtttcctcagacaattagtccaaggtagaagttcttgtgttaattaagactaataatggacccatgttttgaatgatggtgatggggtaccttgggtgttttgcttggagtggccgaattcgaggacgaattctttttaagtggggtagagtgtaatatccccaaaacatttttggaccaaaagtt

SEQ ID NO: 37794 - DNA, 1274 bp, Zea Mays
aattgtagatctttctgtgtccgtgaagaacacctcaatcggacatcagatcagaaagttattgcagtttgattatagcagtttttcagtctcataattctgtgcagaatctgttctcttaagagttaggcaattttatcaacagaattaaactatgggttggtaaaagaagttgtagataatttcataaactttccagattgttaaagagtgcattcatatgatttgtgaaactccagttatgtttgttaaactgtggctgttcctgtttgcctgacaaaaatgagcgggtctgttcactggtaggtttcatcaggtaaatggccgaattggctcttccaactatggagacttatgtagagggataaatgttcttacttccagtagaattccatgatttttggttgagtagtttgtgagataccgaattttgaagttaactacactgctgtctgaaacagattcagtcagttatcttgttagaggttttagaacttgtagatggcagaatttaattatccattgaataccgaagttgtagagtattttgtgtagatactcctagattatttgtttgctataacaactgttataattttaaagatacaaaattaacaaacagcgctgctgctgtatgtcatgtggttcagggtgggagtctttccaccaggtcttggtttcaagtgtaggagcgatttattgattgttgtcaaatgtttgtgaaatatttatactaagttttatgcccgctagcaggtggctacacttcagatcatgcatagtacatttcttcttcttcgatgaaggcaagtgaatgtagcagtggttgcttccgttctgacctgttatttctattgcctacactctaatattcagaagtattggattctttcataattggactctatggtgatgctttacttgcttgcattatgctgatgctcaatcatatattgatgatgataatgattcgagtatgactcgtgagattaattcacaccctgaaggtaaataaagtattatttgaggttggtattgtatctgaaggtaaatgaagtattatttgaggttgtattgtatgtgaaggaagtgaagtatattgataaatgcagcatgccatatacattgcatgattcacttgcatctgaagttttgtcgtgacctatggtccaaccgtaccggtacaacttagcatcgtacgttgcccgagaaggggtacgatgcggcttcatacccttagaggtatgaaggcagaggacatatgcattgcattc

SEQ ID NO: 37795 - DNA, 824 bp, Zea Mays
gccgctgttccgtcgctttcatccgctcgaccacccctggatacaatccagccgcgcgcagccggccttctcccatcttccatggcgtgccccagcctctgctcctcggttctcctttcctgtgcgccgtcacatctccctgctcgttcccatggctcgcccccttcgtctcctcgtcgtggagcttccttccccagccgtgaactcccctgcgcagaccgctcctctcctgcttttcctacgtcgcccagttccagtgcagcggtctcccagcttcctctgtccgactgtccgcttcccatggccggcgcttggccccagctcgccgcgccctggaactccctggcgtgctcgcccgtccgggctctgcccagcgccgcggcttccagctcgctctccagcctccctctctcctgcgccgcaccttgctctctgcttgctgctcgccggtgctccagctatggcgcttcgtcgtcgcagttctctgtcctctgcacgcacctccctgtccacaacgccgttgttccgtacgcttgacccctgaaatcgccggccgtgaccctacggtggtgatgcaccctcgccgtttttagtccctgctcgcctcactttccatggatgcacgcccgcctcgccgttcctctagctgtcgcgctgcgctgttcttagtcgtcccggctctgcctagtcccttgtccggctgagcaagcccctggtgtcgtattcctctaatccaatcttcagtctgtagccgagtccctccgcgcgctcctgtgccatggtcgccgtggagcctcaccgccacagtcccagctcggagctcc

SEQ ID NO: 37796 - DNA, 56 bp, Zea Mays
ggattttttgtgtgtatgacatgtgggaccagtggcacacaagggatgaaaataat

SEQ ID NO: 37797 - DNA, 1112 bp, Zea Mays
ctctacaaatgtctccatagttggaacagccaattcggctatttactatatgaaacccaccagtgaacagacccgctcatttttgtcaggcaaacaggaacaaccacagtaaaacaaacataactagagtttcataattcatatgaatgcgctctttaacaatctggaaagcttataaaattgtctacaacttcttttacaatcctaaagtttaattctgtagataaaattgcctaaatcttaagagaacagattctgcacagaattatgagactgaaaaaactgctataatcaaactgcaataactttgtgatctgatgtccgattgaggtgttcttcgcggccacggaaagatatacaaattatctacgactcatagacagacgttttatttttttgacgccactaagatcacggaaaactggcatgaacagaaactgttgaatctgccatcctgcagaaactaatttcgagatcaaaaatctaatctcccatctaatccaaccaaaaaaactaattgcagggcctaaaactcatccaaaacaagagaaagcattcatcaagtggagaaaagagagagaggaaaggaaatccaaccaattcttggagaggaacgatgatgatgagcgacggtatgccctcatctcccctctcttctcttcttttttcttcctctcatctcttggggcaaggcataaaagggtgacggctgctaggggtgggaggacgtggattctagggttagggaggtataaatagaaggaaacttccacaatcctaatatccaatggctcagatcaaccgacactcgaaaagactcatctggacttcaaacaaggcaaactagtgattgatcggaatcatcttgatgagaactatacatctacggcctccgatcatccataggacacaccatatttggattataaaaatggtttatttttttagggtgttacacaaagaaagcacaaagtaaggttggggagagcaacatacgcaagactcaaatccacagcacaaccacgcacataagtcacgacttgagctcaaaacacaacacacggagtttgcaactcaaatggagctcaaatcactaacacagagaatcaaat

SEQ ID NO: 37798 - DNA, 432 bp, Zea Mays
gcgccggcaaggggaagctacagggggggtggcgcccatgggagcttggctgctcgagcttcaccggcgccatggatctagggagctgctactcgccggcagcaagggcaccgagttgggctggaagcagccgcggagggagctcgcccatgccatggatagcagggggaaacgctggggagctcgaccaacgaggttgctggtcgaccatggagacaccctgctgccgagcgccatggatccagggagggaggtgctgctgccctgcgctcacttgaacttgagaagggtggcgtccagggtcagcagagagaggaagggcgccatggagcaggggaaaatggagaggggcgccggccatggagagcctgctggcggccatggacagagaggggcgagctgcagaggggcgtcgctggggaagggcgccat

SEQ ID NO: 37799 - DNA, 300 bp, Zea Mays
cacaggtatagatgtatataagcaccaagcaccaaagcatgtcgcgaagcacgtttttttttttttttttttgcccagtccgaacccggtctgacccgtttttatacaggcctaggtctggacagaaaactaatcacggtgaactcgttcgacacagtccgtttacctctaatcctgtcaaacccgcttttttgcactaaatcgtacttactggcccgttttttggctcgcttttttcgtgcttaccagactggcccagccgtttaggcccgcagcgggccggactcagataggggaacg

SEQ ID NO: 37800 - DNA, 242 bp, Zea Mays
ctgaaactgccgaagccgaagctactgaaatgaaaactgctgaagctgaaaccggcgaagccgaaactaccggggccgaagccggggccaccgaagagtcgaacctagaagccacacttgaggttattgacaatatactcctgaaaatgactgaagaagaagctactgtggctgcagtgaatacggcaactgagaaggggaaagagcagattgatgaaatttcagaagaagaagattttaac

SEQ ID NO: 37801 - DNA, 517 bp, Zea Mays
cccctcccctattcccctttgtggccgccaccccctctctctctccctctccttctcccccaagtgattgcaacaccacccctcaaccctagccgccccctcctcctctccatggtgcagcctccccgcttggtaccccgtcgtgtgggtgcgagtcttccattggagtttggagggaggaagaaggaagaaaggaaggaggaaaggaggaacccaaggtgattttaagatcattctttttagtatttgtgctgcaatccaattgattacatgtttacctatgcgaatcggtataggtgctgtccagatttttgtgggaggacgaacagtagtagttctagggatttctggggatttttcgtgggaaattagtgataatcaatatgagaatcatgtagatctttgtcatacctttccaacgagtacttatgcgctcgattcggagttataatttaggagatatcgttgtttgaatccggttatgttgctgtaaaaaaaaacagatttttcaggtggg

SEQ ID NO: 37802 - DNA, 810 bp, Zea Mays
ctcaattgtctaatattgtggatgatcataatttggtaatgatatatgtggttgattcccatcttggatgaagttgaagtgtctttttgaatcacgttatatgaagtgttgtaggcatatcatgcacatcgcatcatccatcttgcattttgaagttatgtcgtgatcttatggtccgactgtaccggtacatttttagcatcgtacgttgcccgaggaggggtacgatgcggcttcatatccttagaggtatgaaggcagaagtcatccttgcatttgcagacatttgcactcatgaggaatatatgaagtgtgacattactatgttactattgtggtttatacctgcgaggtggagtaactaggtgtgttgtacgttgtatacgtgctgcaccttcgtaataagaaggttgtggaatcaagtggtggtaaaacaatgttcttatgtggttgaacagtttgatattattttacttgctgagatgtgtcatctcactcttgcattactcaatgcaggtacttgatacatgttgggaatgaggggagtagcagcatgtccactttcactctcacaataatgctgcccaggcgcagccatgatttaattagaaacttattgtcaaaggaagtttgtttttttatatagtcgtgcgcactggttaattcagttcaggtcgtatgtttatcttcccttgctagccgattaataatacttagtatgtttttgtcatgatatatgtttataccctgttgcccccttatttatgcaatcttgcaaaggggatgctgctgaaattttatatatggatg

SEQ ID NO: 37803 - DNA, 206 bp, Zea Mays
atttttggagcactacttttgcataatagacttcacaaatagcatatgcacataagttttatgtgttaaaccttactaaaaaattatacacggtttatttggtataactcttacaaaatttgttccgcatttaactatcactacaaattaagtaaaaaataattggaggtgggagggttatttcaaaaaaaaaaattaaaaaaaat

SEQ ID NO: 37804 - DNA, 361 bp, Zea Mays
gtaaaacagtagaattcttgttggactggtgccctgggatcgggaacggacgtgagagtgagtttgggccgtggatctcgatccggcggtggggagcccattagttctccccccttaaccctagccgcccctcccctattcccctttggttgcagccgcccccctcccctattcccctttgtggccgccacaccccctctctctccctctccttctcccccaagtaattgcaacaccacccctcaaccctagccgcctccacctcctctccatggtgcagcctccccgcttggtaccccgtcgtgtgggtgcgagtcttccattggagtttggagggaggaagaaggaagaaaggaaggag

SEQ ID NO: 37805 - DNA, 1204 bp, Zea Mays
gacaacatctcctttgaaaattgcataaacggggaagcaacaaagtataaatagatatcatgataagaaaacataatcgacattaataatctgctagcaatgggaagacaaccataacagcatgaactaaattaaccagtgcgcacaactagttagaaacaaacattctttaacaagaagcttctaattaaatcatgactgcgcctaagcagcgttattatgatagtgaaggtggatgtgctgctacttcccacttccctggatgagcaacaagcacctgcattgagtaatgcaaaagtgagatgaaccatctcagcaagcaaattgttttgacaagatatttaaaccacaaattgaattaatcaacattttaaaagaatcacaattaagatcagaaatacttgtagatatagaactcagtagtcccaatataaccaataccatctcatttcctcgaacaaccacaataggttctataacacttcccttcgtcaacaaaacctgcaaatatcacttcaatgtatgcataggagtgcaaagtgtaggtactcagtcttcatacctctgagggtataaaaccacatcatctgcaaatatcacttcaatgaatgcatatgaatgtaatgcatatgtcctctgccttcatacctctaagggtatgaagccgcatcgtacccctcctcgggcaacgtacgatgctaagttgtaccggtacggtcggaccataggtcacgacccaacttcatatgcaagtgaatcatgcaatgtatatggcatgctgcatttatcaatatacttcacttccttcacatacaatacaacctcaaataatacttcatttaccttcagatacaataccaacctcaaataatacttcatttaccttcagatacaataccaacctcaaataatacttcatttaccttcaggggtgtgaattaatctcatgagtcatactcgaatcataatcatcatcaatatatgattgagcatcagtataatgcaagcaagtaaagcatcaccatagagtccaattatgaaataatccaatacttctgaatattagagtgtagacaatagaaataacaggtcagaacggaagcaaccaccgctacattcacttgccttcatcgaagaagaaaaatgtactaggcatgatctggaatgtagccacctgctagtgggcataaaacttagtacaaat

SEQ ID NO: 37806 - DNA, 407 bp, Zea Mays
gtgacatgtggttcagagtgggaggttttccaccacgtcttggtttcaggtgtaggagcgatttgttgattgttggcaaatgtttgtgaaatatttatactaagttttatgcccgctagcaggtggctacactttagatcatgcctagtacatttttcttcttcgatgaaggcaagtgaatgtagcggtggttgcttccgttctgacctgttatttctattgcctacactctaatattcagaagtattggattctttcataattggactctatggtgatgctttacttgcttgcattatacttatgctcaatcatatattgatgatgattatgattcgagtatgactcatgagattaattcacacccctgaaggtaaatgaagtattatttgaggttggtattgtat

SEQ ID NO: 37807 - DNA, 465 bp, Zea Mays
ctattgtggttgttcaaggaaatgagatggtattggttatattgagactactgagttctatatctacaagtatttctgatcttaattgtgattcttttaaaatgctgattaattcaacttgtggtttaaatatcttgtcaaaacaatttgcttgctgagatgtttcatctcactcttgcattactcaatgcaggtgcttgttgctcatcaagggaagtgggaagtagtagcacatccaccttcactctcataaacgctgcttagttgcagtcatgatttaattagaaacttcttgtcaaaggatgttgtttctaactagttgtgcgcactggttgatttagttcatgccattatggttgtctttccattgatagcagattattaatgtccattatgttttcttttcatgatatctatttatactttgttgcttccccgtttatgcaattttcaaaggggatgctg

SEQ ID NO: 37808 - DNA, 196 bp, Zea Mays
gtgacattccacaactttccaaagtgtatatataagcctatctcaaattcatgggggcgagagatggaaattaattctatagatttacatgttacttttctaatgtacaatttatagcacactcttctacttgtttctctataacataaatgtagtgtataactatctatctgatatgatttaggataacatacaa

SEQ ID NO: 37809 - DNA, 1140 bp, Zea Mays
agcgcatcagcttttggatttacctacttttctgctagcctccggtgccgattcagagggacatctcacctatctgccaggactgctttctctattgaccacgagtggcaggtatattgaggagagggtcatagtgttctatgctacagtgtggattgaccctgaccatcaatggctgcacttccgtttcgagagagaggatgtcactttgcatgccaaccagattcaccaactctttggatttctagagtcgtcgactcggctccacagtctgtgctacggcacctcggatcctccttgtcgcccttatggcagagttgcacctgctatagttcacgtcgtggccctgtccagacctcctttttcagatgggtcgcgacgatctcctgctgacttcactactgtagcgaagttcttatatgagttgatgagacggacacttctacccaggatggaatacagagaggctaccactcataattaatcagctatgcctacttggtgctttggtctcacattcagagtttgacatggttgacttacttatctgtgagatcgaggacacaatattggatggtctatgtgctcaccgtcagctgccatatgctcattatctctgtcacatctttgcacagctgatctggcctccttagttctagggaaccctcgaggcctctcgccttcagtttggttcctatcgtccagcccctaaggacccagtccctgtgccagacccaatatcagatgttcgggctgaggatgagaccttcagacagttcgagacccagggtgtcgttgctgacacttcttcagatgatgatgagggccttgggattctgccatcgcctcataagccacctcgctcacatgatcacgaggcaggtagatccaattctgctcctattgccccacctgctattgaccctgctttggctatgattcttcagtcacttacgcaacagcaggctcatccggcagtagagtaggctcgataggcagccatccagcaacagatgtccgaacggatgctctccatgttttagactatccaggaccgtcaggacactcttcagcagtagctcttggcagacagggccgagcaccaggcgtttatgacacacatccttcagcacaccggtg

SEQ ID NO: 37810 - DNA, 176 bp, Zea Mays
gattatttaaatatgtatttcgaaatttgaaaaggaaatagaaaaaaagaaaaaaaaaacaaaacctaatctaaccctagttggccgaaccagcccaccaaggcccagcaaccgtgctgccctaactcctagccgccgcgccctgctgccctccacagccgccgccaccaggactc

SEQ ID NO: 37811 - DNA, 897 bp, Zea Mays
ccatatagagaaccacgtgggacacaaccatagacaatcgatctattgcattaaggagaatgtgaggttgcatggcatgcaggtgggggccacatgatgcacgacctctggtggttgagcggcatgcaggttttttctatgtctggtagcacgcgtcgtgcgtgtggccgtgtgggtgggcccctgtggcgtttttttggctttcactgcatgcagatcatgcgcatgggagaggggtccccaagacaatttcttcctccacttttcctgcaaccgcatgctccatttttccttgtaaccgcatgcttggcgctcgctgggcctgaaccaccgtgaggaggggctaccaggtgctgggaaaaggaggccaggggcggcaccagtcaccggttgcctggcggccggtggtgactggtgaggcaggacagcaggggcacggggaggtgcgccgccgggaccaggcggagcttgcgggccggatgcggccagcggcggcggaggtcggggcggtgctacagtgcgtggctggggcaggacgcccgtgagtagcggctccacggcgacgctgccgttgctcggctcaccggggcgagacggcgatgcgcgaccagaccgcaggagcagggacgcacacgtgcagggaaggaagggagagaggagagctcacctcggcaacagcttcacgcaggctcctcggcggacgacggtgcgagctcggcgcggtggggcactaggtgacgggcgatggcacggctgcagatgcagcacggcgcgaacgacggtggcagcggaggtgtgggggtgagggagagggagagggagagggaaatggggtgctggggctccaaatggaaccggcgtgggggagtcatgcgtgggaggcggtttggagaagag

SEQ ID NO: 37812 - DNA, 263 bp, Zea Mays
aaacagtgtataaacatatatcatgacaaaaaacatactaagtattattaatcggctagcaaagggaagttaaacatacgacatgaactaaattaaccagtgcacacgactagttaaaaaacaaacatcctttgacaacaagtttctaattaaatcatggctgcgcctgggcagcattattatgagagtgaaagtgaacgtgctgctactcccctcattcccaacatgtatcaagtacctacattgagtaatgcaagagtgag

SEQ ID NO: 37813 - DNA, 216 bp, Zea Mays
aatcaccttgacttctccccctttcctctctccttcttccttccaccaaattccaattggagatttgcacccacgcgacgtagatcaagcgggagggctgcacctaggagaggagaagatggggggtggctagggtttgtgggatggtggctgcaagagtttgagggaggaggagatgagagaggggggcggctgcacaaaggctagagagagggg

SEQ ID NO: 37814 - DNA, 1251 bp, Zea Mays
actgcgttcagttatgaagaatcgccaacatatctgcaatggtattgaaacatatctgtgataggggatctctctatcgtaagcctttgcatgtactaaaaaagggcctacttcatcgttgactttcacccctatgtgccctccgatcctaatactatagcttgaatcaaagtgtgtcatttatgtgagaatcctttcatataagcattgcttgttcaaggaaaacacatttaactttatcatttgttttctcaaagtctagttttagaataatgccatctattttctttctataaagctcatgcatagtctcatgtagtaatataactccttcaagaatgtttcgtctaggcataaaagttgttggtgaaggtttaatctcacatttagcttgctctatagtagagtgattatcatccatcttataataataaaagttctccatgacatacaggtcactgtcagcatctgatgcacaatacttagtagtaagtgtatctcacaacaccttcccatctgtgtattgcatattagcatcaaccagacagttaacaaggacgctaagaattgctcccgtaaagataatattggcatcatcatacttttctcatcttcaggagtcagtacgccattatgtttgcctttaataacatggaacacattcttagcagtaagatagagcgtgaccgtgatttgccaccacttgaagtgcatagtagagaatttttcttggtttcatcgcatcggcaaaaccagccatagttaaaccaggaaattgtctataataaggtttttggattgttgaataattagacatattccagattaaatttcgaataaaagtcatgacgaacaataactattctaggtgtctattccacaacaagttacctaacatgctaatcataaaaaggtagcacacctctactataatagatgaactgaagtatgaggtcaaatcaaatgatgcgtactgatcaggcatactagtagtcaacgtgggtcgaagtagcaggatcgatgatgtcgaagcagtagggtcgacaacgtcgaagcagtagggtcaacgagaagaacacgagcattcacataaagatgcttcccaaaaaccttattcgtcctttcccggtgcaggatctcaaaggcgatgggttccagagacctgctttcccgatcgcagatgcacgtcggcgctcgggatgaagaggactacgatgacgacgcagaggtgagcggaggcaaaaacctaac

SEQ ID NO: 37815 - DNA, 381 bp, Zea Mays
ctcatcccccagcaagacgaatgacttggcgtgtcgggctaccctgccgagcctcggcttggtcggggggtagctctcctcggtggagatattgcaggtacggggtttgctagtcccggtcaggcgtggccccgttccgctcctcctcgatgcgcagcgcctcgctctcgggggccgagggtacctcggactgaaccgaggacgcctcgggctgaatcgaaggtgcctcgggctgaaccgagggtgcctcgggctgaaccgaaggtgcctcgggctgaaccgagggtgcctcgggctcgggcgtgtcgttgatcttgacggagggttggtgcagatcccgggagaagacgttcgggggaaccgtcgttcgccccgaggcta

SEQ ID NO: 37816 - DNA, 755 bp, Zea Mays
cttcaggtaggtgtagttggggaatgccatgaacttcgcgtaacatggcctccccaataccgcgtggtaggttcctcggaactcgaccacctcgaacgtcaaaaactcccttcggaagttaaagggcgttccgaagcagacgggaaggtcgagccgtccgaggggctggacgcgcttcccaggaacgatcccgtggaagggcgcagcacccgcacggacggaggacagctcgatgcgcaggagcctgagggtctcgtcgtagatgatgttgaggcagctgcccccatccatcaggaccttggtgagcctgacgtcgccgatgatggggtcgacgacgagcaggtatttccccgggctcggcacgtagtcggggtggtcagcttggtcgaaggtgatgggcttgtcggaccagtctaggtagactggcgccgccaccttcactgagcagacctcccgacgctcttgcttgcgatgccgagctgaggcgttcgccgcatgccctccatagatcatgaagcagtcgcggacctcggggaattctcctgcttggtgatcttcccttttgtcgttgttgcgggccctgccaccctccgcgggtggcccagccctgtggaagtggcgtcgaagcatgacgcactcctcgagagtgtgcttgacgggcccctgatgataggggcacgactctttgagcatcttgtcgaagaggttggcacctccggggggcttccgagggttcttgtactcggcgccggcga

SEQ ID NO: 37817 - DNA, 575 bp, Zea Mays
ttttaagctctccctggattcgccgaccctcggtggtggatggctccggcatcgtgcggaggagcatcgccgctgcggccaggttctgaccgaccccgctggatgcaggtggtggcctgaccctgatgacatcggcgacgcggcgctggagaccctggggcaggtgacgtatttctccggtcgggggttggcccgcccatacctgcccgacgtcccggcggatcggctcaagcgctcctgctccctcgtcgaggctggcctgcgccccgcggacttgctcgagctgtgggtcgtgaccccccgccggaacggggaccacagctagctcccgcgggatgtcggcgcgaggcgccggcctagggagatcaccgtcctccggcatgccgagacggttgtcatcggagggatcccctagctcaacgtggaaacattcgcggcttgggccgcagtccttgtcgtcaaggctgcggctaccgtcggaacagtcggagaggcagtagtcacatgcggccataaagtcccgcatggcactggggctgccaaatctagagaaatcccagcagatgctgggatcg

SEQ ID NO: 37818 - DNA, 779 bp, Zea Mays
ccgagccctgggtcgggcggagcggagtttcttatggcgcctttggcagggccttcgcgttaaatgctcctgcaacttggtcggttggtgcggcgatttagtcagggttgcttcttagcgaaggcaaggcctcgggcgagccggagatgtgtccgccgttaaaggggggcctcgggcgagacggaaatccctcggggtcggctgcccttgtccgaggctaggctcggacgaggcgtgatcgagtcgctcgtacggactgatccctgacttaatcgcacccatcaggcctccgcagctttatgctgatgggggttaccagctgagaattaggcgtcttgagggtacccctaattatggtccccgacaataatcttgaggtagatgtacctattaatattgattttgttactcctattacacagttagtttcagtttatgtacctcttgttagcaacaatcactccattactcaagatagacctagaagtaatattgttttgccacatcgatatcgtgacactaatagtatggctcattatgctctcattgctgctcaagaaactaatgttgcatttgaaccttcttattcgaaagctatctcatgtgatgattcatccaagtggttagttgctatgaatgatgagtttgagagccttcaaaagaatggtacatggaaattggttgagctccctgaaggtaaaaaaccattaaagtgcaagtggatttatgagaagaaggaaggtatatctggagttgaacctgcaagatttaaagctcgt

SEQ ID NO: 37819 - DNA, 1480 bp, Zea Mays
tctctcctgttgttcgtctcacttctatttgagttatgcttgcttttgtttctttatttgatttggagttagagcaacttgaagttaaaattgcatttcttcatggagatttagatgaggagatttagatgacacaaccttagggttttactactcctggtcaagagcatttagtatgtcatttgcagaaatctctttatggtttgaaacaagctcctaagcagtggtataagaggtttgactcgttcatgcttgcacatggttattctcgaagcaattatgatcattgtatttatttgaagcaattcccaaatggatcttttgtgtatctactgctttatgttgatgatatgttgattgcttctcatgataagtcattgattattgaattgaaggctcaacttagtcatgaatttgataggaaagatttcagaccagcaaagaagattcttatgatggaattttagcgtgatcgtcatgctgatattccttttctatctcaaaaagttatattgagaaagttcttgaaaagtataatctcagtagttgcaaatctgttgctacaccatttgcttaacattttaaattgtcatcgaggcaatatccacttattgaagatgagaaagaacacatgtctcacataccgtattctaatgctgttggaaatcttatgtatgttgtgatctgtacaagacccgatttggctcatgttgttagtgtggttagcagatttatgcacaatcctggtaaagaacattggaatgcagtaaagtggattcttcgctacttgaaaggtacttctcattttggattattatttgacaagaattcagtgaatgaaattggtgttatgggatttgttgagggaattattgattttgactttgctggtgatcttgataaaagacggtccatatctggctatgtattttcattatgcggttctgtaatgagttggagggctttacttcagtctattactgctctttccactactgaagcaaaatatgtctcaactactaaacgggttaaagaagctatttggatgcaaggtcttatttctgaacttggtgttactcaggatgtcattaatgtttattgtgatagtcatagtgctatttgtctgaccaagaatgacatgtatcaattcaataccaagcatattgatatcaagtaccatttcattcgtgatattgttgttgaaggcaagattaaagtggacaaaatacatactgatgcaaattctgcagacatgcttacaaagccattatctaataccaagttcaagcattgtcttgacttagtaggtgttcgtggaggttagcaccctagtggtgtttggggaaaccattttataaatttagcgtcaaagggagatttattggataagatgatatgactctatctctatctcctttgcctataaaaataggtccccttgtaccctgtacaacacaccacataatagatccgttttctc

SEQ ID NO: 37820 - DNA, 219 bp, Zea Mays
ccaccaccagtactattcaaattaaatagcgggggaaagggggtttgggaggccgccaatagatttcgtgtgttcgagtttttttttctttctttttttttactcaaatttatgtagtttgttcgagatgctctaagataatcaattatgtcagcatgattaaaaaaacaaaagagcttttgtcgaatagtcacagaaaagaaattacatagacgtgac

SEQ ID NO: 37821 - DNA, 386 bp, Zea Mays
gggaagcaacaaagtataaatagatatcatgataagaaaacataatagacattaataatctgctagcaatgggaagacgaccataacgacatgaactgaattaaccagtgtgcatgactagttaaaacaaacatcctttgacaagaagtttctaattaaatcatgactgcgcctgggcagcgttattatgagagtgaaggtgtatgtgctgctacttcccactccccttgatgagcaacaagcacctgcattgagtaatgcaagagtgagatgaaacatctcagcaagctaattgttttgacgagatatttaaaccacattgaattaatcaacattttaaaagaatcacaatcaagatcagaaatacttgtagatatagaactcag

SEQ ID NO: 37822 - DNA, 208 bp, Zea Mays
caaggatcccatccttacctagggtttccccaagaaaatctgcaagagatgggggtagaacatctccttgatcctctcttcctcttcaatccatcttgctcctcctcttctcgatccttgctgcgtgggggaagatctagagggagaaggaagtagtggagggtggctgcaaggggaagggggaggggcggccaagggtggggaaaag

SEQ ID NO: 37823 - DNA, 347 bp, Zea Mays
ttctgtgttgagactgccctccgaggacatggattactcttccatttgactgatgcggcacctgttcttgctgatgatcgtcgcaatgctgctgatatcaaaacatggcagcttaatgatggtaaagtaatggctgctatggtgaacagcgtcaaaccgtcgatgattatgagcttgtctaaattcaaaactgctaaagccatctggtctcatttgaaggagcgttttgttcaggacagtggtgctctattacacactctcatgcagcagacacatgttattgagcaaaatgatatgagtattgatgagtactactcagcctttgatcgcctgatgagtgccttgac

SEQ ID NO: 37824 - DNA, 4460 bp, Zea Mays
ctttgcctttcttgtcatacaaagccttgccaaggcgagccacctcttgctttaattgctcattctccatttcaatcttgtccgaacatgtttctatgacaacattcttaacaggaacttgattcaaagcaagaagtaaaagcatcttcttaataatttcaggtaattcaatcaaagatacttctggggtgctaccaatattttctagcttactagttagctcattattatgtatgctaagaatttccattttccctagcaaattttcaatggcttcttgggagctagctaacttagcctcaagtttttcattcttttaataaggccatgatccgcagctatagatggagcactagactcttattgctcaattttagcttatagctcataatttacatttgcaaatgtttcaattttttctagcaactttataatcattttgagagctcatcaacttaattttgaaggttttaagttgagccttttgcttagtgcaaacatcttgaaaaaatttaacggctttcgcaaactcatctatggagggctttccctcaccttcatcatcactactgctatcatcactagaggatggaatactcattttacctctcgccatagggcacttgcgtgataatcgtgatgagcgtgatgaggatcggtgactacgtgtccttggaggttcgtcttcacttgatgagtcatcccaagtttcgacacttgttagtgccttgccttggctcctccccattttgggtttggacatagttgaacagctatccgtgaagtgacccttctccccacatgcgaagcatcctctctttctttgctttttcctgtcaatgttaaagagaagatccttggcctgcaggggcacacccattagattaatcttgtggatcatccccattacctttccgacgcgtcggattatttcttcgtccttgaaggatgatgttgatggttgattatcttcttcatcatcactttcttcttcttcctcttcttcacttgaggaacttggagtgggagccttctttttacccttcctttcatcacatgcaaaagcatatggccttgaggaagttggttcctctccccgacacatttttcgcgacatctcaaaggccatgattttcccaatcacaatgatcagggtcattgtacgcaagtcctccatgttgtgaagaataatgatgatgctcctatatctttgttgtgctagtatggagataatcttcctcacaatgtctgcatcacctagcttattgataccaatagaattgagctcgttgatgattagattcaaacgagaatacatatatctaacaagatcattatctttcatagcaaaagaattatactcatttaagactaggcaatgtttttgctcacggacattggatgtgccgtcatggagctcatgcaattctagccaaatctcattagcagttttcaaagtaaagacttgattaaaaatatccctgctaagagattcatataagcaatttttggttctagcatttaaatgaatttatttcctcactcgtggtgggtttctcgggattcttgggtggtttcatcacatcacgagtgactctccaaacatctagatcaacgacctctagataacaagccattctaacaatataatatgggaagttagtgccatcgaactgtggtggcctatgggtattgttggtccttgttcttggatgctaaataccaagaacaaagcaacacaattgttaaggattagagccctttgtccttcgaagcattatctccctcaggatataatgatcttcacacgaaggtcatgaaggacataccttcatcatttcagtaagcaagaatgcaaacagagacatatgaaaacacaaagggaatgtgaataatcatttcaaatcattagactattcatattcttattttatataaacatgaatgaacatcaatgatatttatattacatttgtaccttcggcttgacagaagatgaaaaagcgggagtgacgtgagagtgattacaagtcagcctgaacagtacggtgttactgttcatctatttataggcacgggacgcagcccggaaaaaattacattcatgtccttaacatttactattagccataaggcaaactatcgaggactaagtggtcttttctcctttaggtcggttccatctttcaccatagtccttgcgctaagccgaagcttcttcagccacagcttcggagctagttcatccttcctttagactgtaccttcataccgtgcacaccttcatcttgaagccgaagcctcctgaaacatgttagttaagtttttgaggaccttcagaagaggaaggccccaacaggtatccatcccctttctctaaaaagtgtcgactcttttagcggtgaagctaaagcatttcaaatgagccaaaccaagctctgataccaattgaaggaaacatgtgacacctaagagggggggttaattaggacttctaaaactgtctctaaactaggccgcaaataaatccctagagcaaaacctatgcaaataatcaaattagaatgtgcaaactaggttttgtctaagtgttgttatctctaccacaatgtctaagtttcaatcctaaacaatataagtataaagacaagattgaaacttaaatgcttaatctaaatgcggaagctaaagatcaaggtagagatgcaaacactcatggatgacgacagtatttttaccgaggtatccagaaccacgcaaggtcccgactaatcctcattggtgcccctacgcaaagggaagctcatgcgagggccaagcaccacggtcgagtaactccgtagagagccgcgggccttctccacgtgcaagtggtgctccgcttccggctcctctcggacactccccgtcgtctccactatcgagcttccggccgaaaacgtcgcggacctcgttccctccggtacacggtgggggctgtgacacaaacgcggttgtcacggtctcgcaagacccttgccccactcggtacaattacaacagctcacacaagagccgaggggttgtgtggtttttctaaactcactcaactaactaggattcacctagagcaagcgctaaagcgatctaactaacctaagcacttcgcaaagcagctacgctaatcactgagtgattctattaagcacttgggtatatgagcacctggaaatgtctatactatgccttggtatgttgctttggctcccacaccttgaaatggccggtttagatggtatttatagaccccaacacaaaactagccgttggagaaaagttgttgctctctgcggcacaccggacagtccggtggggtcgacggacagtccggtgctcgtgtctagtgcgcctagtcgttggatctgacaccacaggtgaccgctggcgttgcaggcttttacaccggacagtccggacgtcacactggacatttccgtggcttctctccaccagtgacactgggaactagtcgttggactactgttccctggtgcaccggacagtccggtatgccatcggacagtccggtgctctcagtcggacagtccgcaagtggcaacacttgtcttcgtttcttggattttgcttgatacttgttgatcttcttgtgatcttcataatgtcttctttttgaggtgttgctttcctcaatgccttagtccaagtaactttagcatcatgtgaactacaaacataaacactagcaaacacattagtccacatgttatgttgatcatcaaacaccaaaaactattgagccaaatggctcgggtccattttccttacaccctccattgtaaattagaagatgttttgacttttgtagatacatagatttttctacatacttggatacaacacacagtacgtatgtctagatacataataaaaagaatatatcaagaaaaggcaaaacatcttgtaatttgaaacaaaaaaaaagtttaaggacctacatttggttttgtaattgagacaacgagcaaattaatcttttgctaagtgtttaatcaagctaggttagatctacaccaaggtgatgagcgaggcttggaaatggatgaaggtctatcaatccagctagagcaagctcacacatggaaaaggagaaagataaaaacaaaactcgtggtgatcgaggcaaatgtgtaagctagagattttgttttgtcgtccaccaagatgcagtagagagcatggtttggctttgcaatagatagtggtactattaagatagggactctaatatctcatcagttatctaagtgtcacaatgtataaaatgtctttgcatatgcattagacagtgacgtggtgcaatggaggtgaaaatgtaagaaaaatggacgacctagacccattttattctggattttggtatttctctatctctatctctactatattaaagtaccagttta

SEQ ID NO: 37825 - DNA, 3540 bp, Zea Mays
attctatcatatgatgcactcaaagtaccagacctaaagggtcaatactaaccccgtaatccttcacacatttggcaaacatctcaagctgatgtaaaaaccacatcatttaggaataggtgactaaccacacacaaccaactctaggctaggcaatgacttcattcaaaccaatagataagtggtccaacaaaggctccacaaacatgcatcggggagagaaccatcagatcctcaaagtattaatacataatcaatggatcaagaaaatcaaagattttattctacaattagcatgactaacatgcaaccactttaaaccacatctaggctttgtggctactaaagcacatgatagaagagagacatgtaagccattctggctatgtaaatacttcccccaaaatccatataaaagtaccaatattcatttctttcagaactggtttctcgacataaacaatcattctttgcaaagatagttggagctatccacccaccgcccaacaacttaaattcaaattaatggttaccttgtaccccaaaacacgcaattcacactcctcttataaacatcctcaatcaagcatatataacaatattattgtaataaaacttaaccacgaaaaacatgttgaaaacaacataggcatacatgtatatcaccagcataatagcaacttcaatctcacaaaagaccagcgatatcaatcgcattaataaaacaatatcaaaatttagaaatgaattatatcatgcattaagtcataaacaacttaccacatcaccgtaaaggaataaggagggtaaaattatttcatctgcacttcaaagacattaagatatatcaaagatatttgaacccatacccttcctagatgtgcaagtgtgtcaaatttatcttcaaattgccaagaatctaaagactatgctttgataccaactgtaacaccccgggatccacaaacaccccgaaatgctactaaactacacaactaacattcatatataaaatttcgacagcatctcctttgaaaatttgcataaacgtggaagcaacaaagtataaacagatatcataataagaaaacatactagacattaataatctgctagcaatgggaagataaccataacgtcatgaactgaattaactagtgtgcatgactagttaaaaacaaacatcctttgacaagaagtttctaattaaatcatggttgtgcctgggtagcgttattatgagagtgaaggtggacgtgctgctactcccctcattcccaacatgaatcaagtacctgcattgagtaatgcaagagtgagatgaaacatctcagcaagtgaattgtttcgacgagatatttaaaccaaaaaaattgaactaatcaacattttaaagggatcacaattgagatcagaaatacttgtagatatagaactcaatagtcccaaaataaccaatgccatctaatttcctcgaacaaccacaataggttgtataacactttcctgcgtcaacaatacctgcaaatatcacttcgatgtatgcatagtaatgcaatgtgtaagtcctgtgccttcatacctcttagagtataaaaccacaccatctacaaataccacttcaatgaatgcatatgtcctctgccttcatacctctaagggtatgaagccgcatcgtaccccttctcgggcaacgtacgatgctaagttgtaccggtaccgtcggaccataggtcacgacaaaacttcagatgcaagtgaatcatgcaatgtatatggcatgctgcatttatcaatatacttcacttccttcacatacaatacaacctcaaataatacttcatttaccttcagatacaataccaacctcaaataatacttcatttaccttaggggtgtgaattaatcttacgagtcatactcgaatcattatcttcatcaatatatgattgagcatcagcataatgcaagcaagtaaagcatcaccatagagtccaattatgaaagaatccaatacttctgaatattagagtgtaggcaatagaaataacaggtcagaacggaagcaaccactgctacattcacttgccttcatcgaagaagaagaaatatactatgcataatctggagtgtagccacctgctagcgggcataaaacttagtacaaatattttacaaacatttgacaacaatcaataaatcgctcctacacttgaaaccaagacctggtggaaagactcccaccctgaaccacatgacatacagcagcagcgctgtttgttaattttgtatctttaaaattataacagttgtgatagcaaacaaataatctaggagtatctacacaaaatactctacaacttcgttattcaatggataattaaattctgccatctataagttctaaaacatctgacaagataactgactgaatctgttttagacagcagcatagttaacttcaaaattcgatatctcccaaactactgaatcaaaaattatgaaattctgctggaagtaagaacttttatccctctacaaaagtctccatagttggaagagtcaattcggccatttactagatgaaacctaccagtgaacagacctgctcatttttgtcaggcaaacaggaacagccacagtaaaacaatcataactagagtttcacaaatcatatgaaaatgcactctttaacaatctggaaagcttatgaaattatctacaacttcttttaccaacccacagtttaattctgttgataaaattgcctaaatcttaagagaacagattctgcacagaattatgagactgaaaaactgctatagtaaaactgcaataactttctggtcggatgtccgattgaggtgttcttcgcggccacggaaagatctacaaattatctacgactcatacatagacttttcttttttttgaggccactaagaccacggaaaactggaatgaacagaaactgtcaaatctgccattccgcagaaaactaaattcgagatcaaaacctaaccccacatctaatccaacctctaatcctttaatctccatgatccacaacctccaaaagcacataattacagggaggaacaaggatttcatccatacctagggttttccccaagtaaatcttcaagagatggagaagaacatctccttgatcctctcttcctcttcaattcaacgtgctcctcctcttctcgatccttgctgcgtggggggggatctagagggaggaggaagccatggagagggtagggggcggctgccaatggggatgagagcaagagagggaggggggcggctgcaactaattggggagaaggagaggggggggggctagggttgggaaggcgagggggggctcccatccactggatcgagatcaatggcccaaactcgctctcccctttgagctcccgaccccagcggaaaaatgccaaaagatctactgttttctaaggaatgcctcctaaaactccaaaccccaatgccacagaacatgaaagaaaagagagaaagaagtttaac

SEQ ID NO: 37826 - DNA, 1503 bp, Zea Mays
ctgtgggttggtaaaataagttgtagataattttataagctttccagattgttaaagggtgcattaatatgatttgtgaaactccagttatgtttgttttactgtggctgttcctgtttacctgacaaaaatgagtgggtctgttcactggtgggtttcatctagtaaatggccgaattggctcttccaactatggagacttttgtagagggataaaagttcttacttccagcagaatttcataatttttggttcagcagttttggagatatcgaattttaaagttaaccatactgctgtctaaaacagattcagtcagttatcttgtcagatgttttagaacttgtagatggcagaatttaattatctattgaatactgaagttgtagagtattttgtgtagatactcatagagtatttgtttgatatcaccgctgttttaattttaaagatacaaaattaacaaacagcgttgctgttgtatggcatgtggtttagggtgggagtctttccactgggtcttggtttcaagtgtaggagtgttttgttgattgatggcaaatgtttgtgaaatatgtgtactaagttttatgcccactagcaggtgggcttcccctccagatcatgtctagtacatttcttcttcttcgatgaaggcaagtgaatgtagcggtggttgcttccgttctgacctgttatttctatcgcctacactctaatattcagaagtatcagattctctcataattggactctatggtgatgctttactttcttgcattatactgatgctcaatcatatattgatgatgattatgatttgagtatgactcatgagattaattcacacccctgaaggtaaatgaagtattatttgaggttgatattgtatctgaaggtaaatgaagtattatttgaggtttgtgttgtatctgaaggaagtgaagtttattgataaatgtagcatgccatatacattgcatgactcatttgcatatgaagttttgtcgtgacctatggtccgactgtaccggtacaacttagcatcgtacgttgcccgagaaggggtacgatgcggcttcatacccttagaggtatgaaggtagaagacatatgcattgcattcatatgcattcattgaagtgatatttgcagatgatgtggttttatacccccagaggtatgaagatagagtacctacatattgcattcctatgcatacattgaagtgatatttgcaggtattgttgacgcagggaagtgttatagaacctattgtggttgttcgaggaaatgagatggtattggttatagtgggactactgagttctatatctacaagcatttctgatttttaattgtgactcttttaaaatgttgatgaattcaatttgtggtttaaatatctcgtcagaacaattagcttgctgagatgtttcatctcactcttgcattactcaatgcaggtgcttgttgctcatcaaggggagtgggaagtagcag

SEQ ID NO: 37827 - DNA, 1132 bp, Zea Mays
aaagagagtataataactttattacatcatccagacttaagagtcttaaacagtatcttaatcaaagtacagcagaaataacatgggtgatctcccaccgaaagatgaccgaagcgtcgctacactcagtactcatcaagatcttcgtcaaagtcttcctcatcaccttttgataaaaaaaaattagcaaggagtgagctcacttgcattgggggctcagcaaatggaaggaactgaaagttccttttgctcgggaacaggatctgtatgtcgcctagaggttggtgaataggcgaataaaaaataacacttaaaactagaaattcttactctactcaaagactagatcatagtggaatgaaagatccttctagtaggtcgcagcagaattgaagttcatgtctcgaaataccctacacttcaaagacagcgtgtaccacagataagtattgaagtgcaagtataaaaagcaattaagatagagagacatcacacaacacaacacagagcagatcacacatacatagggatttatctcgaggttcgaccaagcctgaaatacttgcctagtcctcgttggagttagccacaccttggcttggagtctactttaactccttcctccgtttgttcagatctgtcaatgtgacagatagagacttccactatgtcgatgatggttacaacgatgcaacgactgcttacagtcttcttgatagcactctagcagagtaacaacgctcaagatcttgctcttgctctcagcagcatctcccctctctctaaaggcttataactgcgcctctacacaaactagagaaatatacaagagaggtagacaaagaattgatcacaatgatgtatggacttgttggctgcacttgtgtacaccaaaaggatgcctaggggtccttttatagccccaaaagagcccctagccattgcccctttccatgcaaagaagatttcaatcctcgggaataaatgccactctgaaggggcactagactgtccggtgccatcatcggactgtctgatacgcctccgtccaacggtcatagaatctgtgattgggccacctttcgcttctatggggcaccgtactgtttggtgccggcaccagactgttcgg

SEQ ID NO: 37828 - DNA, 485 bp, Zea Mays
ttatgcagtaagcattttagttggtcggtattttattaacaacacctaatttactaattataagtgtatcccaaaacccaattaatcatgagcataatgattatatctcaaaagcacttaaatgaaaccacttaagcaaatccttttaaaccaaggatcacaatttattctccatatttaagttcgattatcatgtgaggatccaggctcctcttaaccttgagcacggttgatatgtcagttttacactctgcaaaggtggtataactttacccacaagccatgtatcccctctagcctgggttgtacggacccttaaacactgccgaggtgaatggctagggatccactatgagactttcacaaaatatccttagtacaaagtcaatcgctaaggtttccacgttagtattggtgatcctctgggtgaggcaccttagccaagactatcaccccatgttaatgtgagccgccaccaaaccaat

SEQ ID NO: 37829 - DNA, 719 bp, Zea Mays
catgacgtcaggtccgggatgcctgagacgacgatgccaagtggtggaggaggtggtggagaccagggcagaaggtgaagacgcgccggaggtggatggccggagcgtgtagaggggccccgagctgtcacaacgggcgaggggagtcctggtggccagatccttcacagagaaaccagaggggtcaaattcgatggaacaagagttgtcagtggtaaaacgacgaacagaaaggagattatgagtgatgtggggggctacgagaacgtcgttgaggtagaacggtccagggagaacagaggcaccgacagaggtgacaagcagagtggaaccgttcccatcgacgatcgatgaaggatgataggaatgagggggatgggagcgggagagcgtgcctgtagtgggagtggtgtggtaggaggcaccagaatcgatcacccagtcggaggaagggggggggggtcatcgccatggtgctgaaagcggcagcgagggaggcgttgtcccagcctccagacagtggggaccaagtcgtcgtgggggtccccgggggcaggagtaggggcggagccggatgcgatgcaggcacgccgtagggaggcgtgggtggcacgccgtagggtggcatagtcaggagggccggcgccaggggacgggaggcacgtggggcctggcccggccacatggcaatggtcccgatccaggggttatagagggac

SEQ ID NO: 37830 - DNA, 653 bp, Zea Mays
gtactcgtacacggagaggtccccctgagagaacaggtggaactgggcgtcgaggtgcagggcgcgagcgtcccggttcccgaggaactgttcttcgagggcgagccacgcctgacgacccgtgtccgcctggtcgtggctgatgtcctggagcttgacggtgatggttccgtggagccaggagaggaccacagagtccatcagggaccaggtccgggacggcggggtggcaacgtcgtcgaggacgtggtcgtcaagggcgtagcgccgcaaggtgagaaggacctgccccctccagcgagggtagtgggaggatgccgggtctagaacgacagacacgagggaccggatgttctgtagtccggtcgcctgggcgtggagagcgacgatgtggtcagcatcgagaccagaggcgtggggagcctctaaagtggacgagggtgtctcctggtcgatcggaggaggaccgatgacgagacgctgcgcagtggccatctgggtggtcagagtggcggccagggcgcgctcctgttccagagcgcgggacgcggcgcgctcgcgctcctgcgaggcggccagggcagcctggatggcggcgatggtggatgccagcgtggagtcggtggagggtggcggggaagcccaggtagcat

SEQ ID NO: 37831 - DNA, 607 bp, Zea Mays
aaacacttagaaatggcccaagggcacatttccctttcagtggagaacccagggagtgggagtctggggagacgggtcggcgataggagaccggtgagtacgccggtgcacgccgggtagcctggtaggcccagatcggaggtgatgaggacggcggcggcgctgggcgaggagaggctggcggtgtggggcgcagccaggcgcgcgtcggcaccggcggcggccaggggcgcgactgcgctggtgtccggcaggacggcgtggaggggatccatggccgtcgagggcgagggcacgacgactatgctgttgagacggggagcgtcgcagggcggcggaccagcagcccagcggtcgtcggcgatgaggcggcgatgcgtctgctgcacagcacggggcggcggaggtgcatgtgcatgtgctgctgccggtgcctggagctgcggtgcacggtggccggccacgggaggagcagtgccccgacgtggctggggttggacgcgaccagcagccaaacgcgctcgtgcacgaggaggagaccgtcgacgggagatgagctggggtcggagatgggatgaggcgcagccgccaacgggaggaagccggt

SEQ ID NO: 37832 - DNA, 915 bp, Zea Mays
cgctcggccaggagccggcggcggcgactggcaggcaggggagagaccaggagccggtggcggcggctggcaaggcagaaacactaagctacctttgataccatgatagaagtgaaaccctaaccctacactagggtggacctgtatattaatagactgagttgggcctggcccattacagacagaagggtgaaatggtaaatgtacaagggagaccccataaaccctaatacagttctaacaatcgccgtggtgacgcctggcctcgggttcaggcgcaacaatggagttgaaaacagcagggaggcaagacttctctttctttgattgatctttcctgcttacagactaaaggcatagagggcttatatattggcctggcctaacaagacttcctccttttaaggggatctaaacaaactacctttatttaaggaaaatctaaacaactctagctatcttatctgagtactatctgctcagtctagcttatcttcccctggctgcttaggccggcgcccatatgcttttccagccataacatctctccctccctcgacgaacaactcgtcctcgagctgaaattgtgggtaggaagttttgaactgctgcaggggctcccatgtggcctgctctggctgctctgcactccactgaaccaggatgagccatttaccacgctgaagtcgggctccgagaactttttgtggtatgggcagaaacctgccgttttccagtactggcagagctggtggtagaacaggaggtgatcctctgaaaggtttgagtagtcctacgtggaaaacatcatggatgcgggttggaggttgacctttgagagatggttggtgcaaagaagttgtctttgcttaccgcccccatttcgggcctccctgctagttagctagtattgtg

SEQ ID NO: 37833 - DNA, 593 bp, Zea Mays
ccctcacacacttcttcgcctgggtctccacccagtttcaccgcctggtccgtgccctgcagtgtgacaacggccgcgagttcgacaatcacgcctcccgctctttctttctcactcatggcgtccagttgcgtctctcgtgcacctctgcccaaaacggtcgggccgaacgcattattcgcaccaccaccaatatgatccgctgccttctcttccaggcgtctctccctgccagctactgggcagaggccctgcacaccgccacccaccttatcaaccgtcttccctccaaggcggtgagccaccctactccctacttcgcactgtatggcacagcccccacctacgaccaccttcgcgtgttcggctgtgcctgctaccctaacacttctactactgtccctcataagctttctcctcgctccacccgctgcctcttccttggctactcttctgaccacaaggggtatcggtgtctggacctcgcctcccaccgcatcatcatctctcgtcacgtcgtcttcgacgaggatgtgtttccccttgttggcacctccccacccacggatctcgactccctcctcgagttctga

SEQ ID NO: 37834 - DNA, 1115 bp, Zea Mays
cgtcaagaatgccttcctccacggcactctgacggagactgtctactgcagccagcccaccggcttcgtcgacaaagcccgtccggatctggtctgccggctgaaccgctccctctacggcatcaagcaggcgccgcgggcctggtacagtcgcttcgcttcctacttggcctccatcggcttcgtcgaggccaagtcggacacgtccctcttcatctaccgccgcggcgacgacaccgtcttccttctgctctacgtcgacgacattgtgctcacagcatccaccaccgacctcctacagcgcacgatcctcgccctgcagcgagagttcgcgatggacctggggcccctccaccacttcctcggcatcaccgccgagcgccagtcccagggtctcttcctccatcagcgccagtacgccatcgacatactggagcgggctggcatgtccgactgcaagccctgctccacgcctgtcgacactcaggcgaagctctcagaggacgacgggcccccggtcgccgatgcgacgtcctaccagagcctgaccggcgcgctccagtacctcaccttctccaggcctgacatcgcctacgccgtccagcaggtgtgcctgcatatgcacaccccgcgggagcctcatctcaccgctctcaagcggatcctgcgctaccttcgcggctccctcgactacggcctcctactccgaccatccccgacgtcggaactcgtggtctacaccgacgccgactgggctggctgtccaaacacgcgctgatccacctccggttacgccgtgttcaagggcgccaacctcgtctcctgggccgccaagcggcagcccgtcgtctctcgctccagtgctgaggcagagtaccgcgtcgtggccaacggcgtggcagaggcctcctggctgcgacagctcctccacgagctccacagtcccctccagcgcgccaccctcgtctactgcgacaacgtcagcgcagtctacctctccaccaatcccgtgcagcatcagcgcacgaagcacgtggagatcgacctgcacttcgtccgcgagcgtgtcgccgctagggatggcaacgggtttgaaacccgcgggtagatggttt

SEQ ID NO: 37835 - DNA, 1185 bp, Zea Mays
caggatagagttgcgactgcgggggggtgttagaactgtattagggtttatggggtctcccttgtacatttaccatttcacccttctgtctgtaatgggccaggcccaactcagtctattaatatacaggcccaccctagtgtagggttagggtttcacttctatcagcaatctctcacacttcttcctccaaccattagccactcatacaacctccgtagctggggtaattctatcaacctggtatcagatatgccaagatctgatgaagccgaaactacagtttcagcccagccgtcggagttggcagcaatcaccactgcccttgccgaagtccaacgccaattggggctctttgccacgcagatggcctccatgtcctcccgcattgccgcggtggaatccaccccaggaacatcggccatggcgctgccaccagactgcccctacggcatgcctggatatggtagactgccaccggctaggacagcggtcgatggccaccttccaccaccacccatcaccatatccgcaccagcaccaccaccacctcacttccactgcacctgctgtcattaccacattcaccatctcccattccatcattaccaccattcccacacaccacttcaccaaccccatcttttcccccactaccgcacaccatacccggtgctttctctccaccgccatctgttgttgttcctcgcttccaccgtttagagtttgcaatctttgatggcaaggaagatccaatgcactggttgactcgatgtgaacaattcttcgagggacagcgcacgttggaagaggagaaagtctggttggcttcatgtcacatgctcgacgccgcacggacttggtacaaccagctcctgcgtgatgaaccacccctgtcatgggggcgtttcaagaagctatgccaactccgatttggaccaccgcttcgcagcaacccactcggagaattggcaaggcttccattccgaacaatagtggaggattatcaggagaggttctgggatttactggcccacaccacgccactcactccggaacagaaggtacagctcttcacgccaggtcttccagagcgtatcaagatcgatgtcgaacttatggttcctcggggtctcaattgaaagggaaatagggtttaaccttttcctataaatgattttggtg

SEQ ID NO: 37836 - DNA, 234 bp, Zea Mays
ttttggtataattattatgaattttagggttatttaattatgtatttcgaaattagaaaaaaaagaaaaaaaacaaaaactaaccctaagcccattaggcccatgaagccgccgctccctgcttcccttgacctagccgtcgcccctggtccctggcaacagtcgtcgcctgctccccttctctctcttctctcctccccttgctcctctctagccgccgccacttgcctgaag

SEQ ID NO: 37837 - DNA, 610 bp, Zea Mays
aaacgacaaccaataatgttattaaggtaggaaccacagatgtcatcattaatgctaacaacgaagagccgatgaactttggtgaatcgaccaagaggaaggaaatttctatggctactaatgataaagctggtggcataatgtaacactccaggttccacaaacaacccggtatgctactgtactacacttccgacgtccatatataaaatttcggcagcatccccttttgcaagattgcataaaagagggagcaacagagtataaacatatatcatgactaaaacatactaagtattattactcggctagcaaggaaagataaacatacgacctgaactgaattaaccagtgcgcacaaccatataaaaaaaataaacaaacttcctttgacaataagtttctaattaaatcatggctgcgcctggacagcgttattgtgagagtgaaagtggacgtgctgctactcccctcattcccaacatgtatcaagtacctgcattgagtaatgcaagagtgagatgacacatctcagcaagtaaaataatatcaaacagtttaaccacataagaacattgttttaccaccacttaattccacaaccttctta

SEQ ID NO: 37838 - DNA, 394 bp, Zea Mays
ccactacgcgatgggtgcaggtcggcataacaaaccaggcgagtgtggcgtcttccacgggcggccctaaccaactcctgaagactacaaattgagggcctccttgtcctcgctcgcgccagcactgttcaccggaatccctgtgcccatggtgagaacatagtgagagagagagcgaggcgggaggcgccgccatggggcctgcatacgcgtcgaactcaggaccacggcttggggccagggtgcttcgccatgctgcgcgagactcgaccgtggccttgcttgggcgatgccgcgctctagactaccggaattgctcgccagggcctctacgccgccgcgggcctgccctcctttcgtggaccggccccatcacgacgccttcgccggtgag

SEQ ID NO: 37839 - DNA, 852 bp, Zea Mays
cagggtacaacctctacagagtgtaaaactggtatactagccgtgctcgcggtcatgagcatctcaggactctcgcatgattaaattatgaaactaaattcaatttgtcattctcattgcatgggatttattattaattttgttctattattattctggtatggtatttacttacatctagtaattgctaataaaatttgaccaacttattaaaagcaatgctcagctttaacccctattgttgatcagccttacacttcacatgagctcccacctttggtgaattcatgcacattattccccacaacttgttgagctatgaacgtatgtgagctcactcttgttgtctcacaccccccacaggtcaagaacatgtaccataggatgagggttatggaggatgatgcgatgtgttcgtgagaggtctaggtcgtcgtctcctagtcaactttgggttgcaggatcgttgtctcctttcgatgtaattaattatttattttttatagaactcctattatataataaagatttgacatttatttctgtaccatgattcatcatatgtgtgagactttgtcccaacacacctggtgtttatgttcgcgcccaggtcttggtgcctccgaaacccgggtgtgacagcaatggacatgtcatcaatggaatagaaagcatttttgtccactaaggcatagcaaagtccaatagaggcatgcaactcatcaagatctgatttagtatctagcaaagcaggaatttttaacattataggttgctgattttcaaagttcaaaacacctttttgcttagcattagtctttttctcatgaaagtggacaatttcagtggaag

SEQ ID NO: 37840 - DNA, 584 bp, Zea Mays
ggatataacatcgacaaatttacaattgtgttcttaatcctacacatttaaactattatacatgctgagggtaaagtgtaactccccgggatccacaaacaccccagaatgctactaaactacacatctaacattcatatataaaatttcgatagcatcccctttgaaaattgcataaacggggaagcaacaaagtataaatagatatcatgataagaaaacataatagacgttaataagctgctagcaatggaaagacaaccataacagcatgaactaaatcaaccagtgcacacaactagttagaaacaacatcctttgacaagaagtttctaattaaatcatgactgcgcctaagcagcgttattatgagagtgaaggtggatgtgctgctacttcccacttcccttgatgagcaacaagcacctgcattaagtaatgcaagagtgagatgaaacatctcagcaagtgaattgttttgacaagatatttaaaccataaattgaattaatcaatattttaaaagaatcacaattaagatcagaaatacttgtagatatagaactcagtagtctcaatataac

SEQ ID NO: 37841 - DNA, 696 bp, Zea Mays
aaacaaacataactggagtttcataattcatatgaatgcactcttttaacaatctggaaagcttatgaaattatctacatcttttcttacaaatccaaggtttaattctgttgataaaattgcctaaatcttaagagaacagattctgcatagaattaagagactgaaaaactgctataatcaaactgcaataactctctgatctgatgtccgattgaggtgttcttcgcggccacggaaatatctacaaattatctatgactcatatataaactttttatttttttgaggccactaagaccatggaaaactggcatgaacagaaactgtcgaatctgtcattctgcagaaaactaaattcgagatcaaaacctaaccccacatctaatccaacctctaatcctttaattcccatgatccacaacctccaaaagcacataattacagagaggaacaatgatctcatccatacctagggtttccccaagaaattctgcaataagagatggggaagagcatctccttgatcctctcttccccttcaattcaacgtgctcctcctcttctcgatccttgctgcgcggggggagatctagagagaggaggaagccatggagagaggctgccatgggaggagaggacgaccagcccaaggggaaaggagggaggggcggccaagtgtgggaggggggagga

SEQ ID NO: 37842 - DNA, 268 bp, Zea Mays
gaattttttcccataagtttcgatggcacccacgttcttaaccttaagttcgacggggccccgtggtcgtcgaacttatgtgtcctgcagacgtctgcgcgcactgcacaataagttcgacggtacccacgttcttaagattaagaacgtgggtacccacgtttttaaccctgcgtgggtctgcgcggactgcacaataagttcgaaggtacccacgttcttaaggttaagaacgtggacccttttccagaaaaaaaataaaaaatac

SEQ ID NO: 37843 - DNA, 107 bp, Zea Mays
ctttctcaagcacttgcagccacacatcaaaccctagccccccccatttcctcctcccaaggtgccattcgttgccgctcggatctccgtcgcgtggtgcaaatctt

SEQ ID NO: 37844 - DNA, 396 bp, Zea Mays
atgaagtatttaaataaatatatattaacactcatatattaaaaaacagggaaagagaaaacgattaggaatttgaaaagaaaaaaacgcaaaacactcacgaacccacatacacacacgttaaaaaaaaagaaatgaaaaaaaaaacaattaaaaaaaatgcctcagcccagtaggccatgcagggcaatcacgcatgcacgctcaacccgtcacccacgcccaggcgcccagctgccagcatgcggtatcccctcgcccctctctctgtctcttgcagataggtcccgctcgtcagtagtatcatcaagctctagactgtgtgcgccgctcggcttctgcgtcctcgcgtccaaccgttcctctctccttgattgacataactgcaggcgtttc

SEQ ID NO: 37845 - DNA, 811 bp, Zea Mays
catgtccgtgctcgacgcaaccctgccctgttctagtgtcggtcgtgccctgcattcttccccaccgtggaatagtttgctgttaaccatggtcgctgatctggtcctgcgagctccacgcgccttggctgcagtttcttggcgcgccttcctgtcctcgccttggttacgctcgccgtgtcctccgccgatattctcgcctagccgcgcggacctcgccgtcgtcttggtcatcgacgccactcaatcgtccacgtgctgttatcctcgcggacaccgcttcacaccgtcgctctattttcaccatccgtggcgtcgcagtggtgatgttctggctgcagcaccaacgtcctcgacctcgccccaaagctctatgttgggtttgtcagcgtgctactcgtccgcactcctcgcgtccacaacattgtcgcctgtctcctcgccggtcgtggacgcccaggttgaagacaccccaccatcgatccatgtattcgtgctgtgggtgatgctgctacttggcgtcactactggacgtgtccgcgatcccgtcagcctttgctcgctatccgcatcttgtgttcgtatcgaatgccaggattatggggaaaggaaagctccagcacatcagatgtcaggtgttccgtgatttggatgaatcggtggtcgtcgtcgtcttgctaaataccaaatcaatctatgatgtggtaagctaaattgatgagtgagttggctatatgtattggtctcattgattctcgttaatgtgctgtgtggtggtgtccaatttctttgtggtatatatatgctgaat

SEQ ID NO: 37846 - DNA, 269 bp, Zea Mays
gttgaattctctgttatcactccatgaccaagctcatgcaaatggatgcttagacaatctgtttgttggacataaaatgcaagaaaacttaaactaaggatctcgagtacgtgttcttgttgttagtacgtgactcttcagtggtcatgttttcctcctaagcttcaccttgttttggttgatgcaagatgttattcctattttatttttgcctctcctggagaattgcattgttgctttatcaacccaacctagagaagacatgtccg

SEQ ID NO: 37847 - DNA, 202 bp, Zea Mays
ctcattcccaacatgaattaagtacctgcattgagtaatgcaatagtgagatgaaacatctcagcaagtaaaatattttgacgagatatttaaaccaaaagaattgaattaatcaacattttaaaagggatcacaattgagatcagaaatacttgtagatatagaactcaatagtcccaaaataaccaatgccatctcattt

SEQ ID NO: 37848 - DNA, 590 bp, Zea Mays
gctcgttagtgagagagagtgaggggagcgcgcgggtggcttcgcgcgcgctagcgggccggctaatgggccgaagggggggatgcgcgtgcgcggggaaggggggaggcggccgcgacatgggccagatttggcccagcagggggaagaagagctttttcttttttctttttatttttaataactcctttccatttttgtttcttttttttgaacaaatcatttagtggataatctaggtgttggaaaatagaatctaagtgaggtgcttgtgatcaaagaaagtgtatgcatatgatgggaaaaaatctaagggagttttgggatagaagataaaaaggggggtagattagggtttcacacctgggttagaattttgggatgttacaaacctaccccacttaaaggaatctcgccctcgagattcagacggggctcgagaaaaggtaagggtattccttcctcagagagtcctcactttcccaggtggcttcctcttctccatctctgctccactgaaccttacagagtctcacttctgagttgcgggtccttcggactgctgagtcgacaatcttcactggcttttc

SEQ ID NO: 37849 - DNA, 98 bp, Zea Mays
ccgacggcgatcgccccacacagcctccatcggtccaccccataaaaacacccacctcgctgccgttttcccacggcgcatcgtgcagcaggagcggg

SEQ ID NO: 37850 - DNA, 260 bp, Zea Mays
cgacgcaccatatcggaacccgtgtatggtgttaaatgggcaagggccaggccgccacccacttggtggcgcgtcgtgtcgtgatctggatgtggtgtcaagtgagcaaggatcgggtcgtcgcttccttagtggcgcgctacatcggcgcccagatgtagtgacaaatgtgcaagggtcttcgcatctgtctcaacgggtgcaaggggtaaggaagctagttgagtcgactaggattcgtgtaggtaattggaacgtag

SEQ ID NO: 37851 - DNA, 153 bp, Zea Mays
caaaaagtgaaggaggtggagaacactggtttcaagctttggtactcagaaacagtggcaaacaaaaatggagtaggtatcctggttgataagagcctcaatgatggagtggtggatgtcaaaagacagggagataggattatcctagtcaaa

SEQ ID NO: 37852 - DNA, 448 bp, Zea Mays
cttgtaattcaatgatatttctgtttatgcttaataataatacataattgttcatgttgtcatttatattccttacatttcatccttcgtcattatataatgaatttatgaaggtatatccttcataaccttcgtccgaaaaccattataccctaagggaaataatgtttcgaaggacgaaggactttaacgattaacattttctatgttgtcttgttcttaactcatagtatttgagaacaagtctccaacacatgtagaatctacttagttccagctgcagtgtgtgagatgctgctaccttggattctgtgcaacactgcaccggattttaaaaaatctcaggaaaccaaacgcagccttcacaaggtaataagtagaaatgtactagtactagatcagatcatgtttgcacccaacaccggatttcagtgagaaatcatctgga

SEQ ID NO: 37853 - DNA, 477 bp, Zea Mays
tttggtcaccacgagatccaccatcaccataaacttctctggttcattttttccaccacggatacatctcatgtccgatttggaagtttaaatacaatctggaaagcttatcttatcttctttccaacggatctgaccttgtctcaaaattcattctgagcgctccgcaatcatcgtagagatttctggactttctatattaacaagatttgttaaatctgatttaaaggggttgttagcaatatccttattgtttggtttgtcatagtgaaaaaagggtttaggcccctgcaaaaaaaagaagaagaaaaaaaaagaaaaaaaaggaaaagaagaagaaagaaggggattgaatctctaaatctgttgtttctctttgtgttgtgctggttgttctttttcagtgactacctttgtgcctaagctcacgtctctagcatggtttagcctaggaccagcatagtaccaccgttgaac

SEQ ID NO: 37854 - DNA, 1825 bp, Zea Mays
agtgaaaaattttccacctattaagcttgctttgggcgaggggtccttcgtatcatcaatacagagggcagcttcggcctgagccaaggttttaacatgctcacaacctgacttctccaaaatagttgcaattcccctcgcaccagagaaggcacagacgtccccacggtcactcaaaatttcctcaaaggcttcggcctcgctgctgatccattcaattgggccttcgggattgccccgtatgaagttatcttcgcttgaatatgcgccaatgttggcgaagctagcttttatcttcttcacgcattccacggatttttcaaaacatctttcttttgatgagcgaagttctgcaactgttttttcccaataatttttccagtaatcactggcatctcggtcagcttcagcaatagcgcatttcaatttggcttcggccagttgcttttggaggttttcaatctcgttcctttgcatttcagattgggtcttgtagttagcttcatccccctttaccttgtccaccaatgtaagtagaattttgtctttttccaaatctttgttcctcagcttaataacctctgttcgaaggttgttgagagcaatagtgcaactctcgtcttcggcattcttttgcgcccttaaggcgttgctaagtattaaacccgatatgaaaagaatgaacgagttaatataagagcaaaagaataattcaaaattcataaacttccaaatatacaatttttataccttcagactgttatatgcgaggctatctgcaagatcgtccttcgtcatggcgcagaggccagcttcaagcttcgggaaccccatacttctggtcatctcccggcagacagataattctttgttgtctgggaggcaatataagaagtcatcttcgtctgtgccattgaacactaaggcccctttcgggtacttcagttctcgggcatagtgtttagcttcaaaaacctcttattcagataatctttttcccgaagcgtgtcgtataatataatcaagagcttcggaaggcgcttcgggagtaggagtggcagctttttcaggcagaatttgttctacaacttctttttccgctgtcttttctccggtttccaaggatttctccttggcaggctctgaatgcccagcttcggcgtcggcctggctctttgtagcttcagcttcggtcagctttgtctcggtttcaatctgcgcttttgaagccttggcagttttccctggagtagagcttgaagcttttattgtctccagcacatctagtacactggccatcatttttctcttggggtcgttgtaagacctttttgtgccttcggcactgtcacttctaccgaagggcttagaacttctaatattttcgtcccttcgactcttgtctcttcaatgttatcggtcttcggctcagctaatttggttgagggtgccttcgacattacagccggctcttcaatcttttgcgagggaggagcaggttctttcgcttcagtagctgaagaagtctcgccgccaaattcgggcactatggccggttcaatgtagcgcggtcggtgagtaagtaccttcaactttttcctcttcggtgcgggctcgcttgaagtagccgaagcagcagccttcccagaagttacgccctttcttttctgccccgcggtgggtagcggtaatcagggtacacaaatccaatagcatcaaaaactctatttagccttttctttttatggctcccgaaggccgctgatagtgcgttatcttcagacttggagtatgctccaagtagttcatcactagtgttttcaac

SEQ ID NO: 37855 - DNA, 245 bp, Zea Mays
ctaggttttaggtgactgggcggctgatgggcctaatgggccatacgaccggctagggttagattaggttttgtttttttttcttttttttcttttttttctatttcctttttaattttcgaaatacatattaaataatcataaaattcaaattaatcaaatcaaaataaaatattaattcttggactaatatttattatattatttatgtgaattttcatttaagaggaaatgctatttaatat

SEQ ID NO: 37856 - DNA, 350 bp, Zea Mays
ctccactgttccctgggcgagttcctcgctgccacggttgtccggtgtttggcccgcgccgattcacgtttgctggtatcgccatcgtcatgttatcgctggtgatagcctcgcgtgccccatgttgtcgcgtccctatttcagtttgccatgccgcaccgtcattgcttggtcgtcgttcgtgcatccccaagaaaacccaagaatcgggtgaagacgaagttagcagcgcgattttccccaagcgctcaaccatttgactagatcgaaaaatcgctaccgatctcgcggattcgtgtcagctgttgaaacggtaagctgatgaattatttagaataattcgatcattg

SEQ ID NO: 37857 - DNA, 63 bp, Zea Mays
cccagacctgggcaccggcttaggttctttgccgagtgttatgtcgtcggcactcggcaaaaa

SEQ ID NO: 37858 - DNA, 282 bp, Zea Mays
caagatctataaatacattcaaaacatgatttagaaaataaatatttcgggtttgtcttcaaccttgtgatttcgttcatgcgcagggatgaactcgacgagggagtggtttggcgggtagggaacgacgtgtgtgctgcgtggacggagctccgacggggttccacggacggcggggcggacggcgacagtgtagacgaactccggcgacgtcgtgggcgagtgggagagagagagagccccagggaagaagagagctcaggtaggggagggagaactcta

SEQ ID NO: 37859 - DNA, 470 bp, Zea Mays
ccatgacattaaattgccacataaacgctgccatttgattttcggggaagaacgtctaccatcaatactattgatgccattacagggaagagagaaacggtgaggaaatgaatgtcgtgggcatggcgcggcgaggtgcgtcggtgcaggggcagggcgcggtccatggcttagcgcggccgggtcgaggcgccgggcttcggtcggggtagcgagcaggcgctcggtgcggggctgggcaggggctcaggcgcggctggagcgggtgtcctggcggctggcgcggtcgacagcgggtgctcctggcagcggtcggctcggcggcgtcagggcgtcgcggcacgggcagggcgagcagggcagctccatgggcgcggcttggacggggcttcggctcctggtcgggcagggcgtggcggcgaagaacggcagcacacggcgaggactatagaggaatggctggaactggg

SEQ ID NO: 37860 - DNA, 182 bp, Zea Mays
ccacccttggccacccctcccccttccccttgcagccgccttccactgcttcctcctctctctagatctccccccacatagcaaggatcgagaaaaggaggagcaagatggattgaagaggaagagaggatcaaggagatgttctacccccatctcttgcagattttcttgggaaaacccta

SEQ ID NO: 37861 - DNA, 470 bp, Zea Mays
gttttttcgagaaatgagatggtattggttatattaggactactgagttctatatctacaagtatttctgatcttaattgtgattcttttaaaatgttgattaattcaatttgtggtttaaatatctcatcaaaacaattcgcttgctgagatgttttatatcactcttgcattactcaatgcaggtgcttgttgttcatccagggaagtgggaagtagcagcatatccaccttcactctcataataacgctgcttaggcgcagtcatgatttaattagaagcttcttgtcgaaggatgtttgtttctaactagttgtgcgcactggttaatttagttcatgttgttatggttgtcttcccattgctagcagattattaatgtcgattatgttttcttatcatgatatctatttatactttgttgcttcccggtttatgcaattttcaaaggagatgctgtcgaaatttt

SEQ ID NO: 37862 - DNA, 632 bp, Zea Mays
gctgaataagtgttccaagtactcgtcctagttgctgacccagaaaatgtaatagaacagttggaccaaggcacaagaaaggaggtacaagtatctaggtgcagcaagaaaacaggcttggggcaaaataatcacagaggtgcacagaacactaacgtttttgcttatgtgctactcttttttctctctttttcttgcgattttttttcaaatattttttttatatttttttattttgcagcagcacataagaaggaaacacatcaagtttcagattttttgtgcaaagacgcatcctctggaatttctgcaagtttgtcctaaaatcggaataaatgtttggaaaatgagaagttctatttccaagccgaatttgggaattttaaaaacagtgaatacgacgaagccggaaagaattagatgcaaaatttaattctgtgcgatttgaaaaaaatgggcccgattcgagttccgaggcgaaagttatggccattttaagtttggactccgaatcagggtttctggtgaggtgttggaagggtgggggttcggttttgtggatagggtctattttagagataggatttgttttgtggatagagttggttttagagataggatctgttttatgg

SEQ ID NO: 37863 - DNA, 1158 bp, Zea Mays
ctttttttctgtttcacctacatgtgagccccatcggccggtcgtcttcctcgcgcggattttgctccatggacgaagctaacaaccagacctcgtcaacctcccagccgattcggccgcggctgttgcgccatcgccgtgacctacaaaactgagccccgcctcttgctcaaccacctcgcatcgtcactagagatccctcgccatcgagaaagagcagagtcgctgagagaagggaggggttcctgccgcacctacgaatcgacgatgccgccgcccaaatcccggtggaaaggagtggagaatcacccatgcaagtggagtatggccgctgcatcgctcggtgttgtgggggcgcctcgtcaccgcaattcctcgtcggaatctgaatttgcccgtgatccgcgccgcatcgcgagccgtgaactacagacggcattcccgccccgataagccttcaaacgggtatgtttccttctcccctttaaaacagcatgagattcgctaggattgtgccagtggatggccggaattgccaaactccggtgagggcgccacacagaccgcgtctgctgcaccgcgccgatagatgaggaggtaggggatgcatgagcctttgatcgttgggcgtgcggctaggattagaatcggtgtaccgattggtggggatcaatccggaccgttgattggtaatcatgtggtcaaggatgcgtaccgcttcgttagatacctaaagctaatcatgtccgtctatttttaatcggacggtccggatcgggtgttccctcttggtcgcatgcattttattaaagaaccctcgtggatccacaaaaccaacccgcagtcctgcgttgtgggccctgattcttgggaattcttgcgcatatgccgctgcctttctcgggaattatgcgcccagtccagagatttataaaatccagtaaaagtaattagaaaatgatttttatgcaaaaataaatgctagaatttgtttaattcatagaaaattcatatgaagtccaaattaattcattccaattcctataattttgtaatattattgtttatcatctagtaccactgttttgacatgaaaacaataataaaattgattccctaattaatcttatatcaaatacataaaacctttggaaattc

SEQ ID NO: 37864 - DNA, 642 bp, Zea Mays
ggatccctagccattcacctcggtagtgtctaagggccttgcaaaccctggcgacatgggaaacatgacttgtggctacagggtacaacctctgcagagtgtaaaactggtatactagccgagctcatggtcaagagcagctcagaactctcacatgattaatttatgtaacttaaattcaatttgtcatttgcacttgcatgggattatttattatttttgttctattatttattatggtttggtatttacttacacttagtaactgctaataaaatttgaccaacttattaaaagtagtgctcagctttaacccctattgttgatcagccttacacatcacatgaactccaaccattggtgagttcatgcccactattttccccacaacttgttgagctctgatcacgtgtgagctcactcttgttgtctcacacccccacaggagaagagtaggtggttcaagaggagccacaccacgaggaggtcgatttgatcaaggtggcgtctcccagttgactttatggcgccaaggatggactttagttcgatcaatcttttattttgtaaagacttccgctatgtaataagtactttgattatattgtgacatttatctctataaactctattattatatat

SEQ ID NO: 37865 - DNA, 519 bp, Zea Mays
cagaaaaataagaagaccactatatattccttgtatacaattttgggtattacagtacgacaacagggggtgttggactctagcaggggaagcattgggccagggagaaatggggcgagctcctggcagggggtgagctcggccatggcaagagcagggaagggggcgcgcatccaggtgtaggagagttggggaggggcgctcggtagagagaggagcagccatggatggagctcggatggggggaggaagaagacctgctcatcggcctggggaagaagggcgtcgccgagcaggaccagggggatgacgaccgactgtggggaagaaggaccctgctgcatgggtaccgagtgccatgactggccgaggggaggaagtggaggagctaagctccctggtggctgctcgccgtggacagcagagggagggaggaagggctccctgggagaagaaggcaaggaggatgcgtgcgttggctgaaaggagaagagggagaaatgttgtggcggctagggg

SEQ ID NO: 37866 - DNA, 303 bp, Zea Mays
ttcagcacgttcttttggcgacaaaatcaagtgcatcttagcagataggattttgacttacttcaactaaatcacgtagagtaaattattaaagtcgatctcattttagcccggctcctttgtgtatatttcaaatctatatactagaactgggaaaatcgtgcgtaaaacaattattttgattgtttctctagccagacatataaatcaaatatttgggacgaaagcagatgagtttatctgattacgagaatatctgcgattttattaaaaaagaaaaataaaaaaaaatctaagaaaaat

SEQ ID NO: 37867 - DNA, 276 bp, Zea Mays
ttagaatttaagacttaaattgggattctagaattacagaaagagagcacaagttatcatgaaataaatattaaaaatagataaattcactcatatcatgtctaagatgaatatttaatgataaaacaaatttaccacaaagtttgaatttgaatgggaattcaaattatgaatttgaaaataaaaagaaattagaaaagaaaaaagaaaaaaaaagagaaaacgtgcctaggccagcttctgttcactcggcccactaacgttcattccccgtgc

SEQ ID NO: 37868 - DNA, 681 bp, Zea Mays
tcacatagtgtctcttttgacatgaaaattgtattaaaatttatctcttaattaatcttgtatcaaatacatagaacatttggaaattcataacttaaattccataactccaaaattaatgattcatgttcctatgatcttatttcaatatgtagattattaatatgtactttgtatacatgtttagtgtgatgttaatttcctttttatactatgcttgtttgtattgtggcgagtagaagagccagtggttgaggatcccggagttcagcaggtagaagctgttgagcaggagctcattgaagacaagttgtgcccttaaccacttttattacccaataatgttctttattatcatttattcctgcattggtataattttgatgggacccaataggtaaccctagactggttatccttttaccttgttcacccctgaatcatttgggtagttttgctattgttctatatggttttgggattattattacattatgtctatgtttcaattattttgttattttattattcatgtcaagatcattatttttaattggaacatggagcttaacttgagaaacacgtgccaccacaagggtggaattggacgcccttggctgactaactaggaaatctagtggaggactaccttacctgatatgggcaagggcagtaggggag

SEQ ID NO: 37869 - DNA, 524 bp, Zea Mays
ggtaacatgactagtgggtacagggtacaacctctgcagagtgtaaaactagtatactagccgtgctcgcggtcatgagcagctgaggactctcgcatgattaaagtatggaactaaattcaatttgtcatttgcattgcatgagattatttattaattttgttctattcttattatggtttggtatttacttacatctagtaattgctaataaaatttgaccaacttattaaaagcaatgctcagctttaaccccctattgttgatcagccttacacatcacatgaactcccacctttggtgagttcatgcatattattcgccatgacttgttgagctatgatcttttgtgagcctacacttgcgatatataaaccccccaacaggagaagaacatgtggcccaggaggagccacacaacgaggagttctacttgatctaggtggtgtctcccagtcgactttatggcgccaaggatggactttagttcgctttatatttatcttttattttgtaagacttcc

SEQ ID NO: 37870 - DNA, 505 bp, Zea Mays
atgaaggcagaagtcatccttgcatttgcagacatttgcactcatgaggtatatatatgaagagtgacattactatgttactattgtggtttctacctgcgaggtgtggtagctaggagtgttgtacgttgtatacgtgctgcacctttgtaataagaaggttgtgaaatcaagtggtggtaaaacaatattcttatgtggttaaacagtttgatattattttacttgctgagatgtgtcatctcactcttgcattactcaatgcaggtacttgatacatgttgggaatgagaggagtagcagcacgtccactttcactctcataatagcgctgcccaggcgtagccatgatttaattagaaacttgttgtcaaaagaagtttattttttttgctagtcgtgcgcactggttaattcagttcatgtcgtatgtttaacttccctttgctagccgattaataatacttggtatgtttttgtcatgatatatgtttatacactgttg

SEQ ID NO: 37871 - DNA, 197 bp, Zea Mays
cgggcagctgccgccagagccatgttcatcttcccaaaccatctctttctcgtcttgccgtgcccatgtttctcgccttcgcgtacgccagttcccttcactctattcctgcgcatgaaggagttacccagacgagaagttccccaggcgctgcagcaacaggaaaggatgagcacggttcgtcgtgcgcaggtgac

SEQ ID NO: 37872 - DNA, 327 bp, Zea Mays
ccccaggttgtccacgttgcaaccactgctcaggagaagatgaagtcgtggaggaagacttctaggaattccaagagtacgtcgagttttaggcatgggttagcggcaacccccagtcggctgcctatgaaggccgcatgtatctacgtttcgttttcgcactttgattattgttaaagactatgtggatgtctcagacatcatgatgtaattgactagtactatcttctatgttattattcgagcactgtgtgatgatgtccggttatgtaactgttgtgtacgtgaaatattgatcctggcatgtacatggttcgcatttggttt

SEQ ID NO: 37873 - DNA, 334 bp, Zea Mays
gaattctacagttgggctgaagaaaaatataaaaatcagaatggtcgtgcattagggagttggccgagaggacttgaggtaagtttttttttctttttttttcaaaattcagttttctttctttattttcttttgcaaatctcaaaatcaaacaacaaagttcaaattttaacctccaataaatgcacaattcaaaatctcagcatggatgcaaatttataactttattgatttattgatttattatcttatttaagcaaaagctcctaaatatgtacttcacaaacccaaaatatctattaaaaataactcctagtgtatatctttcattaag

SEQ ID NO: 37874 - DNA, 854 bp, Zea Mays
cttgtctatatactacttgcaacagcccaatctctggtctcaaccatcgcacggagccattgggctgcacgacggaagttgtgctcggcacccaccatgcatgcgttctctgctccttcactggtcgtcgtgttcctgctcctctccatgccgcgcggctgcagaccgaggagcagtccgtgccaggtgcgtgctccaggccagcggcgcgggtctggccgtggtggtcagcacgttggctgtccggccatgtggagacgtgcggtggtgagcagggcgtccttccattgatttcctgctcggctccctccttgctcctctctctccctcggatttgtctgcgcccagccgcgtcctcgagctcggcttcgagctccatctccctgcgccgctactctgctggccagctgccgctccctggtcggcgcgctgcttcgagtttgccgagctccctcgccatagtcggagatccctcctcctctagctcgtcggttgtatccctctgctcggccgccgtcgatcctccctggacggtctcaagcgccctcgccttccggtggtttcagcttgccgtcaattatccttgccgcgtgtgctttagtccgagctcgcccatgtcgagctccctcggcgttgctcccatgcccgtggtcgcgcgcagtcgcccagctcggtctctgctatgtctctgctgctgcgtgtagaaagtaatccttggatgccatgtttagcagtttatcttgattagcttaaattaggtgtatgattggaataaggctgattgagagccgttatttagtttccttattacagtagttcctttccatgtaatagtctatataaaccaagagata

SEQ ID NO: 37875 - DNA, 242 bp, Zea Mays
gtgaactctcatgcacatgccctattcacgtacacagttgtattttttttcctttttttttatttcttaattattttggccgaaacctgcatcatcagcagtgctgcagtgatgtcaaccttcattccatgacgtgtggggccattgccacagatacgtccacctgggaagcgctttgcatgtgagtcaacagcctcgccgttcttctcgccgagctccacggaacgccaaccagattccgc

SEQ ID NO: 37876 - DNA, 166 bp, Zea Mays
gggagcacgtggatttttttttttttttggttatcttaaagatgggacgcttgggcccatacggtagacatgcaactgttcattaccagcaatggagtgggggacgtgggagatggtggccgaatttttttgtattttagtctttttattgaaaaatgcacgtact

SEQ ID NO: 37877 - DNA, 228 bp, Zea Mays
tagaaatcctattttattttatttatatgtgcagtctggaaatcaatttttaattcagatagcaagtttgaatttagaaaagggaattcaaaataaagcgaaataaaaaaagggaaagaaaataaaaacaaaaaaaagaaaaaaatgaacagccttggtttgggccgagttcccaccttccggcccaccccctctcctgctcacccgtctccgcccggttcgttcacc

SEQ ID NO: 37878 - DNA, 61 bp, Zea Mays
ctgggagattttactcgttggtgtcaattaggtggtctttggacttttgtcgctctccatg

SEQ ID NO: 37879 - DNA, 411 bp, Zea Mays
aacacaaacataaactttgttatcttttcatgtgattaggttcaaaagaatatgcaggggagaaatccacttgacttgctcacagaattcttgaggctcttcctcaaactgatcctaattctcaactattggatcaacttctaaataatacacaagcaaatagaaacaaatacatatcaataaacatgcaaaattcatcataaacaaggctaaaaagaaaccataaagacaatattatctatttttgaataacaacaaagcttaacaaaatgtacacttttgaaagaaagtttggtttgaaaacataacgtaaatctaaccgcatttttagtttaaagatcataaacaatatcttcactattttattgtttttaggaaaactatataatatggccatgagttagttataat

SEQ ID NO: 37880 - DNA, 5449 bp, Zea Mays
ctcatgtacaaattttaattatgttttcttattattttgaagtttcaaacccatgatacaatttgaatttggaagggtttaaaataaatagaagtagaaataaaacaggaaaataataaatagaaaaggctccctctcggctatttgggccgaaactgagcaggcccatggctaccgcgcttgctcagcccgcctactacctctggcctttgtgtctctgccaccccgagcccacattgcagtcgaccgctctcacgcgcgcacatgcctcgccggactgcggggcccacctgtcagcctcatatcctttgctcatacgctgattgcctctcactgacactggaccaacctcgtcaggatccatcttctttcccctccagcttctttcaacagaacgcgaatccgtcgccgcgcgcacggtctggatctccgctcggccgttggggctcgttccgtggcacgtgggatgcggaccccccctccttctgtccgggtataaatccaggcactcgaccaatttgtcatccgcgaactctagaaaccaacggaaggagagaggagagagattgagacgggatctccgcggtcatcgacttgttgcgccgttcggggctcggttattgctctacggggatcggcgtcgggccacaaagcgctagtgtcgtcagtgggcgatgaggaacctcgtggccaccggaatttctcgccgtctccataaacccgcgccgcgccgtcggcgggtgttctcgtggcccaactgctggtaagaaacttcccttcatgttcagcgtcatctcggctttgcgcagaacgtgttggcgtgggcggtggggcacttgggcgccgattcatcgtgctccggcgggctaaccagtggagctccgggcaccctctccctgtcgcggtcgggaggagggagacgatcctctggccgtccgatttacgtcgtgcggtggcgattggatgtgcagaagcgttttggctatagcgatcgtgggtcgttggatcttcggccaacgtgtgggattacacgaagcgcataacgattcgagtgttgatctgggccgtgcatttcggatcctacggacccgatggcatatcgtttcatgatgtggccgattgaatcagagtcgtcggcctctgatccaacggctctgattataggataccccttcgcggtgtaacattttctaaagagaccccggaagagagtcaaatcaacccgcagtcctccgcgagtaggtcctgagtctttggagcatttgcatattaaaccctgagttatctattattagcgcgcgcagtccagtgttgtgagaaaataagaaaaagggtttagaaaaatggatttctagtgccaaaataattccagaacttatataacttatagaaaattcatattaagtctaaatgagtccattctaatttctataattctataatattattttttatcacatagtacctctggtttaacatgaaatttgtattaaaattaatctcttggttaatcttgtattgagtacataaaaccttaagaaattcataactcttccgttctaaccccgatttgatccgttcaagttgcgttagtgtcgtagcaacgcgtagatcattattatgcagtatattcttatgtttggtgtgatgttaattttatctatgccatgtttgtttgtattgctacgactagcgcgaggctacgagtcatttgaagatcatcctgatacctggaatctcaagtgccaggcaagttgtgtccttgatcacttctttttacccagccatgttctgattaatcataatgatctgcataggttaattttgatgggacccaataggttaccctagtttgtctatctttataccttgtttaccactgaactttttgggtagtacttgctagtgctttatgtggttttgggtatgaagatacattattcatgattatacttttgttatccgttgttatttactgttcatgataagatcattatgttaattagaacatggagcgaccacccgggaaaacagtgctaccacaagggtataatgggacgcccttggctgattaattaggaaagctagtggaggactaccttacccgaaaggggcaagggcagtaggggagtggtcagtgtagggaggccctcgggaggattttgctgcgatggcggtcctgcaagggattcctgcattggagcttcctataactgtagcgggttttctgaagctagtggaactttgtaaaggcctcgtagtgttaccctgcctcgcctcctcggtagaggtgtatgggaagtcgcgatcccttggcagatgggtaacatgacttgtgggtaaagggtaccacctctgcagagtgtaaaactggtatactagccgagctcacggtcatgagcagcttaggactctctgatgattaaattatggaacttaaactcaatttgtcatatgcattgcatcgcaggtgaggttgttacttttgttctactatattaattgggttggtatttacttatacttagtaactgctaataaaattttgaccaactttaaaagcaatgctcagctctaaccatcctctttggtaagccttacacttcacgtgagctcccacctttggcgagttcatgcacattattccccacaacttgttgagcgatgaacgatgtgagctcactcttgctgtctcacacccccccataggtaaagaacaggtaccgcaggatgaagcgcatggaggatgatgtgaagagttcgtgagaggtctaggccatcgtctcctagtcaactttgggttgctggaccgttgtctccttataatgtaattatttattttatatagaattcctattatatagtaaagatgtgacattcgatcctgtgccatgattcatcatatgtgtgagacttggtcccagcacacctggtgattatgttcgcgcccgggctttggacccctaaaacccgggtgtgacatcaggtgtgctgtgtcggagttggagtgggcgtgtgcgggggagagagttgccatgaaatggcttggggtggcttgagaggaggcccttgcccctctatttataggctaggtgagagggattagggggaggaggcaaggattagtgggaggatgcgaggattagtgagagataagcatgtatttgtcttgtttaagtgaaattagcttgtagagctcactatatgacaccggaggcgtacatatacatatgagcatgaggaaaattatggagaaaagatttgtagggactttaaaaatgattctgaaggtatttgtcaggaggaaaatatttggagaattatcggtgtaatatttgggcagtatttctagaaagaacttgaagggatcactgggaaatatttgtagaattttagagagaatatagaccactatattttatttgttgatatcaacttgcaatcaaacattttgaaacgaaatttaaaattcattttgaatttagagcgagtttgagaaaatttcaagatttgaatttttggggtgctacatcgtcgtcggcgtcgttcgtgggacagcactgcgtacatcttcctacattgactgcgtacgactaaattgaacatacacaatagatgtctcatgtgaatggagccactgatgccttgagcatcggtccctccgtggggtacactgtgttcttcgtatttgtgcatattttactgttatttactatttatgtgagtagtgatacacacatgcatatacatgtcgtcacatacatcactctagttttctggattaaattaaaactgaaaatgtatatttctctaccacaaacaaatgtggttctagactttttagaattttttggaaaagtaatacaactcctataatattattaacaagtaattctaagtttatcttagtcaaacaacgaaatcattcggatctgcatagaaaacaagcaagacctgatagtgaactttttataagcttaactcctacaccatttatcctaaactcatgaaattttaggacaagctagattcttaagttaaatacatcttttgtatataacacgtctatagaaaagataatttgcttcacaaaatcatcactacaatcagagaacatacaagcagcagattccagttcatgggcactccaacttaacttaatccacaagctaaacaataagggagtatgactaatacttggctttatatcactatggcatacccataaaacatctaattggtactaaattttcatttaaacatcccaagaaacatgcacgatcttacttacatctaatcattcactaagtcttcttataattatataatggatataattttagcaccatatgagactttctaatttggggatgatatttttatgaggtataggcaataacaaatcatgactaatgtgcaaagtttacattctcaggttctatatattaattattacaaaaatgacaatttgttaatgcaataagtcatgtgaggccaagttaaatctaaaactaattattttctatgaatgcatgaccatattaagtttattaggacactataacatcatttaaagacagtggaacactattttctatttttacatccatatattatttataaaccatttaaactacttaatatgcatcaaacaagttaaatcactaactctgtgatacatgcaccataaatcacgaaatttttatcagtcacaaggtattacacatagagtctactgcaaaactttcaactcatttcgagcactacagaaacaaacccaaaaataacaagcaaatcaatcatcttttttcctatttaacaagatttaactaatacaccaagaaaatagtaaacaatatataagttttatatttttcttaactagagcatgacaccatctaactaataaaataagtctcattctatttggacacctaaaactcgaaatatggaaagaaacaagttcatagatttcctaaactagttttcaatactaatttctacagcagaatttttctactaaacatgcagtattatagatccaataggtagaatactttataaggaagctaacgaaataagtatcactaatttagaagctaccaaactcgagttatggattttagaataaagtgaaagaatctgaaatttcagcacacacgttcttgacctaggctcacctactgctggcgtccatggacacgggaggggtttgagcctgtccatgggggcagcaacgtcatggggagagggagctagagctgctgctccctgcacttgaggggcatcaagcatcaagggaggtgaggtcttggtcatggggaagaacaggggatggggtggcatgtgttgtgagagagaatggggagggagaagatggcgtggggagagggatgggatggggctggtcgcggctagggtaggagaggggggaaacctcacatgtgtg

SEQ ID NO: 37881 - DNA, 3671 bp, Zea Mays
aaggacccactttagtaagctatttctgcaaaagtatctaagttgattcttgctaaagcctctccttgactcctatttatccagcatacccttgagagtcttttccttagtcgggtaagacttgcttagtaattccatactcagggtttatctctttgttgtttttaggtgaggaagcgacaaatttttgttgcttttgctccaaggtggtaccaaatgaggaaaaacaagactgaagtgcgggaggactcggtcctccacataggatcttttgtttatagcttatcgggaggagtttgtgcctcccttggtttgtaaaatattactactctgcacttgcttttagttctggtctgtaataagtaacttgatcttacattctatataaatgtaagtttatgtaaaagcttccgcatttctttatctccgatgttctgtaatgtctgcaagacgggtgaaacgttcctggtaaggtaagaaagaagataccgaacttgtcgagtgattcaggaacatctacagggttgtctgatgtctgttggataaggacaactgtaggtgggcctaattacttgggaggttccgtcacagctggtatcggagcgtagcccttctttgcagatattatgaggcatcttcaaaaggattttctaaaattcttacctagaaactttcttcctttcttacctaagtattctgaagagtttatcttaaaagaccagataggaagagtgcaacgtatagaaggatgaatcaactaaggttgattctgtatttacacatgcatcatgtcatacaaactttaaattaaaccccctatatagctaccttgttcatacatttttagtaagtagagtgttccgttgctcttctctgaagatgaatcaacaagaagcccctaccggagttggagagtttctacgagattttggtgttccagtggtcctgtggcgactacttcaagaagtcggatatatcgaaacacccaagtaccagtggtcgcgcactgttcttagaggacaaccatggtatgaggtggtagtgcgtattccaaaacgtgctagaaagccatcttggccacattggatgttccatgctgaaggaatgactccttgggagggtgctcaggtagctgccttagaggcgctaacaaccatttgttaccagaaatgggaagaaatacaagccacatctatgaggttgttccctgcagttgctttaagtgacccattggtgtatcatcaccaggcccgattattggaaagcattcctattgggcaggattctgtagaatcggaatctgctcgagtattgatggtcgtgctagagttgcaacttactcgagggcacagtcgtcaaaagtggcagcagttgtacactgggagttatgcagcatttaagatgatggaaatggccaagaatagggcttgtacccaggcacaagaacgacttgaggaaacaaaggttcaagcgaaacagattattggactagagcatccggtgacaggacttcagacgcaacaccaagctgatcagaatcgcattaaggagcttgagcatcagctagttaatgctcattctaaatcaaaagttctgagtcagcaacaagaagaaattcgcttggatgttattgctgttagcgaagaccttaaggaaaccctaagcttcataagccatcaagatcaggcgatccaggaattgaatagtgctcatccaatggaatttcaagtagcacaacggcttgtcaaccatctgctgcaaacagtgcataggctcaatgttgccttttatcctactcctgcaccagcggactaagggttccttggaaggatggcaacaagcatctggcaggtggtgtagctagagaagatgtagtaggtaactgggagtgtagcgaagtagatcaatgtagtaaggtaggtgtaagatagacctgcttggtaataaaaacaggttaaactttgttggaaagagttttcctgttccacctggatcatgtaacatgcgagcttttctatgactatggtgtaagaaacgactgcctgtttcagaagcaacttttaatatctatagccgttgtcgaatcccaagagttaaaatggctattcctttggatagtccctgtggatgcacgtgtgcggataaatgacttagcacacgctgagaccataatttctaattatgtttcgtgatgaaatggtatcacctgatttcccatgtgagtttggataaatggatagactttatccaaattagatgcaacatcttggataaaacacagaaagatatcaagttttacggagtacagtggaactaccccatagaagatgaagccatgtagatggtcagagggatatttagaagacaaagcccttgccctaagttttgagtttttggaaaaccttaaggtttgcgaattttaaaccaacagtggcacaccccctgtttggtaggagaaattgggaaataagtttgtgacacatttccttttccattactaagcctggacttttaaatctcgggacgagatttcttttaggggggaaggctgtaacacccctggtgttacgtaaactaaaactctgacatgtcatcataagcatctgcattaatgtgcttgttacacctagaatgcatttactaggttaaaactttacaaaaagtgtgatgttgtgtgttgagtagtggacttagttaaggacctgttttaagcaaaatgagggaagatcatctcttgagcaagtaacaaattggcttggggtcttaaatgttaaaggtaagtcttagagcctagagtagccttgttttggaatgatggtcaagtggaagaagcacttaagaagctagaataactccaaaccttaacttgagctttgcttggaatagatggttaagtaaaggaaattctaaaccaggacattttggatatgagctatgtgtatcaaagattggatcttgagctagagtgtaactttgctctaggtggagggatcaaagggatgaatccctagaagaagctgaaacacaaatgaaactcatttgaaaccctaaaactagcccaaaaggggaattcaagatctagaaggatttagctaaaagtccatatatcaaagttgtagagcttggaaaagtggatatatttcttatttggagattcataagttgtgtggaagaatttggagttaagtacaaaaattcagttttgggttcattttggaattgctgaaaataatataaactagacaactttggacccttgtaacttctgatctataaccattttgaagatgatcattataacaaagtcatagagctacatgaggagtacaagtttggttaagtcacctagccctaacactctatggaacttggagaaaaactagtccaaagtagagctgtcagaaattgtagatttcagacttagtgaaattcaaattctgaatttcagcaattggagcaaactttgggctattgtagtttggaatccaagaggttttagttaatggttactatatcaaacttgtagaggaactataggagtataaactttattaagcaacttgcccctataaacatttggaacccaggaaaaagagtggttccaagtggtgctgctgtatttctgaattttcagattggaaacagtaactgaaactgaatttcagtgtttt

SEQ ID NO: 37882 - DNA, 715 bp, Zea Mays
gtatccagtgaaccagtgggatattttgggctgtgagcttgaccagatacaatgttatgggctggaattgtaaacctgtgtggagtaggtgtcaaacatgcaagtatgtcagccatgcagtgttggcaccctggtattatctcctcaccgagttgtgggcaaagatcagggaccattttgcctatatatattcagtgaaacctgcccttgatcagtgcccttcggtttgggtcagtggaacttcaccttgctgtagcagagtaactccagcaggtagtgtccacgttgcttgttcagtaatctttgttggccgatgaagctcacacaagttagttcttgaactctaccactgtctgttgctctaaactaggtgtgaaatttgctcaaatataggctgtcaggtttctggatcccagacttagtgcataaggctgaaactaggttttagtgtgttgagctccattttggtgcttcataaaaattgttctgtatgttttcagcccaggggtactataccaacgtagtagagctatatctaaggaataactttggttatgtgagcttggtctgttgctttgtaaaaattggagaaaagggttggctaaagttggtctgtcaggctggacacataactgaatttttattcagttctgaaaactgaattacagcaggatgcctagtttggaattcatttgtgactgattcgtggggtttt

SEQ ID NO: 37883 - DNA, 233 bp, Zea Mays
agggcatggttgatggtgtgacttggccttccaccctgccaccgggttggacggttgagtgggatgctgcttcggcaaaagaggactaggaggaggagtgggctgggccttgccctagtcctccttattgtcgatatcgattatccattgcactttaattatgaatttgtccccttttatttcaaaactccgatttatgtaataactccagtaccttaatttgtggattcatg

SEQ ID NO: 37884 - DNA, 870 bp, Zea Mays
gtttcttttgattcgtgctccactacaggttctgcgtctcaatgtcgatctacaccaagacgatgaacttggtcatctaacatcggcatgcacaccttcccccgagccaccgaccatgtcactcctcaccaatgaccgtgtgagtcattacacattggaatcaagtaacaccaatattacatcaattttacttgaggtttttttttacttttatgttgttttatgttgacttgagtcgttcgattaaatctacaatcggaatcgtgtggaagctcctatacaaggtttaatgatgcttttatttttatacaacaatattacataggtattttggaaaaattcctatatgatgcaagtttcttttcatatctatattgaaacaatagaactctagaaaaatatctatatttgactcaacaattacaagtttgtttttcgagctgacgagtcgtggagagctacttctattattatactagaatggttacaatatcgtgactttgcaaaaaaactaattatagaccaaaataagagaacatgttgacaaaatgggaaggatggtcaaagatcataaggtaacagtgggatccatattataatctcaaacttattttcccctttgggccttttacaattgacattttgtaatgtaggaaggatccaaacaacttatggaggatgtgaatacatgatatatatgttcgattatgtcgagcctaaaattgtcccatcgactccaactaaagtcatcataacttctcctgttgctcctgcttctccatccaacataaagaggtcaaagatgctgcacacatgtactagttggtagacgaattcaaacattggtcaacaattgtgtaggttgctgca

SEQ ID NO: 37885 - DNA, 164 bp, Zea Mays
aaaccggggcttgcctttaatttaacacttagatagtgtttgctggggtgggtactcgcttggcgagcatccactggataagtccatcatctcttcagatcgtccaccaactgcatcttgtggttggcaccacatcacttgctcgatcatcatctctcggtcct

SEQ ID NO: 37886 - DNA, 157 bp, Zea Mays
accaattcttggagaggaacggcgatgatgggcgacggtatgccctcatctcccctctcttctcttcttttttcttcctctcttctcttggggcaaggcacaaaagggtgacggctgctaggggtgggaggacgtggcttctagggttagggaggta

SEQ ID NO: 37887 - DNA, 249 bp, Zea Mays
cttttccctccacccctctcttggccgccaccctcccccctttttcccttggttggccaccccctctcctcccatggcagtcgcccaccatttcttcctcctccctagatctccccctcccccacgcagcaaggatcgggaagaggaggagcaagatggattgaagaggaagagaggatcaaggagatgttctaccccccccccccatctattgcagattttcttggggaaaccctaggtaaggatggg

SEQ ID NO: 37888 - DNA, 1522 bp, Zea Mays
caataatttcacccctccccattcctttatggtgatgtggtaagttgtttatgacttaatgcctgatataatttatctctaaatctttatattgttttattaatgcatttgatatcgctggtcttttgtgagattgaagttgttattatgcctgtgacatacaagtatgcctatgttgttttcactatgtttttcatggttgagttttattacaataatattgttatatatgcttgattgaggatgtttctaagaggagtgtgacttgcgtgttttgggttacaaggtaaccatcaatttgaatttaagttgttgagcggttggtggatagttccaactatctttgcaaagaatgattgtttatgtcgagaaaccatttctgaaagaaatgaatattggtacttttataggaattttgggggaagtctttacctagctagaatgacttacatgtctctcttctattgtgtgttttagtagccacaaagcttagatgtggtttaaagtggttgcatgttagtcatgctagttgtagaataaatctttgcttttctagatccatggattatgtattaatacattgaggatcagatagttctctccccgatgcatgcttgtggagccattgttggaccacctatctattggtttgaatgaagccagtgcctagcctagagttggttgtgtgtggttagtcacctattcctaaatgatgtggtttttacatcagcttgagatgtttgtcaaatgtgtgaaggattacagggttattattgaccttgtatgtctggtactttgagtgcatcgtatgatagaatgaaatgtaagtttatgaactacagtagatgaagacttatattatgtgtaggttaacctcactagtttggatatttttcttagttgagttgttggatgaagtatagtgacagtggttaaccaagtattgtgttgttgtgctgtcagtgctttttgtggagcttttggcatttcttcgatgacgtgtgccgcgcagaatgttattggcttcttattggctttattgctccattagttctctagattttctcccttttgcggggtgcaaagaatgttagattacatgattatcttttcatgatggcaagaataaggtttaggaagattaggaattttgtttcaatagaactacttgtttcgtggtgctttgaggtgaggtgtttgatcttcttatgcattcgtcgggtgtggatgtttcaccatttaattaaaattaattgttgaagttggtaagggttgtgcttagtgcatattaccccttcataaaagagtgttgtcttaaggcattgatgttgatgtatagttgcatccaaattcgatggtgtgaaattgtagtgttgattgcatctatgacttgctttgagcttcattgcatgttgtttcatgcttgatgtcaggttgtgtagtttcctcagacaattagtccaaggtagatgttcttgtgttaattaagaccaataatggacccatgttttgaatgatggtg

SEQ ID NO: 37889 - DNA, 2447 bp, Zea Mays
caaaacatttttggaccaaaagttggtctatggtgcgtggatgtgggaaagggatgtgggccgttggatgcaaaggcagaagtcatctggggcgtcggttcttttctcccacaaaaccctaggtggccaccccttttccctccaccccctctcttggccgccaccctccccccattttcccttggttggccaccccctctcctcccatggcagtcgcccaccatttcttcctcctccctagatctccccctcccccacgcagcaaggatcgagaagaggaggagcaagatggattgaagaggaagagaggatcaaggagatgttctacccccccatctattgcagattttcctggggaaaccctaggtaaggatgggatccttgttcctccatataattatgtgcttttggaggttgtggatcatgtggattgaagaattagaggttggattagatgtggggttaggttttgatctcgaatttaatttctgcagaatggcagattcgacagtttctgttcataccagttttccgtggtcttagtggccttaaaaaaataaaacgtttatatatgagtcgtagataatttgtagatctttccgtgtccgcgaagaacatctcaatcggacatcagatcagaaagttattgcagtttgattatagcagtttttcagtctcataattctgtgcagaatctgttctcttaagagttagacaattttatcaacagaattaaactatgggttggtaaaagaagttgtagataattttataaactttccagattgttaaagagtgcattcatatgatttgtgaaactccagttatgtttgttttactgtggctgttcctgtttgcctgtcaaaaatgagcggatctgttcactggtaggtttcatcaggtaaatggccgaattggctcttccaactatggagacttatgtagagggataaaagttcttactgccagtagaattccatgatttttggttgagtagtttgtgagatatcgaattttgaagttaactacgctgttgtctgaaacagattcagtcagttatcttgttagaggttttagaacttgtagatggcagaatttaattatccattggataccgaagttgtagagtattttgtgtagatacttctagattatttgtttgctatcacaactgttataattttaaagataaaaaattaacaaacagcgctgctgcagtatgtcatgtggttcagggtaggagtctttccaccaggtcttggtttcaagtgtaggagcgatttgttgattgttgtcaaatgtttgtgaaatatttgtactaagttttatgctcgctagcaggtggctacactccagatcatgcatagtacatttcttcttcttcgatgaaggcaagtgaatgtagcagtggttgcttccgttctgacctgttatttctattgcctacactctaatattcagaagtattggattctttcataattggactctatggtgatgctttacttgcttgcattatgctgatgctcaatcatatattgatgatgataatgattcgagtatgactcgtgagattaattcacacccctgaaggtaaatgaagtattatttgaggttgtattgtatgtgaaggaagtgaagtatattgataaatgcagcatgccatatacattgcatgattcacttgcatctgaagttttgtcgtgacctatggtccgaccgtaccggtacaacttagcatcgtacgttgcccgagaaggggtacgatgcgacttcatacccttagaggtatgaaggcagaggacatatgcattgcattcatatgcattcattgaagtggtatttgtagatggtgtgattttatactctaagaggtatgaaggcagaggacttacacattgcattactatgcatacatcgaagtgatatttgcaggtattgttgacgcaggaaagtgttatacaacctattgtggttgttcgaggaaattagatggcattggttattttgggactattgagttctatatctacaagtatttctgatctcaattgtgaaccctttaaaatgttgattagttcaattttttggtttaaatatctcgtcgaaacaattcacttgctgagatgtttcatctcactcttgcattactcaatgcaggtacttgattcatgttgggactgaggggagtagcagcacgtccaccttcactctcataataacgctgcccaggcacaaccatgatttaattagaaacttcttgtcaaaggatgtttatttttaactagtcatgcacactagttaattcagttcatgacgttatggttatcttcccattgctagcagattattaatgtctagtatgttttcttattatgatatctgtttatactttgttgcttccacgtttatgcaaattttcaaaggagatgctgtcgaaattttat

SEQ ID NO: 37890 - DNA, 272 bp, Zea Mays
gtaaaactctagaggtgctttgactgttgcatcatactggagcatgctttcattttgtttgatgagtgaatttgtgaagcatgcattcagtaaggaattcgatttgaattagtaggaaaaagaaaagagaaaaagaaaaaaaagaagaaacaaataaaaaaggaggaatcctaactagaccccctctcggccagcccagctcgcccctccccgtggcccaacaagccccttccccccagccaattgtcgcgcgtggcccgcctggccctccc

SEQ ID NO: 37891 - DNA, 627 bp, Zea Mays
ccccagcctccttaccccacgagctggtgaaccaacgtctcggacaaatggggccacactgtcggctttgtcttccccgtctctctcacctccataacaaaccatggcggacttcgcgcgtgtgcaccagccaccaggagacctttgctcccagctctggcttgggacgaacccaacagacccctgcgaccgccgtcggtgttcggttgctacagattcgcgtgctactcggggccatggaatccctcggctatataagagcaaggcatcgtaatacctccccccttcatcccgccgtcgtgatatgtgcacagagagagaaaaaaagggtgcgatgtcggcagtcgtccgggcttcgacgtcaactggtggcgagaataagttgctagggcgtggactctttggatggtgccctggagtgcgatggttggttgatggccgggattccgctcgccgaagtccattgctggtcaccgatctgggtcaggccgtggatggggctcatgtcgttcagtgcactggtaaaccacccctatcgtgttcgcttttgtatcctctacatgttagtacatgttaggatttatggtctaggcacaattaagaaattcaaataaatctcagaaaaat

SEQ ID NO: 37892 - DNA, 398 bp, Zea Mays
caacatcagaaccaagcaaaggagaactcttctcatgaaacacgtgtaatacccaaatttttggagtagatataactatgtagaaatatgagagattttaaaagtctatatgattattatcaattttatgtttcactccttccttctctctttatcaataccacaatattagtttgattacaatgactaatgattaaaataaatgtgcatcccatgctgaagtttggattgagcatgtaaatttgaattgaaattttgactcagaaataagatttaaaattagaatttggaaataaaaacagaaaaaaaagaaaaagaaaaaaaggaacaaccatgcacctgggccaaaacctttggaaccggcccaacttagctgctcggcgccgacacctcagtcc

SEQ ID NO: 37893 - DNA, 359 bp, Zea Mays
aaaatgcaagttgaaaaagaatcctcaagtgatgatgatcttgatgcaaacattgctttgatggtgagaaagaccaccaaaatattgaagaaactcaatagagaaggcatcaagtttgattcaagaaagaagaagttattccccagcaaaagaaagcccatctctgagatggactgctataattatggagaactcggtcatcttgctcatcaatgcaacaagcccaagaagaacaagttcaagggcaagaaaaatgatgatagtgatgatgagaaaaaggaaaagaaattcttcaagagaaaggaagagaagcacaaaagactccataagaagaaaaaatggagaagcatatattgttg

SEQ ID NO: 37894 - DNA, 151 bp, Zea Mays
ctcaagtgttaccaaggcactggtttcatataggcactgatgacttgttatcacatatggttaagtggaggagaagaagcacctaaaacattggaaacatgggttagctaagaaatgttaataacaaaagctatacccaaacattttgaac

SEQ ID NO: 37895 - DNA, 1214 bp, Zea Mays
gttcggtctttcagatctagtcgtaggtctgtaatcggagggttatgaggagattgagttatgataaatctggtccgctgatctctaatgctacggccataataacatacgggttcacgcgtgggcttgatttaatctcacgcatccaactctgatccaatggttcagatcacactgtaccccttcaccagacgttttagcatatgagcccttcggtaatttcaaaatgaacccgacgtccaccagtactgttccctgggtttgataaaacatacactctagcccccgaactccctggaaattggcgcccagtccaaagctcagagaaatcagttatttaaatttagaaattgatttttaatacaaaataaatgcagaaacttgtataattcatatttaattcatatttaattcattttagctccaaattgatccattccagttgcaataattttgttttaatattgttcatcatctagtacctttgtttagccatgaaacttgaattaaaattattcacttgatttgttctatactaagcacgcaataacttcggaaattcataactcctccgttttaattccgaattgacccgttctagttgtgttagcttcgtaataaaattgtctacactttggtaaccttagtttatcatgagacatgttgtaaataattaatttgtttatcctatgttaattggattaatctatgtctattggattaatttttttaatattaatatagtattatgatcttatggttataatttgactacatgatctttaatcaaataatgacttagattaaagttgagataattatttatagaataacctctcatatgatttatactaaccaatttataatatagtttaatattttaatcacatagatcttctaaaaaatcataactccttaattgtatctctgatcttagtaattctcgaacccacgatctcgtagcgacgcgtagatcattattatacaatttattcttatgtttagtgtgatgttaattttgtatataccatgtttgcttgtattgctgtgactagcagtgaggtcacgagaatatgaggatcatcctggtacctggaatctcaagtcccaggcaagttgtgcccttgaccacttttattacccaataatgttctttattatcacttattcatgcataggcttaatttttatgggacccaataggtcaccctagt

SEQ ID NO: 37896 - DNA, 462 bp, Zea Mays
aaacaaggtccaattcaaaccaaactctacccaaggcttctaaataatgtttagagttcaaataaaaagtttggagatttttggatttattatctattttctaaaaatccagaaccaatgttctaggcaattttaaatgctccaaaattccctatttggactaaaaatcaagaaactatttttattaaatactatggaaaattaggaatataggaaaattggtttgacctttttaccatttttctagaattttctatagatttccaaagtttcacaaaaaaagaaaaagaaaaaaaaactgaaatagtgttggaccgaatctagcccaggtggcccaactcaggtggaaagcgcgcccgcgcccgcgctggcagctttgcaaaaaaaaaccttggcttattgaataactagaatctgggtcatggcaatatttgactgagtcgctgacagattacaagaaac

SEQ ID NO: 37897 - DNA, 232 bp, Zea Mays
cccacttctcccactccttggccgccaccctcccctgcccatctcctcctctctcaattcttgcagccacaccaccataccctagccgccccccccccccaatctcctcctcccaaggtgccaacccttgccgctcggatcatcgtcacgtggtgcgagtcttcaatcgttttggtggagggaagaagggaggaaggaaagggggagaattcaaggtgatttttgtgttcat

SEQ ID NO: 37898 - DNA, 546 bp, Zea Mays
ggataatttggacttatgcatggtgattctacttggcgttgagtttttagttacttgtttgcttgctgcaatttactgttcaaaagaaagaaaagaagttctgaaccacgtggttgtgtaagcacagttgatttacaatgtcctatttattgttgttatgtttacttgctgatatgtgttatctcacatcttgcattgtttgatgcaggcacctaatttctgcttttgggaatagagggatgtagcagcacggccacttcacctttaaataaaggaaccaccacttaatactgttgttaatcagagttggtcaagtctagtgtattactttgttcttggttgagcgtttgttttggggtgggctgagttccttatcctatttgttttgtttcagttgggtcataattaagttttaccacttttgcattttagtttctactatgtgaattatatgtctttatatcttgtatgagcttcatgttttccctccttgttatgctagttttcaaaggaggtgctgccggatttttgctgtatattctttct

SEQ ID NO: 37899 - DNA, 281 bp, Zea Mays
cacaccaacatttttgctgcggaaattttattaccaaattttacaacttacaacaagtttacattgtatttatcggagtggttacaaaagtggttcaaaggaataactttgaaatgttataaattatttgtaagtttgaaatatatgctagctcaagtgaccatcctcaataagaagtgtagaagagttacttagacttataagaaggccgagcccaccggcacttaacaccatcagcagcagcacaaaactataacctgaaaaacaacagggaataaaac

SEQ ID NO: 37900 - DNA, 2711 bp, Zea Mays
gcatcacttttgttttaaaacaaaacatttttgtttgctaaagcaaggctaagcatcataaaattcttttcaaaacgggtatcaaggaagggtaatcaattttcaaggaaagaaatgcatcaacggtttagcacacaattcctatcacctaatgcatcaaacaaggtgataaagattttaaaacacaaggaggtggcaaatgcaccgaggcttgcctgaataacactaggttagtgtttgttaggcgatgtccacttgacgatcatccttgtcctagcacttgatcaggtaggttcatccatcagcatcaccatgcagagtagcccgcgcttggggtcgacttggctcgtcttccgcatcacgcgattatttatcgtacctcatgagatgcacgatgcacatgtatgagcacgagtataaatagtacaagatagataatctacgctaaaaaggatgaaacacttataacctataaccaagcatattttatacaatacaccaattacaactttaaaactaaaagacctaaagtgtttatacgcattacttatcagacagaccctaaattttttttgaaacagagatatcgatgttacttgatcctaattattcgaagtagcaatcaacattcattcaaatcatgaaatcgaccaacacacatagaatatcatacctagtttagagagcatgctaaacgacttataactttaacttcaaaattcttggacacctaacacttataaaatttgatagaagaactttcattaactttctaaactaatttacaggttaacctgtatatcatacatattagtaaaacttcccattttaacatctatagtcccgcgaacactgagacctattgagacctctttcaatccactaacacgacatcgaccaaattaccaaaacgactcaggcaatctaataaatattatacctagtcaaaccattcatcaatccactaacacgaataacaaatttacttaccttgactaattcgacgtgatagtcggaagcacgatgacggtttccggttgacgtcatccaggggtcttcttttcttcagtaatcaactgttgaagatcttcttctggcgagtactggagtggcattcgacaaagcgtgagcatgagggtgaggatcacaagttgtcgacatggtgctgtgaccaagagtgatggcgaggcggagatcgaggatgagcatatgaagggaaatgacgatgttgtcgcacacagcacaaaggtgaacgacaacgacacgtatagtactggacgtggccgaatccgttcagagcttcaaatcgacggccaccaggtcacgacaccgagaagaatgcacaaagccaagaggctgcgccagtaaagggagctcacacggacgcaaggacggcatccatggtgaacgcacaggggaataactccctggtagaacaacggggacgcagggtgagctgaggcgcaactgggtagaggaagctgagcgatccagggactacggcgagggagaaacttggcagggtgtggatggcgggacctcggcacaggacgagcgtaggggggtccgcggctgcacgcagatgggctggagcagacgcggacgggcgaagacggctcatcggcgtccatggccatgaaccataaacaaacctccaatattcaactaatgtatccaaaaccagcaaggacccttcctataacttctgtttaacttctgaagttaggacgaacacccgaaaggccgcaagcgagatcagccgttaaaataagaatgggcccaaggtctagaattcacctagttctggtgagcaaactacaacgacactatctgattatgatggtaccacactagaagacatttgagcctgaaaccaccgaatcggacccaatcctgcaacccatacgctaaaaactcgagaacaaaacaggatccaccagaaaactataatcgcgggaagagtaaactgtaaaccgaacaacccgaccaaaccaaactcggctcgctcccggcgtcgtgcggaggcaaagtggccacaagggatctgcaagagtacggagacgcaaagcagcagaacaaatcaaccggtgaagaagaaattatccccactcgaatttgaaacggggtatagagaaggaacgatggaaaacgcgagcttgctagccaccagtgagaggagtgtgccggggaggggactcggccatggggatgagagctcggcgccacggagaagaagcaggcgtccaggggcgcggcggccagggcaagcgccagggagcagctcagctgccgcggcgcaaaaagcaggcacgcgcacgcgagcagggagggagctccgcaagcagagcgcggcgctagagctcacgaggccagagaaattgcccagaaattgcgcacaagagagaggagacgggagggaagtaagggagagagagaagcaccggccaacagagagcgagagggggatgagcgaagggggtgagcgcagggagagcagaggtcgggggcgagctcggcacagcgcgcgcgcaggaagaagctccagggagctgcgcggtcggccatggagggacctcggtcggcaagcagaacagaggacagggcgcggtggagagctgagggagagagagaaaggagcggctcggcgttggggctggaacgcgacgccattggagagggagctggggactccgagcttgaggacgacggcg

SEQ ID NO: 37901 - DNA, 211 bp, Zea Mays
ccctctctcttccactcttgcagccaccccaatccctctccttcttccccaagtgattgcagcgccacccctcaaccctagccccccccccacctcttcctctccaaggtggagcctccccgcttggtgtccgtcgtgtaggtgcgagtcttccatgggagattggagggaggaagaaggaagaaaagaaggaagaaaggaggaacccaag

SEQ ID NO: 37902 - DNA, 793 bp, Zea Mays
accatcaaatcgagctagagccgattcctgtgtagcaagaccagactctagagtgtcgtctgctgcgtatcttggaatcctaggagcttgaggagctgatgcggcagaaatatccaaacctttctttatgtgtgagttttgttgattcattgatatttccttgtcgttccgatagaagcgtcggaattcgaggtcgaattctttttaaggggggtagagtgtgatacccaattttctgaaaagaagtatttttcccttttctttcgtgatctgtgtagttggggttggagttttttacgaagcattcaccaataaaacagtagaatacttgttggatttgtgcgctggggtcgggagcagacgtgagagcgagtttgggccgtggatctcgatccagcggtggggagcccattagtttccccccttaaccctagccgccccctccctctcactcccccacccctttggccgcccctcccctctctcttccactcttgcagccgccccaatccctctccttcttccccaagtgattgcagcgccacccctcaaccctagcccccccccacctcttcctctccaaggtggagcctccccgcttggtgtccgtcgtgtaggtgcgagtcttccatgggagattggagggaggaagaaggaagaaaagaaggaggaaaggaggaacccaaggtgatttttgtgatcattttgttgtatttgtgctgcaatccaattggttacatgtttacctatgcgatttggtagaggtgctgtccagaaatttagtgggtggacg

SEQ ID NO: 37903 - DNA, 544 bp, Zea Mays
atttgatattattttatttgctgagatgtgtcatctcactcttgcattactcaatgcaggtacttgatacatgttgggaatgaggggagtagcagcacgtccactttcactctcacaataacgttgcccaggcgcagccatgatttaattagaaacttattgtcaaaggaagtttgttttttttaactagtcgtgcgcactagttaattcacttcatgtcgtatgtttaacttctctttgctagccgattaataatacttagtatgtttttgtcatgatatatgtttatacactgttgccccctcatttatgcaattttgcaagggggatgctgccgaaattttatatatagatgtcagaagtgttgtttagtagcattctggggtgttggtggaccccggggtgttacagtttcaaagaaatttgtcatgccaagggatgaaacccataccctcaatgtgaagaaggtcgctttgaaatctatgagcaaggattgacttctcgagattgtttgatcctgtttgcatcatttcttgggatttat

SEQ ID NO: 37904 - DNA, 480 bp, Zea Mays
aaatctttgatcaatctcttttggaatgactctctttatgcttcaacatgtgtgtttgacttagagatagagatttgagtttgattttcaaaaacaaaccaagtggtggcaaaggatgatccatatatgccaaaaatgattcaaaataaaatttgagttttatttgaagtgattttgcacttgttctagttgctttatgttgtgttggcataatacaccaaaaagggggagattgaaagggaaatgtgcccttgggccatttctaagtattttggtgattgagtgcaaacacaagtgcttaaatgtgaatctatgcccatggatgaacaaagtgcaaatcacaagtaaaggtatgtttctaagccttagtacattggttttgtgtactaatatacttgtctaagtgttagaaacagagagaagaagaaaagaaaagagattgaaaaagcttggctatgttcagccaagactcagttcggt

SEQ ID NO: 37905 - DNA, 655 bp, Zea Mays
ctgcagctggttcgccggtgctcgaacctcgccgtcgacctccctgttcgtgccctccccatcacgccaaactgcttgcctttgcccagctactgtctgcggcgtcgcgcaccgttcgtcgtctctgctcgtccatgtcgcgcgacccgtctgcacgcgatgctccctactcgcatccgtacagaactgcgccatgtcctgtactgagctctgcatccgcgcttcctccaacatcagctgtgtcaccagaccctcgacgtcgtgctctgcactgggactgtccgtagctcgtctgcttgcccagccgtctgcccgtctcaaaccacgccgccgactctcggcaccacgagcttatcttctgttgcgcacatctccacataccctgccttatcacacatgtgcgttatcgagctcgtcgtcgtaccgtgcgtcatcaagaaatcccgagagtgggtaaagaagcgattctcgcgtggtgctcgtcaaatattcgataaacttcttgaacatattatcgttattatttctacgaattccaagtcggatttaggtaagctaattcgctacttctattattttgttttaatgattggatgcgttggattaaattattggtcgtaatgatagtcattatatgctatttttatttaaaatc

SEQ ID NO: 37906 - DNA, 292 bp, Zea Mays
ttttgagcaagagaaggataatactatacaaaacaataaaaataattatataaatgggcaaaacccttccctactagtatgcttagcctttataattaaaataagtgcaagtgctcaattgaatttgaattcaaaaataaaataaaaggaaaagaaagataaagtatatataatgtattgaattccgcaccaagctggaattcttttgttcgatgcatctactttgaggcttgaaattcaataccaaacttcactatgaatttggatgtgaaatccagaaaatagaaagaaa

SEQ ID NO: 37907 - DNA, 516 bp, Zea Mays
actaaagcaacagcaacagtgtctccatgatatccgcgcatatgaggatgaaacatcgtgatgccggtgtgatagccacgcacacacagcaagagaatcagtggcggtgtcttgggcacctacaaccctagggagagaagtggcagtgacagctaagatgagtctctaatctctagcacgtcagtcctttcatacatatagaccccatgctaataggctttaccctaaaggtccattggcatttacatggatcactattgcctcttgggcatatattcaacacactaatcaggaagcttatgtggatatcgaacaaagctttttttgaatgatgaaaagtcttcttgcaatgctcacaaggatcagaagagctttccttcactatagtgaccgtttgagaggtattgaaacagcaatcaaagcatataaaacatcagttatagatgtaataggagcattgagcaactgcttacaaataggatcaaaatcagactgcaagccatgacaactaatata

SEQ ID NO: 37908 - DNA, 179 bp, Zea Mays
ctcccccctttttcccttggttggccaccccctctcctcccatggcagccgcccaccatttcttcctcctcactagatctccccctcccccacgcagcaaggatcgagaagaggaggagcaagaaggattgaagaggaagagaggatcaaggagatgttctaccccccatctattgcag

SEQ ID NO: 37909 - DNA, 1844 bp, Zea Mays
ttatatatgagtcgtagataatttgtagatctttccgtgtccgcgaagaacacctcaatcggacatcagatcagaaagttattgcagtttgattatagcagtttttcagtctcataattctgtgcagaatctgttctcttaagatttaggcaattttatcaacaaaattaaactatgggttggtaaaagaagttgtagataatttcataaactttccagattgttaaagagtgcattcatatgatttgtgaaactccagttatgtttgttttactgtggctgttcctgtttgcctgacaaaaatgagcgggtctgttcactggtaggtttcatcaggtaaattgccgaattggctcttccaactatgaagacttatgtagagggataaaagttcttacttccagtagaattccatgatttttggttgagtagtttgtgagatatagaattttgaagttaactacgctgctgtctgaaacagattcagtcagttatcttgttagaggttttagaacttgtagatggcataatttaattatccattgaataccgaagttgtagagtattttgtgtagatactcctagattatttgtttgctatcataactgttataattttaaagatacaaaattaacaaacagcgttgctgctgtatgtcatgtggttcagggtgggagtctttccaccaggtcttggtttcaagtgtaggagcgatttgttgattgttgtcaaatgtttgagaaatatttgtactaagttttatgcccgctagcaggtggctacactccagatcatgcatagtacatttcttcttcttcgatgaaggcaagtgaatgtagcagtggttgcttccgttctgacctgttatttctattgcctacactctaatattcagaagtattggattctttcataattggactctatggtgatgctttacttgcttgcattatgctgatgctcaatcatatattgatgatgataatgattcgagtatgactcgtgagattaattcacacccctaaaggtaaatgaagtattatttgaggttggtattgtatcagaaggtaaatgaagtattatttgaggttgtattgtatgtgaaggaagtgaagtatattgataaatgcagcatgccatatacattgcatgattcacttgcatctgaagttttgtcgtgacctatggtccgaccgtaccggtacaacttagcatcgtacgttgcccgagaaggggtacgatgcggcttcatacccttagaggtatgaaggcagaggacatatgcattgcattcatatgcattcattgaagtggtatttgtagatggtgtggttttatactctaagaggtatgaaggcagaggacttacacattgcattactatgcatacatcgaagtgatatttgcaggtattgttgacgcaggaaagtgttatacaacctattgtggttgttcgcggaaattagatggtgttgggggccttcggcttccgaaggtcctcaaaaacatgatttaacagtgtttttagagtataatgtgtgagcaggtatcttcggactcgtatcagaaagggagaagctcaaaagatacgaaggttgacacagcgccgaagctgtgaagcaggaaagcttcggcatgttcgcagaaaagggaaccgacttaaagatgaaaaggccatttagacctcgatagattgctatagaattatcaccaaatgtaaagggcatgtatgtaattttgtatgggttgtaccccgtgcctataaataggtgaacagtacccccgtattgttcacgctggcttggtgttcacttttgcgtcacgcttgtactttcatttcctt

SEQ ID NO: 37910 - DNA, 1006 bp, Zea Mays
cgggcttgcacgagagggctttccccgcattttgtgggaggtacttcagggggccggatacacgacaccccctcagtacgcggtgcagcagttcgagaagcaccaagtgccccgctgtagggtgaggatgaccttggagcctcatcccctgcagccaggctggcattctttggactccgagtcttttggataccgagctgaggatacaatcgaggcgatcgctctgcatggattgaccactttctgcggattccatcctttggagctggctacccaccccattggcttgttccccgctgaaaaggaggacgacccaatgtggaaggatcgggtggagcatgccaaggatatctgggctatctacccaggacaaactgcgcacttgaccgtacgatgcatgaatgctctgtaccgcctgcaagtgatgcgcggtgaggcgatgtcccatctgatggcactattggaggcaacaaagattaccttggacaacagggaggagcttgtggttgatttgtccactgaaatggtggagaaggacttgcaggtggagcagctatccactgatatccaagagttggaggatctagtgggcaccagggagaacaccatcgaggttctcgaggtcagctcattaacacccagcagcagcttgccgaggctaacgagcacctggatatgcatcaccaagagatccaggacatggaggccaacaaggacgtcgacatcgagggaggagatgagcctgcctctagtgtggacactgctggctcagggagaccaccttcccccgagtcgagtgttgcctcgttcgctcactaggtgttcagggtagggttagaagttggatggtaggactcctcgcagctagcttagcttttgcacccttggggtactaggctagatagagttgagtctttttggggacgaatgatgtaatcgtgataaactcttttggaagcatgtttgatggatgctgttatcagtttttaaatttggaaggaaaaag

SEQ ID NO: 37911 - DNA, 535 bp, Zea Mays
ctctgaaggagctcatggctcagcagaatgagatcttgagacagctggcccagcgtcagccaccacctcagcattatggtggtggagaccatcagcgtcaccccgcggcagctacctaccaggagttccttagtacccagcctccattgttcaccatggtagaggacccacttgatgcagatgtgtggttgcgagtggtagaatccaaattcccgctactccatggagcttgttctgaagtcactaaagtcaggttcgccacccagcagcttcgcggacccgcaaggacttggtgggaccattttcttgccatgcagccagaggatcgagaggtggaatggagggagttcaaggcagctttcaggggacaccacataccagccgggattatggaccaaaagctcaatgagtttctggcactcactcagggcaacaggacagtgttgcagtatgcccaggcttttaatgacttgtgccaatatgctggatatcacgcagacacgggtgagaagaagagagacaggttcaggagggg

SEQ ID NO: 37912 - DNA, 318 bp, Zea Mays
agtagactcctcacaccgggtaagtctagctgagtattagtatactcagccttgcttgtggcataattttacaggttctctggaggacatggttgctagagtgacttggccgtccatcttgccaccgggttggactatcgagtgggaccctacctcggctgaggaggagcatgaggagtgatgggacaggcttccccatctctatgtttaattaccgttagttttattccgctgcacttcgaacactgatagctacttttgcaaaactccgatgatgatgtaataatttaatactctttaatgcatggttttatgctt

SEQ ID NO: 37913 - DNA, 243 bp, Zea Mays
gtacctccttgatttggttgatggtgtgacttggccttcatccctgtcaccgggatagacggtcgagtgggttactgcttccgcaggagaggaccaggaggagtagcgtggcttggcttcgccatgttactcggttttctccgttagttatttccgctgcattaaaaatttattgttattatttctgaaactccgataatgtaatcactaatgatactttcttaatttatggtattatgtttt

SEQ ID NO: 37914 - DNA, 86 bp, Zea Mays
acgcaaactagcattttctaaactactcgtcacatcaataaatatatcccctatataatcacgaatcccatcacattgcataaaac

SEQ ID NO: 37915 - DNA, 112 bp, Zea Mays
ttaaacaaaattaattcaactggaatgaatcaatttggagtaatagattttaagttatgaatttctaaaggttttatgtgcttaaaatagaattaaatgagaaattattttt

SEQ ID NO: 37916 - DNA, 147 bp, Zea Mays
gactatcttaactggccacatgccctggatatgggacagggtaagcttgaacccgactattccatacatgaaaagacaatcgcgcactaggagtggagagatggcgagagtggcacgtaccctcctggcaaaggaccgcctaaaagg

SEQ ID NO: 37917 - DNA, 422 bp, Zea Mays
atccacttttattacacttttgagtattataaatcctaccccccttaaaaataatctcgtcctcgagatttaagaagatctagggaaaaggtggggaaaatctatacgaagctcttcttctctttcccacgttgcttcatcctctccatggtgactccattgtaccttgcacatctttatcaccttatttcttgtaactcgagtcaaagtgtccagaatcttgattgggtactcagcataagtcagatcatcttgaacactgaggtcctccagtggtagctgctcctctggtaccctgaggcacttctttagctgagacacatgaaatacatcgtgtacatcggacagatgatcgggtaacttcagttgatatgcaacttctcccactcgctttaagatcaagaaaggtccaatgaagcgag

SEQ ID NO: 37918 - DNA, 251 bp, Zea Mays
cctccttaaactccagtagtcttctcctattatcagcatagctcttttgccttgattgtgcaattctcaaattttctcttatcattcgaacttgttcttctgcctcttgaataagctaaggcccaaagaactgtctttctccagtttgatcccaatacagtggagtcctgcactttctaccatacagagcctcaaatggtgacatcttcaaactggcctgatagctattattataagaaaactcagcatag

SEQ ID NO: 37919 - DNA, 204 bp, Zea Mays
cttggattctccccctttccttcctcccttcttccctccaccaaaacgattgaagactcgcaccacaacgacgatgatccgagcggcaaggattggcaccttgggaggaggggattgagaggggggggcggctagggtttggtggctgcaagaattgagagaggaggagatgggcagggggcggcggccaagggggaagagaag

SEQ ID NO: 37920 - DNA, 225 bp, Zea Mays
atatagaatagtttaaatgtgcttttagttagactctaaatataatgattattttgtgcgcactatctatttgaagcaattacttgaagggataaaaataattagtaaatgtataaattatatttgcatgcatgctggtctttcgatttgtgcatttgaaatttcaattaaaaactcaaacagatttaaattcgaaataaaaaaaaaacagaaaaaaaaacagaa

SEQ ID NO: 37921 - DNA, 358 bp, Zea Mays
cccccacttctcttcccccttggctgccgccccccctgcccatctcctcctctctcaattcttgcagccaccaaaccctagccgcccccccccctctcaattccctcctcccaaggtgccaatccttgccgttcggatcatcgtcgtcgtggtgcgagtcttcaatcgttttggtggagggaagaagggaggaaggaaagggggagaatccaaggtgattttttgtgttcatcccttgttcatttgcgctgcaatttaattgattagaggttgcgtttgcgattggggtagaggggggctgtccagaattttaggtggtgggtgaacaacagtagtctagcagtttctgtgttttttt

SEQ ID NO: 37922 - DNA, 356 bp, Zea Mays
cttctcttcccccttggccgccgccccccctgcccatctcctcctctctcaattcttgcagccaccaaaccctagccgccccccccctctcaattccctcctcccaaggtgccaatccttgccgttcggatcatcgtcgtcgtggtgcgagtcttcaatcgttttggtggagggaagaagggaggaaggaaagggggagaatccaaggtgatttttgtgttcatcccttgttcatttgcgctgcaatttaattgattagaggttgcgtttgcgattggggtagaggggggctgtccagaattttaggtggtgggtgaacaacagtagtctagcagtttctgtgtttttttcgtgag

SEQ ID NO: 37923 - DNA, 1117 bp, Zea Mays
gatccaagcgcaaagtgcttctgtaacttgcatgagctactgtacgagacgaaggccactggcaaggagcaatatcacaacaattttggttgctatggcttcgttccttgttctgatgtaagttatccagttccaacatttcgaaaaaggtggcccgaggcctggatggaggaatggttctatgtaaagaataatctaattgaaagggaagacataaaggggattatctagcgccctacctggtcttgcttcggcatcagaaggccgactactgtacttgggaacgacatcgaagcctgccagaaggctttcaacaatgtttgcgcctttattggcataagagacctagttcaggagcacatagcctacagagtgtggcctcttgtgaatgactgggagatgccaaaggagactgctgccgtgtctagtcaaggtggtttggtttacttgaaatacaccttcagatatagagaccaatttgacgagccgaatgatgactggctgacatatgttgtggcgactggcgatgagttgcttggggcgtacacgagagccgaagatgatgccatgaccttagccttcggaggacgaggcaagaaaaggatgaacagagttttcgacgttatcgacttcgtgtacccggactacacttatccctcgcaaaagcagtgatagaaaagaaaaactaccgcttcggctatctctgttgtgccgaaaggcaaaaagattaaggttttaaagcattgacctaggtatattgaaacggccacggtgccgaagcttggtgaagggacatcttccatcgcggagccaggacagtctgctactgtcgaccgaagcgccaaagaatcggctgaagtgccaaaggttcctgcatccgaatcggcagaagcgccgaaacatactgccgaagccaaaggaaaggcagccgaagagccagaccgagaggaaatgacaggaccaccaaaaatcttaagtccgccaccggagctagaattgccgaaggtgtcaaaagctcctgcaataactccaaagaggaggaggatggcaagtgtgctggatgctgtcatggagtcaacaaggacattgactcctgcctctgcaaagaaggttgccg

SEQ ID NO: 37924 - DNA, 917 bp, Zea Mays
cttgaagttggcctctctgccatgtcaaaggatgacctcgcagacagccttgcgtacaacagtctgaaggtacaaaagttatggacttataaatagattatcttttgtcttttattctcgtgctgatcctttatctcccttctttttgcagggctcaattcttagcaatgttttgagggcgcagaaaaatgctgaggatgaaagttgtcagatagtgcttagcaaccttcggtcggaggttatcagactgaggaacaaagctgcagaaaaagacaaaattctgctttccttagtggacagagtgaagaaagatgatgcaaaattcaatgctcgatctgaagtccataaagtcgaagttgagaaccttcaaaacaaacttgccgaagctaatgaaaattttgaacttgcaaaagtaaagcaagaaataagtgaatggtcgaatgctatgctggaaaagaatgttgaggagcttcgtgaatccaaggagagatgctttgagaaatccttggattgcgtaagaaaactaaaaaccagctttgccaaggtgggtgcgtattcttccaaagaaaagttcattcgaggtgaccccgagggaatcattgattggataggtgaagaagccgaagcttttgaagatatccttagtgatcatggtgatatttgtgccttcgccggtgcttggggggttgcagcaattctggagaaggctggttgtgaccatgttaaagctgtggctcagaccgaaaccgccttctccacagacgacacgaaggacccctcggccgaagccactttggtgggcgggaagttttattccgatgtctgggtgaacggtggccgagaaatgaccaacaagattataaagaaaaacgaaaaagaaactcatgatgctcaagaagaagctaagcgagccgaag

SEQ ID NO: 37925 - DNA, 587 bp, Zea Mays
ttggtttccaaaaggagaccaagaatgtggcagaacctcccaagttattggcccacatgcacctgcccttatctcaaagacctcaaacggctatgcatgtgcaccagataacttaataggatctgtccgagtgtcccaaggacctcggataaaccacttacaaccaggaccgcaggattaagtaaacacaaatcacacaccaacaatttgcaatagaaatcttattactaaattttacaagttacatcatgttttataatgtacatgatcggagtgattacaaaagtgattcaaagaattaactttgaactgttataaattatttataagtttgaaatatatgctagctcaagtgaccatcctcaataagaagtatagaagagttacttagacttataagaaggtcgggcccaccggcgcttaacaccatccacagcagcacaattctagtacctgcgacaacatgggttcgaaaaccctgagtacgaagtgtactttcgcaagtcttacccgtctaaggaaaaagactcttaaggatatgttggcttttgggaatcaaggtaaagcttatcaagaatcaaagactc

SEQ ID NO: 37926 - DNA, 664 bp, Zea Mays
aagtagtcttttcctccttcggctattatcaacattcttctactttgttgcgagccgaagctttttcgtctggcaataactttggtgtttactcttatcttctttgaatccattttcatctcctagaaatgaagcttcctgtaatagcttatgctaaaaacaagtggttaattatgtttttgaggaactttggaaggagaaggcccccaacaatagcatccttcatgctccttatcttgtggtacctgttcttgacttggcgtgattatatcaagggtgatctcatatatgttcatcgctcagcaagtgtgagaaaagtatgatttagctcacttatggtgggggctcaagtgtaaggcttaccaaggaaaatggttaatgctgagcattgattttaataagttggtcaaaattttattagtagttactaaatataagtgaataccaacccaattaattaatatatcatagatgaataataaatcccgcaatgcaatgcatgatagattaagtttaattccataaattactgatgtgagggttcgagccgctcttgaccgtgagcatgactgatataccagttttacaatctacagaggttgcacacctttacccacaagtcatgatcgcttattttcctcaggttgcgcaaatccttaaacac

SEQ ID NO: 37927 - DNA, 325 bp, Zea Mays
attcggcccaaagcaggtatggcttcctttttatttttttctttcttttccacttcttttcatcccagctgcccagcaagtatggcttcctttttctttttttctttcttttccacttcttttcatcccagctgcccagcagacccaaaccacgacggcgcagagcctgtaacacccctggtgttactggcactaaaacttgagcataacatcatgtgcattgacatttcatgttgtttgttacaccatgaatgcattcactaggtaaaatttcaaaacaagttgtgatgtggtgacttgaaaagtgcttaaccttagggtaggg

SEQ ID NO: 37928 - DNA, 272 bp, Zea Mays
ttgaaaataaataagttcacccatgtcatgtttaagggggacatgtgatagggaaacaaatttactatgaactttgaatttgaatagggatttaattttggaatctaaaaacaaaaaaaagaagaagaaagaaaacaaaaaaataaaaacataaaagaaaaagagaaaacccgtagctgggccaacttcacccaatttggcccaccaggagccctccgcgcagcctgtattcgatggtgtcactagtctacggggcccgctcaccggtcgat

SEQ ID NO: 37929 - DNA, 122 bp, Zea Mays
gaaataacaggtcaaaacggtagcaaccaccgctacattcacttgccttcatcgaagaagaaaaatgtactgggcatgatctggagtgtagccacctagggtttccccaagaaaatctgcaa

SEQ ID NO: 37930 - DNA, 122 bp, Zea Mays
aacgacgcaggttcattgcgattagcttgaattgtgtattccgctgcggtataagacaggacggggcccttgctccatcctgtggccgatgagttcacctgccgaggaagccgagcgagaag

SEQ ID NO: 37931 - DNA, 270 bp, Zea Mays
gtctaggacgtcgtctcccaatcaactttgagttgctggaccgttgtgtccttataatgtaattatttatttattttgtatagaattcctgttatttagtaaagatgtgacattcgatcctgtgccatgattcatcatatgtgtgagacttggtcccatcacacctggtgattatgttcgcgcccggttcttggacccctaaaacccgggtgtgacaaaagtggtatcagagcaatgttgactgtaggacgaagcctgaatggaactgga

SEQ ID NO: 37932 - DNA, 805 bp, Zea Mays
gtaacctgttaaggtcttatatggtgtttgctcttgtgcttgatgtgtcgatagaaggttggtgacttgtttgcctaaactcaaaactaggctatgttcttatttagtgagccatgacccaaaagtcaagttttccgttatcactccatgaccaaacacataaaaataaatgcctagataatttctttgttggacctaaagtgtacccggacttgaaacaagaatctcgagtcatgtctccatcctaaaccatatccttattcagttggtgcaagctgatgtaccttattcaattcgcctgttcttaaggatcgccatgttgctttatcaacctaacccagaaaagacatgttcgagtattttcttgaatttgatgcctttggtttccccatatctatcaaaggcataccaacttaatttgatgattgttttccctccgtatctaatcagatactaatccttgaccttgtaaagttgtaatctctatgatggacatagaaatatgcttggggctgaattaatagtctcccatcatgctcccttcatcaaccaatttaggttatggccacgccttgttcatttcattgggccataatctctttgactctctacttgtaacctttcttacaggtggagtaactctttgtaaattgtcatccttgatcagtttattggtgtcacgcgagatttcttattggttatgtctggtattggtgttatgactaaaattgatgatactgtgaccaaaccggggaccttctgtgtgtgcgcacacatggttgtgctgctcggtacacgctagtat

SEQ ID NO: 37933 - DNA, 579 bp, Zea Mays
ggcctcctgtgaatgcgcacataggattttgctgcttggcgcgtgccggtaccgaagtctctagtcatgatccattatggaattaccctggcgtgtgatcttccgtggaccccttccttgaaacgattttggtgttgtttgtcgaggtgatcaagcaacatctgtcatctccattggatcaaaagggcataccactttcatgtgtggtcttatttcttttgatcttggtagtgactactcatacaagttccctttacgtcttttgggtaaaggtgaagccttggagctttttagtgttgaaaaacaactaattagctctcaaaatagagatttggctttccctgctgctgagatgcaggagtttgttcattcgctcttttatttaatccatgtattccctaacctagtagatgatttacctggcatgcagaaatgaatgaacaacctgaccaaatggatttctatccaagtgcatgatctcctgttaaccaaagtgaactctcaacccttggcttaccaatggtactgagacgacctgctcaatgtcagaagtagttcaacaagttggttttactaact

SEQ ID NO: 37934 - DNA, 297 bp, Zea Mays
gtgtaagtcttgctgagtaattccatactcagggttttattccctgttgtttttcaggttatagttttgtgctgctgttgatggtgttaagtgccggtgggctcggccttcttataagtctaagtaattattctatacttcttattgaggatggtcacatgagctagcatatatttcaaacttacaaataatttataacatctcaaagttattcctttgaaccacttttgtaatcactccgataaatacaatgtaaacttgttgtaacttgtaaaatttggtaataagatttttccg

SEQ ID NO: 37935 - DNA, 2076 bp, Zea Mays
tgagcccctctctgctgacgaggaatcgatggggacggttgatgtgtgtggggacagagtgcctcgccatgtcgtgtgtttaggtttaccttgcaaggataaaaactcgattcgaatcgtctgcttctcgcagctaatgagactgcttgatccattgtactgcattgagtaacaagtggaaatgtgatgatttggcaaaagatgttgattgctaaattgcttgataccatgaatgagtagatagtacacatttagccttaagagagtcacactaaaacttgcaaaagttaaaacttgatttttagactcagctagtgcttttgacaaccaaacccctcagccaaacagctgcatgtctagaggtagaggagtagactcctcacaccgggtaagtctagctgagtattagtatactcagccttgcttgtggcataattttacaggttctctggaggacatggttgctagagtgacttggccgtccatcttgccaccgggttggatagtcgagtggaaccctacctcggctgaggaggagcatgaggagtgatgggataggcttccccatccgccgtttgtttatcgttagttttattccgctgcattccgaacaatgatgactacttttgctaaaactccgatgatgatgtaataaatttaatactccttaatgtatggttttatgctttattgtatttgctctgtgcctcaccatcgagtgagtacgtggtacttgatcctgttagtggcctcgtcggactagatccgagggactgacgtgttattcccatttaagtgtggtctagcctctaaggcgggacttaggcacttaagttggaataattcgtgcggttccgccacttcggcgagcacgcagcgaaacaaccaacagcggcgacagtcgaatcggcaacagagcgttggcgaatttgacgaacatgaccactgtcgcgtgctgacgcagataggacaatggtggctggtggaatccgagccggggaaaatgaacacatgactgggcgttaacgaccaggtccgaacgcgaggaagaaactcgactggcgagctggagcgagctgggcacacgacgacttgaggatgctgcgcgcgcgcacggactcagggcgcacagcgagctaaggaacgatgacgaggtcgcggccgagccggacgaggagcatgtggccaacaccaagggcgagcgtagcagggaaccatgtcccgcctggccgagctgaaggaagcacagaccagagggagtgccacggcgcggagactacgcgagctggagtgctgcgatggggcttgagccggcctgacgacgagctggccaagcaccagagaaagccagccgcgatgctgggagttccggccatgggaagtcaggggcgagtgccaactgagtgcatgaagcagcgcgcgcgtggtcgactggagctgagcaccggtagggacctgcgcgcccgacgagcagagcaggggcgcggctgcgcacaagcggacagagggagggacgaccagagcgtaggggagttcgacggcggccgccatggcgcgcaaggagggcaaactccagggagggcggccaagggaaacttcacgccatgggagagagcagagagaaacgggctgagggaggagcgagcagggagggagcgcgtgcagggagagaaatccagcgccagggaagagctcgcaacagggacacggcgagcagggaggggtaccgcggccatggagatgcactgcgagggagaaaagcaggggcacgcaggagcagtcgaccgcgcgctagtgagggctggagatggggaaggcatctgcaaactccaggaggagctccagcttccaggtcggacgccagggagcttaggccatggcgacgagcttggggagatggggaaaaccggcccgccagcgagccggagcacgggaggcacgaccatggctggagcaggagcggtcggccgagcagcttgcaggggagttccatggctgggaccaggggcgtgggagctagagctgcatggcagggagatgggcgcagggaaaatctcggctagggagatgagcacc

SEQ ID NO: 37936 - DNA, 1914 bp, Zea Mays
cttcctcaaccctatcctctgctcaaatacggcagctgcatttgggtgctcatctccccagccgagattttccctgcgcccatctccctgctgtgcagctctagctccggcgtccctagtcccagccatggaactcccctagaagctgctcggccgaccactcctactccagccatggtcgcgcctcccgtgctccggctcgccggtgagccagttttccccatctccccaagctcgtcgccatggctgaagctccctggcgtccgacctggaagctggagctcctcctagagtttgtcgatgccttccctatctccagccctcactagtgcgcggtcctctgctcctgcgcgcccctgcttttctccctcgcagtgcatctccatggccgcggtgtccctccctgctcgccgtgtccctgttgcgagctcttccctggcgctggatttctctccctgcgcgcgctccctccctgctcgctcctccctcagcccgtttctctctgctctctcccatggcgtgaagtctcccttggccgccctccctggagttcgccctccttgcgcgccatggcggccgctgtcgaactcccctgcacgctggtcgtccctccctctgtccgcttgcgcgcagccgcgcccctgctctgctcgtcgggcgcgcaggtccctgctggtgctcagctccagtcaaccccgcgcgcgctgctccctgcactcgcatggtgctcgcccctgacttcccatggccgaaactcccagcgccgtggcactccctctggtctgcgcttcctttagctcggccaggcgggacatcgttccctgctgcatgctcctcgttcggctcggccacaatctggccgtcattctcagctcgctgcgcgccctactccactgtgtcgatctgcctaactccctgagtccatgcgcgcgcgcggacccggccgttaacgtccagtcatgtgttcgttttcccagctcggattccgccagccaccattgtcctatccgcgtcagcatgtgatcgtggttgtgttcgtcgaattcgccaacgctcggttgccgatttgactgttgtcgctgcgtgctcgccgagtgtcgtctgttgtacctcagcactcgtgcttgccgctggcttgcgttaacgctcgagcgtctgcttgttgtcgctgtggtgcactcgctttttgtccatcgagcttcacgcatgctcgcgctaacctgctcaaccccacctcgccagctcactccagactcaatctcgtcgtcgttccgtgcatcgtcaagaaatacaaagcgtcgggtgaagacaaagctagcagtttgatattcaccaagtgcttgacaaaacgctcgaacaagtcatcgatcgtcatcctcgttgtttacgcctttccggagcgtcaaacactcaacaagaaccgtgacggtgccctctgcacaggggcggacggtccgcgcgcggggccggacggtccgcggtctggtgcaaggcgcggtggtactctctgcgcaggggcagactgtctgcggcctgcggccggacggtccgcggcctggtgcgcggctagggcttttctgcctgacggccggacggcccgcgccctcgggccatacggtccgcgcgtacgcagaggcggcagaagtcgtcggcggcgcctggatctcgctcccgggagggaccccgtcggggaggagagatcctaggtggtgtgtaggcttgggctggccgacctagactcctctaatcgacgtagagccgaagagagacgaagaatttaagaattggatagctaaacctaaactagactagaactactcctagaataaaatgtaaattgtattgattgaaggttcgattgattgttacaaatcggccgtagacctctctttatatagaggaggggggctggac

SEQ ID NO: 37937 - DNA, 466 bp, Zea Mays
catgaataaaaatgatgttgtattgatgagatggtgaaattgatccaaatgcaaacagagtctattaatatttaatctggcattaaaatgttgaaagtaaggactcactttagtaagctatttctgcaaaaatatctaagttgatccttgctaaagccttttccttgattcctatttaaccagcataccctttagagtctttcctttagtcgggtaagtcttgctgagcaattccatactcagggttttattccctgttatttttcaggttttaactttgtgctgctgttgatggtgttaagtgccggtgggctcggccttcttataagtctaagtacttcttctatacttcttaatgaggatggtcacttgagctagcatatattttcaaacttatactttttgtaatcactccgataaaataatgtaaaatttttgtaacatgtaaaatttggtaataagattt

SEQ ID NO: 37938 - DNA, 2131 bp, Zea Mays
cgttagcaattacaggatcgcgtgaacagtgccgagatactgttcacctatttataggcacgggatgcaacctgcgcaaaattacatttacgtcctttacaatcgactacaataatgacacaaaacatcatgggtctttaagtcaattcatctttaagtcggttcggcccttcatcttgagatctgtctttgtgctgaagctttatagataatagcttcggcgcttgcttctgagaagacctttcgaaggtgttctctctctttaggatcttcggctacgaagcatacccccaacaatatgctagctcaagtgaccattctcaataagaagtatagaagggttacttagacttataaaaaggccgagcccaccggaacttaacaccatcatcagtagcacaaaactataacctgaaaaacaacagggaataaaactgtgagtacggaattacgcagcaagacttacccgactaaagaaaagactctcaagggtatgctggctagagggattcaaggtatggcttatcaagaatcaaagactctgttttgcagaaaagcttactatgagtggatccttaaaaatccatttttacttgtcacgttaagtaaaattacatacatctagagttctttctaccctacttcaagcacttggcctatactagccgtctttttatcatcccttcagttcactggattgctatgtgtaggtcagtgaccaagtcttcatgtccgagaagtaacggcgatccaaatcgattaatacccagctggggatctccgatcacacgacatatgtaacacttaacccttgcatatgtcaactcgccatcggggttcttaagaccatatcaggttcacgccaactgagagcacagatacaccaccgtccagcctcttgccacggagggtacacgctactctcgccatctctccactcccgttgcgtgttatcttattctggtattagtctgcccgaggcaaagcttacccatgatgaggcatgtgaccagctaaaaggtcctctatcatcaagcctacatcgataaggtccttaatcgactcagacggagacactacaccgagactcctttctcgtgcaagtcaaccgtccggtctcagctttattattttcaatccaaagtttggtacctggcagaggtacatcttttccgatgttgaacccatcaaggcctttgatggatccatcatcaagttttattttcgaaaacattcccacccactgaagcatcacttttgttttaaaacaaaacatttttgtttgctaaagcaaggctaagcatcataaaattcttttcaaaacgggtatcaaggaagggtaatcaattttcaaggaaggaaatgcatgaatggtttagcacacaactccaatcacctaatgcatcaaacaaggtgataaagattttaaaacacaaagaggtggcaaatgcaccggtgcttgcctgaataacactaggttagtgtttgttaggtgaccacttggcgagtacctttggcttggcactcattcagatcatccatcttccggtttgttcatcagcatcatcctgcggagtagcccgcgcttggggtcgacttgggtcgttttccgcatcacacgattatttatcgtacctcatgagatgcacgatgcacatgtataactagtataatatagataatctacactaaaaaggataaaacacttaaaaccaagcattaagcatcatggatatcacagcagggcatcgactacatccattaaccaaattgacataataacactaaaacatctatttttattcctagctttttattaactctttaaactgtgtatcttaattacttgatttacctatttatctaaatcgatcatcacaatatacgcatgctaaattaataacatttattgagaccaacaattctatttaatctatttatagacctagttgactggaatacgaatcaacttacccttatgatatccgacttgaaaccagaaatcgacgacgcctttcagctcagcatttcaccggaaatagggtgagtgctgtgtcaaattgcgcttcatttttatccgcatcaagtattcttcggcagcatactgatttattttcttctgcgcctaatc

SEQ ID NO: 37939 - DNA, 552 bp, Zea Mays
ccctgctagcttcgtcttcacctgattcttgggatttcttgggatgcacgaacgacgatgaccttcgattgaagtcttcgaccgagcactggataagcgatgcacacggaccttgcttatttttgcctaacgtctgggattcagggttcgacaaggtcgggcagggaagaacgaggttcgacgggcttgacgatgatacgggagggtgacgtatatagagctgcaggtctggcgagctgacgcaagagacggagacagccgtgtatggcagcagtgcgtcgacaatctatagatttgagtgttttatcgaataggcgggatgcgaggagccaagcaatcacttgaacatggtcgacggcgaggtctgctgggagataatatcggcacaccacgcggcacgacgaacgcgcagagcttcaaaaccacgcgcgcgagatccaactactgcgtgatgcgccttaggaacaagcgcacgcgacagcgcacaaggtcgacgagccaaacgacacagggccaagaaatgaacgcatttggcgaggtcgcgaccatgga

SEQ ID NO: 37940 - DNA, 350 bp, Zea Mays
attggaatataagttctaaaggaaattctataacttgagaaaagagaggaaaatactaagcaaatgagataaaataaaatatatttctttactctaaattttgaatttggtacactttgatccttgatgaatcttataactaaatttaaatataaatttgaattctaaagacaaaaaaaaagaaaagaaaaagaaaacagaaaaggaaaaagaaaagaaatgagtaagtgggctccctgcgccatttcggcccactaactcctccacaccgcgtggcccagctctggtaatggcgccgacaagcgggccctgcgtattggtcacacgcgcgcacacaggaaccaaaacct

SEQ ID NO: 37941 - DNA, 409 bp, Zea Mays
gtacactttgatccttgatgaatctcataactaaatttaaatttaaatttgaattctaaaaataaaaaaagaaaaaaagaaaacagaaaaggaaaaagaaaagaaatgagtaagtgggctccctacgccatttcgacccactaactcctccacaccgcgcggcctggctctggtaatggcgccgacaagcgggccttgcgtgtcggtcacacgctcgcacgcaggaaccaaaacccagctcactgacgccgctgggccaccacctagtctctccccctccacctcgccacgattgcgcggaccgcttccttcgcaggcgaagacggaatccgttcaaccatctacgcaccttccctgcaaactgcccaggagcctcagcttcgtggataaagccaacgcgccgttcttt

SEQ ID NO: 37942 - DNA, 773 bp, Zea Mays
tactgatttattttcttctacgcctaatcttttcagagcttggcgtagacgaggatgacgatcgacgacttgttcgagcttttgtcgagcacttggtgaatatcacccggttagctttgtcttcacctgattcttgggatttattggggatgcacgaacgacgatgaccctcgattaaagtctttgatcgagcacctgataagcgatgcacacggacctcgcttatttttgtctaacatccgggattcggggttcgacgagcttgacgatgatacagaagggtgacgtatatagagctgcacacacgacgcgacggcgagctgggcaggatccgagctaataggcatagcatgggacagcgaccagcacgacagacgaactaagtcacggcgaggtcggccgatgagggaaaacaagaaacatgatggtcagtcggcgagctgaagattgggaacgacagcctgttgaggagcttatccccagagagccgagaagggagcggccgacgagctccaaattggggccagagacacgcgtgcacggactcagggagatgggctgcggccacaggggtcgcccatcggagcagtttcgcgccacgactacaagaaaaaaatgagcggcacgcggccaacagggaagcttcgcgcgcgccatgggagagctggagatggccggcgagcacgcgcgcgcagcaacgaatggacaccagggcgtgcgcacagggaattttggctgggcgcgagcacagggatcgagcttgagggcgagca

SEQ ID NO: 37943 - DNA, 462 bp, Zea Mays
cacgtctccacatggcaggacagccaacatgctgaccaccacggccagacccgcgccgctggcctagagcacgcacctggcgcggattgctcctcggtctgcaatcatgcggcgtggagaggagcaggaacgcgcgcaccagggagctgagcggctgaagacgaagctgcgggaggggcggccattggagaggagcttggaaaactgagcgccgtggaagatgagcgtcggccgaggagggcgcggtccgagcctgaagtcggttgagtagaagctgggaactgacgtcgaggggatagaggttttaggcaaatcccagggtgcagcttgaggtggaggacgagcacagccatggacggaaaggagcaggggcatgattcggcgagattgcggaacaaggggcgctcggccgggcgccagagctggaggagaggagcgccggtagagagagcggaggccgag

SEQ ID NO: 37944 - DNA, 299 bp, Zea Mays
aaaaattcaggttagatcttatcccagcacccttttgagcctcgcactttctttcaataatctgcattgttgaatttgtgtgctttcgcgtcatttgttgctggttgcattgtgttcttccaccattcaaaccctagcgccgccaccatctcccgtttgatcacgccacaaaccgagtcaacatcgtttccttatttttctccttcggttacgtaaaaaaaaaacagaaaaaacaaaccgagtcaacggccgtttccttgtttttctccttcggttagaaaaaaaacagaaaaaaaaac

SEQ ID NO: 37945 - DNA, 2672 bp, Zea Mays
aaacgaatgacaaatctttactatataattggagttctgtacaaaatagttaatcaattacatcatgcgaggacaacgatccagcaacacaaagttgactgggaggcaacagcctagaccactcacaaactcatcacatcatccttcatgcgcctcatccagtggtacctgttcttgacctggggggatgcgagtacaacaagggtgagctcacatacgttcatcgctcaacaagttgtggggaataatatgcatgaactcaccaaaagtggtagctcatgtgaagtgtaaggcttaccaaatgagatggttaaagctgagcattgcttctaaagttggtcaaaattttattagcagttactaagtataagtagatatcaacccaattaagtaacaaatcaaaatggataataacacccgcgatgcaatgcatatgccagattaaatttagttctataaattaatcatgcgagagtcctgagctgctcatgaccgcgagcacggctgatataccaattttatactctgaagaggttgcgccctttacccacaagtcgtgtatcccgtctagccagggttagccagacccttaggcacttccgaggtgaatgactagggatccactatgaggcctttacaaagttctactagcaatataggaatcccccgtccaaaaagccatcgcagcatgatcgacataagaacctccctataccgacaactcccctacttcccttgcccctttcgagtaacgtagtcctccactagctttcctaattagtcagccaagggtgtcatattctacccttgtggtagcacatgtttctcaagttaagctccatgttccaattaacacaatgatcttgtcatgaacaataattaaaacaatagtataactgaaacatgatcataatgtagtattaatcctaaaactaggtagagcaatagcaaaactaccctaaaagttcagtggtcaacaaggtgtgggataaacaagtctagggaaacctattaggtcccatcagattaacttgagcacatcaaagtgattaacaggaacattattgggtaaagaaaagtgatcaaggacacaacttgccttagactcgagattcccaggtaccaacttggtcttcagattctcgtaacctcgttggtactcataacaatacatacaaacagacaaggagtacataaaaataacattacaccaaacatgagaacaaaccacgtaagaatattctacgcgttgctatgaggtcgtaggttcaaaaattaatagaatcagggttacagttataaagatacaattttcagaagatctttgtgattcattaatagtaactatattctatggtgattagcgtaaatcatatgagaaaatattttaaagaaataattaattcaactttaatctaggttataacttggttagagatctattttagttagattataattctagagaggttgactgactagattgattaatcaactaacataagctaaaaaaaatatcccattataaaagtatgcggaatgataaaaataatgtccttaatgtgtagcaattttattacgaagttaatgcaatttgaaaagagtgacacggagttaaaacgaattagttatgcattttctaaggtttttagaattaatttttcataaaaaatcattttcgaataaattttgtcgatgaacagaatttcatggaccgaagccaccatttcataaaagaccagggtttactctgcaaattacaggaccttgttgaaagggtttctgacctgggctggaccgcgggtttatttgtaaaaagtgtaggggctcttatgcaactatgttcggccgaagttcggccgaaggggtatgttttcacttgcaccgttggatcaaaaaccagtggctcggattatatcgaccttttgtgaactgatatgtaaagctagacgtcgatcctgtgatcgacggttttgatttaatgatcgaagccgttctcgcattctaatacccgtcatccgatgtcgatcgctcgaccaccgcctatctaggccaaaacaatatcatagtcgttataaatccgatcgacggtggatacacatctcttcttctatggtgtttcaagcgcgtggagccaagctcgcacggcggcgtacatgccggggaggagcggtgccgcaccgccgcgcgccaaagcccatcgcataccggaagaggcatgtagggtagatgaggtctcaccattgaccatgtcgtagagacttccacccacggtggactgcgaacgatggcgattcccagtcgctgatgaggaatcttgctcgccatgatcatcccttacgcccaatcgtgctgcaaaagcttctggtgcccaccggcgaacctccccgaccagacccgacagcgcagcgatgttgaattggagtattcgcatgcaccaaagatcctgttctctcccttcgcaacggtggtggctcggtgcccacgacgaggatatgtggcggtcggccgatagatgagaagggcacgataggggctagctttatacctgcgcaaggagaggtcaaatcgcaaccaactccaactgcgcatacgagtttgttacggtgcgacgtggtggtggtggatatagacggaggggaagaagcttatggcaatctgggaccaccagg

SEQ ID NO: 37946 - DNA, 281 bp, Zea Mays
aaaataaagaaatatatataaaaataattagatcttccatattattgggttcaatgtgcacattcaaaatgagtataagatcacaattaaaaaaatggaattcgaatttgaattctagaatttttttttaaaaaaagggggaaaagaaaatgtaaaaaaagaaaaaaaaacaaactgcgccctgggcctattctccttattcccggcccactcacggaattcaccgcgcggcccaactgggaaagccagcccaaggccaccgcgcgtggacgttcagctct

SEQ ID NO: 37947 - DNA, 504 bp, Zea Mays
gaaaccacgaaatcgacggtgcctcgtggtccacgcataacaccaaatacgtgatgagcgatgtactagacttcactattctacccgatcaaattttattcttgcactatttcacgactgcgatttacacgcacgtcaccggctcacattaacagcataagtataccaaactgacgagaaatattaaaacgaaaagcgagagcgacgacagatgccaataatttaatccgtctttaaggccacgagcacagctatgatttccgattctgccattacgtcgagcacatgatgagcaccacgcgggatttgttgctttatccaaactctctcgattttcgacgatgcaagagatgttgacgagttggaggctccagggtcgagcacgatagagggcttcggagctcaacgcaagtggcgcacaactgacagatagatcgtcgggatcgatgggcacgtcgcggacgcggcgtggattggcgacgaagaataaggggctgctgtaat

SEQ ID NO: 37948 - DNA, 289 bp, Zea Mays
caagatgcggccatggaggagagagaaaaacaggggcgcgctggagcagtcgtccagggtgcatgagaagaaatccgagcgccgtccagggtgcatgagaagcggcagagctggggcagggaccgagcgccatggtcgagcagggaatagagagcaggacgccgagcgcatctgtgaagaactcggcgcggcacgtgcacatggagcaggagctcggcgcgaagacagctagaggccgagtagaggtgtgcgcgtaggagctccacggtgagggaaatgagcaccacgg

SEQ ID NO: 37949 - DNA, 157 bp, Zea Mays
aagaaagtagagtaagagacataatggcagagacaagtaactgtcatctttattgcagagatccttgtttatatacaagtagatacagtgtctcccaaggggtgtgtcccttgggaataactgtcaggggttgatcatatattatacaaatattttg

SEQ ID NO: 37950 - DNA, 501 bp, Zea Mays
cttttgtgtgtttaatagaagaactaatgaaaagccgtagcaaactacataaatgctcatgcttgtgaggtcatgtttgtattggttaagtatagtaagtgtcgtcatatttctagtggtcgtgactacgtatgcccgatgacgtgtagataactaaagctaacatgtggttgtctacggtgtcttccaatttaatgtttagttcaccactgtgtctttgtataccttgtgctactttgtgttactgtcattatattcatacatatgcatcttgcatctcatttaggaccgagagatgacgctcatgcaagtggtgtggtgtcaaccacaagatgccgttggtggacgacctgaagaatggacataaccagtggatgctcgtcaagcgagtacctcccccagcaaacactacctaagtgttaaattaaaggcaagccccggttttatgcataaccatttattatgctattttactacacttaatgtttgtaggtttgtaat

SEQ ID NO: 37951 - DNA, 1213 bp, Zea Mays
ttgtaattataagcatcacagaagcaaaagagatatatcaatacaaaataaatcatactaatatgatataattctcatcaaagacgattaaccacgaatgaaccagcttatgcctacatcatatttcaaaatgtgaacctccaaagtcaataaccaatgctaattatttggttctttaaacagtgtgtgcgacgtgccgctacttcccactccccttgatgagcatcaagcacctgcattgagtaatgcaagagtgagatgaaacatctcagcaagcaaattgttttgatgagatatttaaaccacaaattgaatcaatcaacattttaaaggaatcacaattaagatcagaaatacgtgtagatatagaactcaatagtcccaatataacaaataccatctcatttcctcgaacaaccacaaaaggttgtataacacttccctgcgtcaataatacctgcaaatatcacttcaatgtatgcataggaatgcagtgtgtaggtcctttgccttcatacctatgagagtataaaaccacatcatttgcaattatcaattcaatgaatgcatatgaatgcaatgcatatgtcatatgccttcatacctctaagggtatgaagccgcatcgtacccgtcctcgggcaacgtacgatgataagttgtaccggtacggtcggaccataggtcacgacaaaacttcagatgcaagtgaatcatgcaatgtatatggcatgctgcatttatcaatatacttcacttccttcacatacaataccaacctcaaatactacttcgtttaccttcagatacaatacaaaactcaaataatacttcgtttaccttcagatacaatacaaacctcaaataatacttcatttaccttcatgggtgtgaattaatctcatgggtcatactcgaatcataaccaacatcaatatatgattgagcatcagtataatacaagcaagtaaagcatcaccatagagttcaattatgaaagaattccataattctgaatattagagtgtaggtgataaaaaacaagtcaaaacggtagcaaccaccgctacattcacttgccttcattgaagaagaaaagtgtactaggcatgatccggagtgtagccacctgctagcgggtataaaacttagtacaaatatttcacaaacatttgccaacaatcaacaaatcgctcctacacttgaaaccaag

SEQ ID NO: 37952 - DNA, 139 bp, Zea Mays
ccaaggtgaagccctcccgcgtggttctccatcgtgtggcgatctcaattggagtttggagggaggaagaaggaaggagaaagggaagaatccaaggtggtggacttccggatcgtacttagggatttgcccaaacttc

SEQ ID NO: 37953 - DNA, 275 bp, Zea Mays
cacaacctacaaaagcgcataattacagggaggaacaaggatctcatccttacctagtgttcccccaagaagatctgcaagaagagatggggtagaacatctccttgatcctctcttcctcttcaattcaacgtgctcctcctcttctcgatccttgttgcgtaggggaagatctagggaggaggaagcaatggagggcggctgcaatgggaggagaggggcggccagccaagggggaaaagggaggggtggccaagccaagggggaaaaggggg

SEQ ID NO: 37954 - DNA, 411 bp, Zea Mays
tgcaaatattacaataaccagtcaagaacataaactttaaaaacaggagttgagcggaagtctttacaataagataatatacattaacaagctaataagtttacaaaccacgaagtatttattattacatgcccgagatagagttaaagtgctaacttattacatcaactggaaagaaaccatcttcccgcagcacacacataatgcacacaagtaaaagtcaccattatgagtttaacaaaactcatacgtgttgatagtttctcctgcatcaacaatgggataaaccctgagtatggaaatactcagcaagactgacccgactaaaaaaagactctcaaggatatgctagttgttgggaatcaaggtaaggcttatcaaatttcatagactcagttttgtagaaaagct

SEQ ID NO: 37955 - DNA, 654 bp, Zea Mays
gtccgactgaggctaagcttacccatgatgaggcatgtgtccagttaaagggtcctagatcagcaagccaacaattgaaacggtccttaatcgacagagacgggcgacctttcctgctcaacgtcttgtctcatcttattattttccttcccaaaactatgtacttgacagaggtactatacttgaatgatgaattcatcactgcagatgatgctctcaccattacaagtcctttttcataaaacaaacccatacccagtgttacacaacattctttccttcttttaaacagaaacaagttttaattctctaggcagggctaagcctcattagttctctttataaaactggtagcaaggaggataatcaaattccaaggaatggtaatgcatcaattgtttcatcactcaactcctatcacctaatgcagcatataagtgataaaagttttaaaacaacaaggaggtggcaaatgcaccggtgcttgccttggtgatgaggagagtcgtgttcttctaccaggatattacagttagcagcaaatccaaatggggcaccttctggaggaccttcactgacaacctcagttggagaaggtaccgatggaggaataggctccccttccacttccacttcaaattcttcttcaaggtg

SEQ ID NO: 37956 - DNA, 1834 bp, Zea Mays
gttgccttgttcttaagccgaagcacttgacaacaagtccccaacagatccaccatcacaagtttttctttgtaaaaattctcatccactgtgaagcatcaccttttgtttgaaaacaaaacattttgtttttctaaagcaaggctaagcatcataaattccttttcataaaagggtgtcaagggatggtaatcaattttccaaggaaggaaatgcatcaattgtttggcacacaactcctatcacctaatgcatcaaacaaggtgataaagtttttaaaacacaaggaaagggataatgcaccggggcttgcctggaataaacactacgttagtttttgttagatgacgtccacttggcgatcagcttctgttccgatacttgctccgtctgtccatcttcaagttcgtccatcagcatcacctttcggagtgggtcgtgctttatgacatctttgggtcgactcggctctggtcctccgcatcacgtgattaattaacgtacctcatggaatgcacaatgcacatgtatgagaataaggaagaataacacaagatatgatgattctatgcaaaagagaaataacccacttaatggtgaggcattacggacactaactatcgatatattgttacttacgacagttatgctcttccaacctaaccagatataattcaaactaacatcacaagatatcatgattaacattcgtgtgtggaatcatttttgttcctagatttttattaactctttaaactgtgtatcttaattaacttaaattactcacttaacacaattggcctagatagaacttattcacaaattaattaaatgctaaacttaccttcgcattattaattataccacatcgctcacacaccactcatatttattcaagattattaatctaaacggtcaacgattcatatatgacctttcaccgatcagcaaacatagaacataatggctaccacaacaggtcatcgactccatacgaacaaataaatctgtcatacgcaatactaacagcgcatatctgctagacgttagaaacacaagacttattctctgtaatattaattcgaccatgcatcggatatgaaatactaatttaagcctctttgcataacctacaaactgacggatactagacgatgcgattaaatcaacatgtaccgctcttgctaaaaatacgagaattatcgaaacctacatatctattaattaattcattcaaacaaaataataacgtagagaatttgctcaccctaatcaactcgactcaatatttgcaagaacgatgatagtcttcgattgaagtcttcgatcgagcgcctgatgagcgacgcatcgaaacttcactttcttcttttcccaaactctctgatatttctcattggccaaatccaacgcgaacacaagtcggagatgtcacaaaggaactagcgtcaaggcgaggtgacggaataacgacaagcacctaggatggatctacaataagattgtagacctgacacggagatgaacaacgatgaaccagcgagctgaaccatggcaagtgatgtcttgacgcagatgagcaacggcaagtagcggaatcggaatagtggggtgaggtgcacggtcagcaagcaaggatgatcgcatgtggcacataagcgaaagcaatcgttgataaccgacatggagacccgacgtgactgaggagggggttcgacggctcgacgacaccggcaaggtcaacgatgagccaaccaaacaaaacatcacgacgtcgaccggaacacggaccagagaacggcggctggcgaaatccaagctggggaaagcgtcg

SEQ ID NO: 37957 - DNA, 393 bp, Zea Mays
ctcacctccgccagaacccatgtgccgtcaggccgttgtgccaaagtcggcagcgccctgcactagtcgtcgtcaaccgctcgtgtgccatttttctccttgcttgctcgtcctcctcccgctagccgcgcgttccgagcttctcccagccatggagatcccggccgtgcagctcgccgaggacggcgctaggtcctgccctctgcttcagctcctcccagccgccgtgaaatccctgcgcgccgcggttcccagctccctctgctcacacatggcgctcggatcttcatcggccatggtgcctcgtcctcgccgcgtccgagcgttctgcttgttgaataattagacaaattccaaattaaattccgaatataaaacatgaacaaatcagaa

SEQ ID NO: 37958 - DNA, 171 bp, Zea Mays
ctcctgttcaggagtcagtggaccctcaagtctgcctttactaacatggaagacattcatagcagtaagccagagcatggccttgacttgccatctcttaaagtgcataccattaaacttttctggcttcagcgcgtcggcaaaagcagccatagaaaaactaggaaattg

SEQ ID NO: 37959 - DNA, 1980 bp, Zea Mays
atcatcttgagccttatcctcatcttgagttggtggagatgcttgtgttgaggaggatggttgatcttgtgtattagggggctctttggattccttaggacacacatccccaatggacattgtaacaccccgggatccacaaacaccccagaatgctactaaactacacatctaacattcgtatataaaatttcgacaacatctcctttgaaaatggcataaacggggaagcaacaaagtataaatagatatcatgataagaaaacataatagacattaatagtctgctagcaatgggaagacaaccataacggcatgagctaaattatccagtgcgcacaactagttagaaacaaacgtcctttgagaagaagcttctaattaaatcatgactacgcctaagcagtgttattataagagtgaaggtggatgtgctgctacttcccacttcccttgatgagcgacaagcacctgcattgagtaatgcaagagtgagatgaaacatctcagcaagcgaataattttgacgagatctttaaaccacaaattgaattcatcaacattttaaaagagtcacaattaaaatcagaaatacttgtagatatggaactcagtagtcccactataaccaataccatctcatttcctcgaacaaccacaataggttctataacacttccgtgcgtcaataatacctgcaaatatcacttcaatgtatgcataggaatgcaatgtgtaggtactctatcttcatacctctgagagtataaaaccacatcatctacaaatatcacttcaatgaatgcatatgaatgcaatgcatatgtcctctgccttcatacctctaagggtatgaagccgcatcgtacccctcctcgggcaacgtacgatgctaaattgtaccggtacggtcggaccataggtcacgacaaaacttcagatacaaatgattcatgcaatgtatatggcatgctgcatttatcaataaccttcacttccttcagatacaatacaaacctcaaataatactttatttaccttcagatacaataccaacctcaaataatacttcatttaccttcagatacaataccaacctaaaataatacttcatttaccttcaggggtgtgaattaatctcatgaatcatactcgaaccataatcatcatcaatatatgattgagcatcagtataatgcaagcaagtaaagcatcaccatagagtccatttatgaaaaaaatccaatacttctgaatattagagtgtaggcaatagaaataacaggttagaacggaagcaaccaccgctacattcacttgccttcatcgaagaagaagaaatgtactagacatgatctggagtatagccacctgctagcgggcataaaacttagtacaaatatttcacaaacatttgccatcaatcaacaaaacactcctacacttgaaaccaagacccagtggaaagactcccaccctgaaccacatgccatacagcagcagcgttgtttgttaattttgtatctttaaaattaaaataacggtgatatcaaacaaatactctaggagtatctacacaaaatactctacaacttcagtattcattggataattaaattctgccatctacaagttctaaaacatctgacaagataactgactgaatctgttttagacagcagtatggttaactttaaaattccatatctcccaaactactgaaccaaaaattatgaaattctgttgaaagtaagaacttttatccctctacaaagtctccatagttggaagagccaatttggccatttactagatgaaacccaccagtgaacagacccactcatttttgtcaggcaaacaggaacagccacagtaaaacaaacataactggagtttcacaaatcatatgaatgcactctttaacaatctggaaagcttatgaaattatctacaacttcttttaccaacccacagtttaat

SEQ ID NO: 37960 - DNA, 569 bp, Zea Mays
attttctcttatcttaatagattcatctcatcttaaaagattctatcctatcttatcttgtcatatcctaactactttgcttatctcgtactaagtgtaacaaccacgatctattctaaaataagtagatcttaactagtctaatctagttatatccaatctgtctatccccacctaacatcaaacaagattttgacatacatcatgtagtctatctcatccatatctatcttaaccatattccccaaccccgatgatatacactaacctcgaatcaatgagaccaagactggagaagagaagatcgacctcgacaaggaaggataaaacagtcaaagtgaatctcgagatgaatcaagacttaaacatttcgaacgaagtcttttccttgtcataatctttcttaccttaacctgtccagcctatatcctacataataagtagcgggatacctagctcttctaatcacccactattgactaaagaaaaacaaaaaaaatgagactctggattttgaaccaattatagactaagagctaagattacaagccaatccttctatatccctt

SEQ ID NO: 37961 - DNA, 80 bp, Zea Mays
ttcgtctctttcttatacttctctctgtgaaaatccatgattttgcatacaggtgggtctgatttcctatcgacctggac

SEQ ID NO: 37962 - DNA, 1636 bp, Zea Mays
gttatttctcaacaaagggggcatatgttcaaaatattaggctcaagcatggctcattttttaatatcaaacgattttgggcgcaatgattttggccctttagataggctaccaagcactggtaatttttactactaaattatgcaatacttgtgaactaaattattgaaatgtcattgagacatcaaataccgccgcgacattctcttgtattctggaagttcacaggcttagatacataggaatccatgcctgcaccaagacatttatcggcactctcttgctagcagttaccagcagatctttgcacattcaaatttgaaggcttgatgaaggttaaaataaacaccagaaggtcgaacatgttccttgcctccccacgtttagggtcggagggagctttggattagtctgagcatttctacagattgcttgatgacgtttgattcactggatcatgagtttttgttcctactaatattgtttaaactgtatattgtggtgactctcctctagaagtagttgttgaagactgatgacatcttgtaatattttcatttctgctaatatgttgcggggttgtgattttttagattggctatgattaataagacatggagccactttacccaagcaggtcaccaagaacggtccgaccctgccgagtggaagaagctgcagggagtggacatggaggtgcatcgggtagacatgtatgcaaggaaaattgatggttggaagggtgttttgatggaaactgaagttgccactgccactaactcttgcatgagccaaaggatatagattcagtcggtcagacatgcacttatgtgctacaaactctcatggttggttggagcaaagctactagcttggtgaggttactagcctggttgatctgacaagcttggacgatgggtttgcactaatggtggcattgggtaattttcatacatgtatgtatattggtattctagaatctaaataacatgacaaagcactaataatcttacccagtccattaacctacgaactgaactgattacaaaaagaagagaaaatttcaatgaggaagatgctccagactcttaccgtccatgaaagacgacaagctgttcgcttgtctttaatccgaaacgacttttctactatttatatagtgttttgtctctatagattataactacagcagtctgactttaatatgaagtgaacagtccacgaacgctccacttccctagccccgcctctgcgcaaaccgttgtggataaagatgatagccctccgcgcgtctcatccaccgtcaccctttcgccctactgcctcttttccctcccctcatgccttcactttcaatgcatcacaccaaattttagtgtggctagattagagttaaattatagttcatgatatcatgatactaaactgagagttaaattgtaggtcatgtcatcatgataccacagcttcacccctcatgtccagcgcccgcgtagcgcgcgcaaaaaatagtgcaaagcaagcacttgaacccacgccacttgctatagaaatttggggctaaccacgagaccacacctaccttagtgtttagaaataaacaataattatatttgtagtctaggcgccgatccac

SEQ ID NO: 37963 - DNA, 1290 bp, Zea Mays
ccaaaacacgcaattcacactcctcttagaaacatccacaatcaagcatatataacaatattattgtaataaaactcaaccatgaaaaacatggtgaaaacaacataggcatacttgtatatcacaagcataataacaacttcattctcaccaatgaccagcgatatctaccgcattaataaaacaatatcaaaatttcagaaataaattatatcaagcattaagccataaacaacttaccacatcaccgtaaaggaaatatccatgttgctagcatctcctcctgagcattgaatacaatggggacaacctatggtggggtggtttttaaagtaagggtgagtacacatcaacgtactaagcaaatgtcccgtttggctaaagtggactagctgtatgtggagttaaggttaagcggttgcttttagttggtcaagtatttgttactattagtagagccaaattttagtaataaacccagttattacccaaatgtactccctccaagaggaaacacaagagatcatagttataaccatcatcattaaacatcaccataagggtatccaaagttcttctaatcaaagagaatcccaaggccactcttaaccgtgagcacgaccgatataccaatttctaacactctgcggaggtcacacactttacccacaagtcatgattcccattctacccggagatcatgactctccattgatcactaccaaggtgatctagcagggtctcactacgtagcctttacaaagattccccagaggtcatagccgtcagttaggtttctccggtttgataaacacaatacttctccccacaggaagggtgactaacaaaaccaaatcaagaacctctgcaaccagcctcggcatagcaagtactgtgcctggaccccattgacggccctacgacgaagccaactactgttagggagggctggtgcgcgggcgcggcttgggctagctgggccgaaatgggattttctattttatggaatttccaattgcttttctattttatttactctagggttttcaaaccaaattcaaatcaaatacaaattcaaaccatttcaaacatgtgcatcaaacaaaagaataatttaggctcagcatgatgcaacattcatgactcatattgttttgataaaataaataattaatccctctcctatttaacttaattctaatcaaaagaaagagtgagagagactaaagagagagacaagaggtaatacttgaatttagtagatatttagaaagaagttctataccccca

SEQ ID NO: 37964 - DNA, 287 bp, Zea Mays
attcccactaattacccacgaaaaattcccagaatctgctagaactactgctgttcgcgcacccacaaaatttctggacagcacctctaccaattcgcatacgtaaacatctaatcgattgaattgcagcacaaataaacaagagttaatcacaaaatcaccttaggttcctcctttcctccttccttccccccaccaattctccaatcggaacttgcacccacacgaagaagatccggcgaggaaggacatcacttggagaggaggagatgggaggggggtgtggt

SEQ ID NO: 37965 - DNA, 109 bp, Zea Mays
gctggagcagtgtggcatcatcaagtattcaagcgactggaggaaggaaggaaggaagaatcgagtcatgggaccgaggaggaagaacgaattgtacagtgatgtttcc

SEQ ID NO: 37966 - DNA, 264 bp, Zea Mays
gcataaagcaaatacaataaagcataaaaccatacattaaggagtatcaaattattacatcaacattggagttttagcaaaagtggagatcattgttcggaatgcagtggaataaaactaacggtaaataaatggagggatggggaagcctgtcccatcactcctcatgctcctcctcagccgaggtagggtcccactcgactgtccatcccggtggcaagatggacggccaagtcactccagcaaccatgtcctccagagaac

SEQ ID NO: 37967 - DNA, 197 bp, Zea Mays
ccgcaattacagatgctggatttcgtggccacggggaagcgcgctccaacgacagggactcgaaccactcgccacagccggggtttgtaacggcggtagcgttttgattcgtgggatcaacagggactcggccgagcggactccggcgacattgcaacaagctggagagtcgagcgagtctgaagctggggtcccac

SEQ ID NO: 37968 - DNA, 360 bp, Zea Mays
ccaaagccgtgggcgccgtcgagccgtcgaccctgctccattttccccgtctcagtttttgcagatcggacgcctttgattactccagcttcaacgtcgaggttcctcgctggtggccgcgtctgagtggttgtgttctttcgtgggaacgctcccttggccatggtcctgcgctttctgctcggcctggcgtgggctttagttgtcggtcgagcgcgtccctgtttcctttgtcttgccatcgtcattcggtaacctcacctcgacttgtgttcacgtcgacaaaggaattccaagagtatgtgaagaaacaagccccctgatcgataccccaagtgctcggcgaaaggccaaaacaag

SEQ ID NO: 37969 - DNA, 93 bp, Zea Mays
tgcaacaaaggtttaaccattcaactcctaccacctaatgcaacatataagtgataaaagttttaaaacaacaaggaggtggcaaatgcaccg

SEQ ID NO: 37970 - DNA, 496 bp, Zea Mays
gatgggcagcccgggtcccacatgtctgcgtgcgtgtaagactgacggtcgggttcctcatgtcagtgcgctgaatccccggctgggccgcgtaggggtggtcggttagatgggctggctgggggagttttggcccatgcggcgtctttagtttttcttttcttttttcttttcttttttcttttttcttttcctttttttaaatctcaaatttaaattcaaattttgttgtgaatttaacacttagatcaaatgctcaaatcaaaataccagcatgaagaagtattttcattatatatatattctttctagttattaaggaatttattaacttgtatgtgtatatatttatatatgcatgtgtcacatataaggaaaaattcccttaaacatcaaataatctaactcctttattcaatatgatttgggtattacaaatcctacccccttaaaaggaatctcgacctcgagatcattgtactttgcacattttgat

SEQ ID NO: 37971 - DNA, 288 bp, Zea Mays
gttagatgggcagactgggggagttttagcccatgcaacgtctttagtttttctttttttcctttttccttttctttttttgttttcttttcctttttatttttaaatctcaaatttaaatccaaattttgttgtgaatttaacacttagatcatatgctcaaatcaaaataccagcatgaagaagtattttcgttattttatatatattctttcaagttattaaggaatttattaacttgtatgtgtatatatttatatatgcatgtgtcagatataatgaaaattc

SEQ ID NO: 37972 - DNA, 222 bp, Zea Mays
aatagatatcataataagaaaacaaaatagacattaataatctgctagcaatgggaagacgaccataacgacatgaactgaattaaccagtgcgcacgactagttaaaaacaaacatcctttgacaagaagtttctaattaaatcatgactgcgcctgggcagcgttattatgagagtgaaggtgtatgtgctgctacttcccactccccttgataagcaac

SEQ ID NO: 37973 - DNA, 1384 bp, Zea Mays
tatagaactcagtagtcacaatataactaataccatctcatttcctcgaacaaccacaatatgttgtataacacttccctgcatcaacaatacctgcaaatatcacttcaatgtatgcataggaaagcaatgtgtaggtcatctatcttcatacctttgagggtataaaaccacatcatctgcaaatatcacttcaatgtatgcatatgaatgtaatgcatatgtcctctgccttcatacctctaagggtatgaagctgcatcgtaccccttctcgggcaacgtacgatgctaagttgtaccggtacggtcggaccataggtcacgacaaaacttcagatgcaaatgagtcatgcaatgtatatggcatgctgcatttatcaataaatttcacttcctttagatacaatacaaacctcaaataatactttatctgccttcagatacaatgcaatcctcaaataatacttcatatgcctttagatacaatgcaaacctcaaataagacttcatctgccttcaggggtgtgaattaatctcatgaaccacatgcatacctcaaataagacttcatctgcataaaacttagtacaaatatttcacaaacatttgctaacaatcaacaaaacactcctacacttgaaaccaagacatagtggaaagactcccaccctgaaccacatgctatacagcagcagcgctgtttgttaattttgtatctttaaaattaaaacattggtgatatcaaacaaatactctaagagtatctacacaaaacaatctacaacttcggtattcaatggataattaaattctgccatcaatatattctaaaacatctgacaagataactgactgaatctgttttagacagcagcctagttaacttcaaaattcgatatctcccaaactactgaaccaaaaattataaaattctgctggcagtaagaacttttatccctctacaaaagtctccacagttggaagagccaattaggccatttactagatgaaacccaccagtgaacagacccactcatttttgtcaggcaaacaggaacagtcacagtaaaacaaacataactggagttttataaatcatatgaacacactctttaacaatctggaaagcttatgaaattatctacaacttattttaccaacccacagtttaattctgttgataaaattgcctaactcttaagagaacagattctgcacaaaattatgagactgaaaaactgctataatcaaactgcaataactttctgttctgatgtccgattgaggtgttcttcgtggccacggaaagatctacaaattatatacgactcatatatagactttttatttttttgaggccattaagaccacggaaaactgac

SEQ ID NO: 37974 - DNA, 264 bp, Zea Mays
aaagagagtagaattttattacatcatctgaatcattgtatctttaacaagtatcacatcaaagtaaagcggaatttaaataacaggggcaatctctcacaggaagatgaccggtgtatcgttagacttagaattcatcgtcgtcaatatctccatcaaagtctccagcatcaccctctgatcaaaataatagcaagggtgagctcacttatggtcggggctcaacaagtgggggaacaattaatgcaggtataacaaggtgat

SEQ ID NO: 37975 - DNA, 161 bp, Zea Mays
tgaaggaggttccctttctttctttggcctgccttggttcagcttcatcaaggaatgaagcagagaacctttcagctttggccggcgggaccgtcctcctcccccatgacctccctccctcctctcctccggtcggtcaacatgacaaagcctcctcctcc

SEQ ID NO: 37976 - DNA, 324 bp, Zea Mays
ctttctcttttcctttgggttatatgttgctcataatgtgttgcagaaatgtttcctctcatatggtgttgtgattgttttcatgaatatgcagtagtcgcgtcatgtgttgttagacttgtgtgctaggtgagatttaattaataatgcgagaagtaggattagcattttaaattgtctagccgataagaactattagtgttatttatctgaatttcaattgtgtagtaacattaattccttgcgttagtaagcgtcaagaacatgataattctagaagccaaataggagttaaattgaatgtattactgtttagggctgcat

SEQ ID NO: 37977 - DNA, 297 bp, Zea Mays
gtttagtagtttaagagttatgatttttcaaagtccagtacctgaatctgtccaaattttgtactgatttcgaaaattgccttgtttgactaaattaaactgagaatcaacccttagtaattatagaagaattgtagtactgtttttaatctttctaaaaagtcttggatcaccctttttgatgatctataagttaagttacagttgtttgaagtgtgaactctgaatctgtttaaatttggacagcagagcttttctcatgtcttttgaccttgatatgtattgaattaacctgag

SEQ ID NO: 37978 - DNA, 202 bp, Zea Mays
cttgattcccaaaagccagcatatccttgagagtctttttccttaaacgggtaagacttgcgaaagtacactccgtactcagtgttttcgaacccatgttgttgcaggtactagatttgtgctgctgttgatggtgcttagtgccagtgggctcgaccttcttataggttaaagtagctcttctatacttcttattaaggat

SEQ ID NO: 37979 - DNA, 328 bp, Zea Mays
agaaaccaggggtggcggtggcggtggcggctagtagcagggagggaagccagggacagcggccagggggattgggtcagggagcagggcgtcggtccttgttgggccctggtgggctttagggttaggttagttaggttttttttctttttctttttctttcctaatttcaaaaacatatttttaaatatctctaaaattcataataattaaaccaaaattatttataaatgaaatatttatttttggactagtatatattatttactaggattttcatttaagaagaaatgctattaatatccaaaaaaattatgatcaatcaaac

SEQ ID NO: 37980 - DNA, 293 bp, Zea Mays
gataaaagggatatactaaagttgaaatgggcatctaacctaaatttggaatcctagaaatttggagaaaacaaagcactagctttaataaaataaatataaaaaataaataagtttagccatgtcatgtgcaagttggacatgtgatagggaaacaaatttactatgaagtttgaatttgaatagggatttaaaatttggaatttgaaaaaaaaaggaaaacaaaaggaaataaaacagaaaagaaaagaaaaaggaaaaaaaacagataactgggccacttctgctcattc

SEQ ID NO: 37981 - DNA, 2960 bp, Zea Mays
ctcgtcgaggagctccctctgccggcgctctctccctgctccctggagcttcctcgccgcgcccaaggttcctccttggctgcgcgctcctccctggctcatccctccgtgctcccctagccctccctgtcatgcgcccgctcaggtccgtgcagtcccagctgcctgctctgctcgctcgtgccgcgtccggctccctggctcgctgcgcgcccatctctctctcttgcggctccctggtaccgtgcccctctccctccaccctgctcgctcggcgtccatctccctcgctgaccgctccccatggctgtcgttgtccttctctggcgcgcgtaggcttccagctcggcgttcccctcccaagtttgttcttctgccgcggtgcttgctcctgctcgaccgtgcgccttggcgttcgccatggccaccgcgccgtggagctctgcgcgctcagccctgctcgctccctgtgctcgcgtccagccgaagtttcctgcgagtgctcgtcggtcggagctcctggctcgcatccctccagctcgtcagccgtgtgcccagctccacctcgtcgatggcgccgtggaattttgtgcgccgttcctctgctgaccgctgctgctaggcttcgctgatgcgcgcgatttgccggccatatcccttcacctgtggtctccacgtcgtgtgcactgattatcttgtgtgcgcggccgcgggcgccgtcgtgccttggccgtgctcggtttcctcagcatcacgatgcttgcctttgcgtctgcttcagcatcctcgtgcaaaactgtcgcagccgcgttctactctgctccaactcacgtccacgctctagatcacgctcgccccgctcgaacgagtcgtcatgccatcgtcttcgtcgtatggagatcgtcgtgctgacacatcaatgctgtcaatcgccatcctcgtctacgctaaagatccgagaagattaggtggagaaggaaacaaattagtacgcgacgggagaattctcgatgtggaaggagtgtgattcgatacggcacttaccatgtattcggggaaaggctagagctgaaagacgtcgtccatttcatgatttcaagtcggatttaattatggtaagctaattcgccacttctaataattggtttaatggatagattgctaggtacgtatgtcacgacgattatcccgcttgtagctcgggcacgtatttatttgacgcttgttggaatacggggctacatgtagcggggtaattgtgtctacgattgcgaagtcgtcgtgcagcgtagctaagtttaggttatgcgagaaggattaaatcggtgtttcgtatccgatgagtggtcgaattaataatataaaagataggttaagtattttatcaggctagctagtaagttctgacgatgttgccatgctgatttagtttgcttaaataaattaatgctttgctaatagacattttaattagcgggcaggtgatgcgaagtcgttcgatctggtagtttagaatgttgatgtgcttctgttcttgttttaagacttaaatgtcttagactaatgaatttagaattattaagtttttggtgtcgatctttaactaaggcaagtagagcgtgaatatatattattgatttgcgatgtcttgttataggtgtttaattcgctatcgcgtaacactatttagatttgtaatatttctgtctatatgcattaggtgataggagttgtgtgctaaactgttgatgcattttcttccttggaaaattgaatacccttccttgatacccttttacaaaaatgatttttgatgcttaaccttgctctagaaaaacaaaatgttttcttttaaaaacaaaagtgatgcttaagtggatgggatgttttcaaaaataaaacttgatggtgaatcagtcaaaggccttgatgggttcaacatcggaaaagatgtacctctgccatgcatgtaccaaactttgggttgaaaataataaagctgagaccgggcggttgacttgcatgagaagggagtctcggtgtagtgtctccgtctgagtcgattaaggaccgtctcgatgtaggcttgctaatcgaggactttttaactggtcacatgcctcatcatgggtaagctttgcctcgggcagactaataccagaataagacaacacacaatggaagtggagagatggcgagagtagtgtgtaccctccgtggcaagaggctggacggtggtgtatctatgctctcggttggcgtgaacctaatctggtcttaagaaccccagtggcgagttgacatatgcaagggttaagtgatacatatgtcgtgtgattggagatccacagctgggtattaatcgattcggatcgccgttacttctcggacatgatgacttggtcactgccctacatgtagaaatccaatgaactaaagggatgatgaaaagacggctagtgtaggccaagtgcttgaactaggatagaaagaactttagatgtaggtaactttacttaacttgacaagtaaaatggatttttaaggatccactcatagtaagcttttctgcaaaacagagtctttgattcttgataagccataccttgaatccctctagtcagcatacccttgagagtcttttctttagtcgggtaagtcttgctgagtaattccatactcagggttttattccttattgtttttcaggttatagttttgtgctgctgatgatggtgttaagtgccggtgggctcggccttcttataagtctaagtaacacttctatacttcttattgaggatggtcacttgagctagcatatatttcaaaactacaaataatttataacaattcaaagttatttctttgaaccacttttgtaagcactccgatcatgtatattataaaacttgatgtaacttgtaaaatttgacaataagatttccgatgcaaaaatg

SEQ ID NO: 37982 - DNA, 1854 bp, Zea Mays
ataagctttccagattgttaaagagtgcattcatatgaattatgaaactccagttatgtttgttttactgtggctgtttctgttagcctgacagaaatgagcgggtctgttcactggtaggtttcatcaagtaaatggccgaattggctctcccagctatggagacttttgtagagggataaaagttcttactttcagcagaatttcatgatttttggttgagtagtttgggagatatcgaattttgaaagttaactatgctgctgtctaaaacagattcagttagttatcttgttagatgttttagaacttatagatggcagaatttaattatccatcgaataccgaagttgtagaatattttgtgtagatactcatggagtatttgtttgatatcaccactgttataattttaaagatacaaaattaacaaacaacattgttgttgtatggcatgtggttcagagtgggaggttttccaccaggtcttggtttcaggtgtaggatcgatttgttgattgttggcaaatgtttgtgaaatatttgtactaagttttatgcccgctagcaggtggctacactccagatcatgcctagtacatttttcttcttcgatgaaggcaagtgaatgtagcggtggttgcttccgttctgacctgttatttctattgcctacactctaatattcagaagtattggattctttcataattggactctatggtgatgctttacttgcttgcattatactgatgctcaattatctattgatgatgattatgattcgagtatgactcatgagattaattcacacccctaaaggtaaatgaagtattatttgaggttggtattgtatctgaaggtaaatgaagtattatttgaggttgtattgtatgtgaaggaagtgaagtatattgataaatgcagcatgccatatacattacatgattcacttgcatctgaagttaggtcgtgacctatgatccgaccgtaccagtacaacttagcatcgtacgttgcccgaggaggggtacgatgcggcttcatacccttagaggtatgaaggcagaggacatatgcattgcattcatatgcattcattgaagtgatatttgcatatgatgtggttttataccctcagaggtatgaagacagagtacctacactttgtgttcctatgcatacattgaagtgatatttgcaggtattgttgacgcagggaagtgttatacaaactattgtggttgtttaaggaaatgagatggtattggttatattgagactactgagttctttatctacaggaatttctgatcttaattgtgattcttttaaaatgttgattaattcaatttgtggtttaaatatcttgtcaaaacaattcgcttgctgagatgtttcatctcactcttgcattactcaatgcaggtgcttgttgctcatcaagggaagtgggaagtagcagcacatccaccttcactctcataataacgctgcttaggcacagtcatgatttaattagaaacttcttgtcaaaggatgttgtttctaactagttgtgcgcactggttgatttagttcatgccgttatggttgtctttccattgctagcagattattaatgtctattatgttctcatatcatgatatctatttatattttgttgcttccccgtttatgtaattttcaaaggggatgctgtcgaaattttatatatgaatgttagatgtgtagtttagtagcattctgggtgtttgaggatcccggggtgttacagtatgtgtgctagatttcaatcaaatcctaagaaagctcatcttcgcgctgttaaaagaattcttaggtatattaag

SEQ ID NO: 37983 - DNA, 202 bp, Zea Mays
ttttgcgtttgaggtccctatattcgtcaaaaagtctgttgacgttacagcagaaaatctgtaacagacagacgcgaatttttttgatactcttgagttgtatcttgtttttgcggcacttttgtgaaaaatagaatataaaacacaagtgcgcaaaaaatcggcacaaaacaaagaaataaaaagaaaaaaaatcagaaaa

SEQ ID NO: 37984 - DNA, 340 bp, Zea Mays
aaaatatataaataagaatatatttctttactctaatatttgaatttggtacactttgatcattgatgaatctcataaccaaattcaaatttgaattctaaaaacaaaaagggaaaataaaacataaaataggaaaaagaaaaaaaaggaaaactctaagctaactcggcctgcggtttcgcttttggcccagaaactctctatcaccacgtggcccaagcgtctgatgccggcgatgacatgtgggtcccgctagcatccaccgtcaagtatcgcgtgctcgttgcttgcgccactgccttgcgggcccggcaggtcagagccatctcccccggatgaa

SEQ ID NO: 37985 - DNA, 339 bp, Zea Mays
gtgaccccccctagaatccagcttgcctacccaacgcatatatggtggggagtagggctctcgaccgtgctcaccgtattcgaaatcacagagaaaactacgcctggttgaaagctcggtgggcggggagggagaagaaatcgccgccgccgtcgcgtccttcgtttccacgcacccgcagtcgctggtggagggcagccgccaccatggctgtctgcggggtggtgtccctgcacgtcgggcggttggaatcggcccaattccacgccggggactcacccgaatcgcggatccgccgctcaccgtggctgggctttctgcggtgaactgtgtggtgcg

SEQ ID NO: 37986 - DNA, 476 bp, Zea Mays
caaaattcaatttgtcatttgtattgcatggaatcatttattaactttgttttattatttttattatggtttagtatttacttacatttagtaactgctaataaaatttgaccaacttattaaaagcaatgcttagctttaacccctattgttgatcagccttacacatcacgtgaactcccacctttatagagttcatgcacattattccccacaacttgttgagcgatgaacatgtgtgagctcacccatgctatctcacaccccccacaggagaagaacaggtggttcaagtggagccacacaacgaggagtttgactcgatctaggtggcgtctcctagttgactttatggcgtcaaggatggactttagttagttttatatttatcttttattttgtaagacttctgctatgtaataagtactctgattattgtcagcgtttcgaccccggggggtccctggaccgatgag

SEQ ID NO: 37987 - DNA, 469 bp, Zea Mays
aacagaccaactggtttttgttgttctatcttgattctctaacaactgtcacatatggccacatgttctgcaatctcccttttcattccgtaccaccagaatttcttctttagatcatgatacatcttctcgctccctggatgtatggaataggttgtctcatgagcttctcggaggattaattcccgaatggacttgttattgggaacacacaatcggtctttgaaccatactacgccttttgcatcttcccaaaaatctttgtcgtttccttctaaaactagctaccagactttgttgatcttctcatcgtccttttgctcttctttgatttcccgctctaaggtgggttcgaactcaactgttactccttacgtgttgttcaaaaatccgaggctcagtttgtcaaattctttggctaactcatagggcatcgggtgaatggtcatcatgttgacttggctttttc

SEQ ID NO: 37988 - DNA, 236 bp, Zea Mays
aaaagaaaaaaaggttatggactttcttcttctagttgctttattacttttcttttcttcctaattaaattcactcactagaaagagccataaattaaatggatgcacagctagatacaacatcaaacaaaaataaatatactcctgtatgatgcaataacaaccattctcttagggttttagatgacatcaagatgactcttacagttttgaaagagacagaacggaacgagaag

SEQ ID NO: 37989 - DNA, 429 bp, Zea Mays
aatatctccctctcatggtgtaacactataaaaatcattaaataaaaatactgcatttagtttagtaatgatatttatggtaatgaattttcttttaagtgtgtgtcatttatttgcctttggaatgatttttggatgctcatgattgattttggtcatcgaatagcatttcttgttcaatgaaaatcctagtaaattaataatataattattagtcccaaaaataaatataatacttataaataattttggtttaattattataaattttagggttatttaaatatgtatttcaaaattagaaaaagaattaaaaaaaagaaaaaaaaactaacctaactaaccctagccggcccactagaggcccatcaggaagccgtcgcgcgcccctggtctcctcctagccgccgccttctagcacagccgccg

SEQ ID NO: 37990 - DNA, 192 bp, Zea Mays
ccaccctcccccctttttcccttggttggccaccccctctcctcccatggcagccgcccaccatttcttcctcctccctagatctccccctcccccacgcagcaaggatcgagaagaggaggagcaagatggattgaagaggaagagaggatcaacgagatgttctacccccccatctattgcatattttct

SEQ ID NO: 37991 - DNA, 2281 bp, Zea Mays
ataggctttagattcttggcaatttgaagataaatttgacacacttgcacatataggaagggtatgggtacaaatatctttgatatatattaatgtctttgaagtgtaggtgacaataatttcacccctccccattcctttatggtgatgtggtaagttgtttatgacttaatgcctgatataatttatctctaaatctttatattgtttaattaatgcatttgatatcgctggtcttttgtgagattgaagttgttattatgcctgtgatatacaagtattcctatgttgttttcactatgtttttcatggttgagttttattacaataatattgttatatatgcttgattgaggatgtttctaagaggagtgtgaattgcgtgttttgggttacaaggtaaccattaatttgaatttaagttgttgagcggttggtggatagttccaactatctttgcaaagaatgattgtttatgtcgagaaaccatttctgaaagaaatgaatattggtacttttataggaattttgggggaagtctttacctagctagaatggcttacatgtctctcttctattgtgtgttttagtagccacaaagcctagatgtggtttaaagtggttgcatgttagtcatgctagttgtagaataaatctttgattttctggatccatggattatgtattaatacattgaggatcagatagttctctccccgatgcatgcttgtggagccattgttggaccacctatctattggtttgaatgaagccagtgcctagcctagagttggttgtgtgtggttagtcacctattcctaaatgatgtggtttttacatcagcttgagatgtttgtcaaatgtgtgaagaattacagggttattattgaccttgtatgtctggtactttgagtgcatcgtatgatagaattaaatgtaagtttatgaactacagtagatgaagacttatattatgtgtaggttaacctcactagtttggatatttttcttagttgagttgttggatgaagtatagtgacagtggttaaccaagtattgtgttgttgtgctgtcagtgctttttgtggagcttttggcatttcttcgatgacatgtgccgcgcagaatgttattggcttcttattggctttattgctccattagttctatagattttctcccttttgcggggtgcaaagaatgttagattacatgattatcttttcatgatggcaagaataaggtttaggaagattaggagttttgtttcaatagaactacttgtttcgtggtgctttgaggtgaggtgtttgatcttcttatacattcgtcgggtgtggatgtttcaccatttaattaaaattaattgttgaagttggtaagggttgtgcttagtgcatattaccccttcataaaagagtgttgtcttaagacattgatgttgatgtatagttgcatccaaattcaatggtgtgaaattgtagtgttgattgcatctatgacttgctttgagcttcattgcatgttgtttcatgcttgatgtcaggttgtgtagtttcctcagacaattagtccaaggtagaagttcttgtgttaattaagactaataatggacccatgttttgaatgatggtgatggggtaccttgggtgttttgcttggagtggccgaattcgagggcgaattctttttaagtggggtagagtgtaatatccccaaaacatttttggaccaaaagttgttctacggtgcgtggatgtgggaaagggttgtgggtcgttggatgcaaaggcagaagtcatctggggcgtcggttcttttctcccacaaaaccctaggtggccaccccttttccctccaccccctcgcttggccgccaccctccccctttttcccttggtttgccaccccctctcctcacatggcagccgcccaccatttcttcctcctccctagatctccccctcccccacgcagctaggatcgagaagaggaggagcaagatggattgaagaggaagagacgatcaaggagatgttctacccccccatctattgcagattttcttggggaaaccctaggtaaggatgggatccttgttcctccatataattatgtgcttttggaggttgtggatcatgtggattgaagaattagaggttggattagatgtggggttaggttttgatctcgaatttaatttctgcagaatgacagattcgacagtttctgttcataccagttttccgtggtcttagtggcctaaaaaaataaaaagttt

SEQ ID NO: 37992 - DNA, 514 bp, Zea Mays
cccgcctgtcattcatggcaacgactgcattttggcgcggttcaggctgatgagaggggcccacgatgcagtgattcacacacacgtacaccgacaaacactggggtcccacaagtcagcactggtatggtggagttgggccgcgcaggagaggtgaagaagcgaccaggtgggccgaattaaggctggcggcccagataaggttttctttctttttttcttttctgttttatttcctttttgttttctttttattttcaattctagaatttgaattctaatttcacatcaaaattggtactcaaattaaacattcaacttgaacatttcagtgggatgaatttaattatggatttattttgtgttctataatatttcttccttcttctctctctccacttttctttagagttttgttttcaaattagaggttaaattctatgggtccattaatattttgttaatgacacatttattttattatccataaatgcacaatcaaacaaaactcaac

SEQ ID NO: 37993 - DNA, 366 bp, Zea Mays
agttcgttttatgtttattcttttattttgtattaagtcttccgctatgtaataaatactctgatgttttatgacatttatctctatacactctgttattgtatatgttgtcttcttggcgcatgtatgagatgcacccggctttgttccttaaaaccgggtgtgacactaccaatggccatatcctgtaggccacatgctcttgaactaagtcccttgtcccgatgaaggagcagactatgtcgaaggcctttcggcattcttcggctgcttcatcaatttccaccttcggcttccggaggacgaagcgttgtcagatagggcgcatgataatctccttaatatcctctcgtgcctttaaatcat

SEQ ID NO: 37994 - DNA, 778 bp, Zea Mays
cgaagactcccatccttataatggcttcgggagtaatctagtgaagaaaaatctggaatatcttcaaaacctcaaccacgaaactgcttagagggagccgaaacccagccttgaagaagcttcggaagatcacgacttcattttcttcgggagtaggacaagtcttgtctccgttgtcagctctcacaatagacatatcccgaaaatatctccccctcatattgtcaagatgactctgtttaatagttgattttccaaaaactgcatggcttggtcgccagggtcgatcttcggagtcttcctcgccgctttccacatcataactgtcactatcaccagtatcttcagataaaccttctaaaatctccctagtaatcttctctgtattcgtctttgctattgactcaagaaagccaagattcttctcctcagaaagactcagcttcattttagcaacagcttttttatcttcagacaccttcggaaatgctaaaaaactgctctcaaagccaaagcttaaaaaacgtaaaaagccaagcaagtgttggtgcgcaaagagctaaaagttgagtaagcaagagcagatggcaaaaaagtgtgccaaatgagctcgtggtgcgctcttatttatacgcctagtgcgttgaaaatcggaaggccccacttgtcagtgactgttgctattctagcaaagggaaggtgttttttcggaccttcggcttagggccttcgtccatgtcgcaatctgaatttatcattctaacaaattaatattgcg

SEQ ID NO: 37995 - DNA, 280 bp, Zea Mays
aaaagcttccaccaccaccacccaactttgccactaggtcgccctagccctcgaaaattgtatggtgcgagcagcgtgctcgcgttggtcccgaatccgggtggttgccggagcagccagcctcaggggccctagaatttctcgtcattgcggaactccgcccaaatctatgctccgtcatggactaccgtccctatgtgtcgatcgacggtaagacaactccaattgtttttgccttggtgtcctctgcgtgtaacactgatttttcatggggattttg

SEQ ID NO: 37996 - DNA, 333 bp, Zea Mays
attaggattaaaacatatccccccattttcgtgggatgcatcctcgtcgtcggttgattggtagacggcccggtcgctctggggcgctctatcgttgatctttaatccaaccgctacaaatgcatacctattggtgctatttaaagatctaatttgggatcttgggtatgcatccaatgttcagaattgaaccataccccttcatccacgtccttttttgcgcaagagtcctcaggttcttaaataatcaacctgctgtcctatgcaatataaaaaccattacaaattagtcctactatttataaaatagactcggacctttgggaaattaat

SEQ ID NO: 37997 - DNA, 1018 bp, Zea Mays
aaaagtggtatcaaagccatgctgactctaggtcattagactagttagaaatggaaagcctagtttgttcaaaacatgctaattttgttcttacaaaattattttattaaccttatctctttaaaattcaactgaggtgacaatttctcttgtagatggttcgtatcattcaaaccactcggatcaacaccaattacatccctctgccacgacaagttcctgtctacccagtggtagtcgaggaaatccctgtggatctccctcgcattcgggtggagaacggagtcattctggaggacagctcggaggactttctgcctgcgcccaccccgttggcagagtcactagccttcgcagctggatcgtcagcttcagcaccgccagcaccagcagtccaagccccaggtcccagaggcgaccacccggacgactctggtgacgataatgaagatgacgaagaagaagaagatgaggaaaacatcaacgaggaggccaacgaagaacagcaggaccactacgtggggttatggcctgtcactgaacattatacctcaatgttcgaggcagggcatttccctaacctgctgcaggatgttctgcttgcgttgggaacctacgtccgacccctgtatgagacaaggcgagtgtacgagcctcctcgggattgctactacatcactcgcattcatgtcagggtgatggatgcaggtgatagagggttcaggactctgtcagctcatgagtctctgacgccgctatccaccgacgttgctttggtcagcaatgctgctaagcgaactctgtggtccctcagccacacctactggcagctgctgcaaaacacgaagtacatgcatcttcctctatgtattccttgagaaagccagaccagcattgttacaggtggagctggagaagatcgcctcaacaccctagctgatgtggtggcaggtcttaacaccaacctggatagtgctaccctagacctgtctagggtacacatggagctggaggatgc

SEQ ID NO: 37998 - DNA, 875 bp, Zea Mays
ctcgtcttagtcaacactaggacgctgagtgaagccccgaatgacccaacgggccttgtactgatccagagtaccatgttggtgccatggggacatggcaccaagtcccagctatggttggccagcagggtcacgtactccgcctccatagcatgtcgctagtggggatcaacgagtgcggtgctaagggaggagggaacatgcaagggagccagagcagcgacggtcatgagcaccaggcggtcaactggttagagaacaccgaccaatcagcgggtgaccattgggtggacgtagcgagggttgttgtggatggcgactgcaaggtgcaccgacggcttgtcatgggagcgggcctaggcaaatgcaactcatcgaaggagggggcagggactgggtcgcacacgtcgctggtagacgtgggcgggatcaacaaagcaagtcgaaggtggtcagaaaggtgggcatgcgtatggcacgggcaaaggcaacagggccacgtgtggcgcagtcgtagacaacgagaccgcgcatggcgcaaaagaggtcaccaggttcggaggttggggaagaggagggacgtcgacaggatcagcatcaaggagggaattgaggtcgagaggtggggaggagatagcaatgggaaactatgatgtgcggatacttctcaaaattcacataccggtgtcggataccgtatcagatacggatactccgcggatacttctggatacgtatccgaggcgtatcggaaattcctgtgaatttaaataaataaaaaaagacggatacttctaggacacctcttggacacctgtgggataccttataaccctaatttccctgcgcaccgcttctccccacggcgcacacgt

SEQ ID NO: 37999 - DNA, 596 bp, Zea Mays
cagaggtttacaaatcaatttatccagttagcctttaagccatatatataataagtaagctgcctaagctacacatccaagcccaacaatttcttccatttagcattgatgctctcaatattttaactgacaaatcctagtttcaccatcacatgtgtcaggccactaaaaaactcagaccgcgagtttccagctacatcctgtatgttgtattttgcagttcaaaaaagaaatagaccaaaaatttgaaaatgggtgggtcattacattaaccttctctgacattcagtcctggaacttcactgcaaaagatgaaccaggtgatttttacatctatgcaaaaactcatgcatataagaattcatgatattatacattaacggccataacctgtggcagtgcatggggaaatttttctgcccctctaccagttcaataagcgtgcagatcgcatgcatgtttgtggaaggaaaacattctttgctattgatgctgctaaaattcatggaccccgagtccaagtcggtttggacaggtcgtgattattcgtcaagtcgtccgactaatcatgattaatcacgattaatcgaccaagt

SEQ ID NO: 38000 - DNA, 1817 bp, Zea Mays
cgccgctcgatccttcttcctcaccagtggcgttcaactacgtctcccgtgctcctacagctctgcccagaacggtcgggccgagcgcatgattcgcaccaccaccaacatgacacattgcagttcgccgacatcttcaccaaggggttaccgacgagtgtattcctagacttttgatccagtctcaacatttgtacaggatagagttgcgactgtcggggggtgttagcattgtattagggttactcgtagatatttggcagaaaaccttcaaacatacaagaattccgttgcctccaaactcccagaccaacgggatgataagggaattcggtcccttaagcatatccttaggcactcccttgatggtcttcctccaccaactagagtaatgacaggacgtcattgaaggtgttgcagcagtcagatacagatgttggaaaatcagtgcccaaagttgttgtgtccgtgtgaatacacaggaaagaagaacatgttggatactggatagtctcagcctgatcacagaagagacaagcagcagggtgaggcagtccgccgttcaacactagttgttaagagctagccagataaaaaaacttgcaacgcagcggaccccacgtctcccacacccgcctccagggagcaaatttgatagtccccacaaagaatgccacattagctgatttactgctatattcttttgatgctatcagcttccagcagtgtcggtcttgaacatcctgctgaagaatcatatcatccatttggttccaaaataaaagatattccacaagcacttgtacagtaagagcctcgttgatgtcaaacactcagcgctggttatgtagagcttgagcaactgttttgcttttgacaattcactttggaacctttttgaacaggtttgcagcaacctcagcaatagtcttaccattcaaccaatgttcagacttcagacaaaaaagagtgggttccccatctccagaatttcagcctgattgacataaatctcagccatacccaatgcagttttttgtttcctattattgtctttttatattccctattgcagcccagcaacatattctagcttctaggcttctagctcaacaagagcctaccatcgtcgcagccaaaaggcccccaacctggcaacctccagccacatgacatgatagtatgagacacacatttcctatccccagcctcacaccattgaccgccagtgccaggcagcatgtatatctgactctcctctgtcctctcatctggccaaccgctaggacctggagccatgttgcccgctcgtccaggtggcagataacgtccaggcgtgggctaggaattgcagcccaatgctcagattggatcaagcacaggccaagaaaaaacaccaattctgcctggcccagcctatgatcaggttaaatccttagccaactcagaatcaagactcagttgttctataactgatatctatttgtctattctgtgccggaggctcccacatgagtggggtctggggaagggataaaccgaggcagcctttcacccgcaaatgcggagaggctgcttcaaacctacaacttggtgactaaatgaggtaactctcaccactgcaccagacctgcccttcaaaaacacacctagtgtttccaaacacctgcgcacgtgtgtgtgtgtgctttacctagtcagtaattactgaactatcttcagtaattaccggcaattactaaagatagctcagtcattatcgataagtactattactgaacgatcttcagtaattaccggtaattactgaagattcg

SEQ ID NO: 38001 - DNA, 727 bp, Zea Mays
cacaaaaccacataaaaattcaggttagatcttatcccagcacccttttgagcctcgcactttctttcaataatctgcattgttgaatttgtgtgcttccgcgtttccttgttgctggttgcattgtgttcttccaccattcaaaccctagcgccgccaccatctcccgtttgatcacgccacaaaccgagtcaacatcgtctccttgtttttctccttcggttacgtcaaaaaaaaaacaaaaaaaaaacaaaccgagtcaacggccgtttccttgtttttctccttcggttacgaaaaaaacaaaccgagtcaacaaccgcttccttgtttttctccttcggttactcaaaaaaaacagaaacaaaaaaaagaaaacgaaggagaaaggatacggttgtttcatcccggtcgtttttaaaacataacttgaggtaccttccgtaaaacaggcataacttttcgctcgggtgtccaaaaaatctgaaatttttacaggagcttgtcgacaccattctgagtccggccaaactcacctacggtctgtttggggttcgacaaaattgtcaaaaaaattcaggaaaataaagaaaaaaattcgtcaaagttctcgcacgcttttcagagaacttcgagattttctatagaccacatctgatttctgttttaggtgaaacttcgtgtagctcctattttgttgcttcttgtgctgagaaaaatatcaaaa

SEQ ID NO: 38002 - DNA, 286 bp, Zea Mays
ggtacctcaagttattgttaaaaacgaccgagatgagacaaccgctttgtttcctttccctattttttgtttgttctctggttctatcctttctctttcgttttcttttttttcttttcttttttttgtttctgtttttttacgtaaccgaaggagaaaaacaaggaaacgacgttaactcggtttgtggcgtgatcaaacgggagatggtggcggcgcgctagggtttgaatggtggaaaacaaaatgcgaccactaacaaatgacgcgaaagcacacaaattca

SEQ ID NO: 38003 - DNA, 323 bp, Zea Mays
attcgacagcatcccctttgaaaattacataaatggggaagcaacaaaatataaatagatatcatgataagagaacataatatacattaataatctgctagcaatggaaagacaaccacaacggcatgaactaaatcaaccagtgcgcacaactagttagaaacaatatcctttgacaagaagtttctaattaaatcatgactgcgcctaagcagcgttattatgagagtgaaggtggatgtgctgctacttcccacttcccttgatgagcaacaagcacctgcattgagtaatgcaagagtgagatgaaacatctcagcaag

SEQ ID NO: 38004 - DNA, 790 bp, Zea Mays
atcccgtgtacattagctggacctcctctctccttattgcacgcgcgtgggcaatgagaatggctcgttttctctacttgctggctgcggtcccttgctcaagccgtcgggcaccagatcgcctgggttcctggtcgtccagctcgctggtggagccctggccgaagcggtagcagcgcccaggtttccgtctgcccaagctctgccatggcgagtccctcccgtctttgctccttccctgcttgcgtcgtggtctccaagctcgtcagcatttgttcaagtcgtctcggcttgctcggacttaaattctagcgccttgctttgctctcgtggtttagcgacggccgatgtgagcctggccgtggtggtgttgtggcgtggcgacgtcgtgcgcgtcgcgacagctgtcttgaccgtgaagcagtccgcgccatagagttcgctcggccacggtctcgttaaactacgaagcttcctcgccatgcgctctggcatcggctgccgccgattccgtcataaagttcacgagcgctccttgctcagtttctttcacagtgggcaatttctccacgtttcaatttcgtgctgcttgccccgtgtgtgctcgctcctcatccatcgggtttcagcgtgttcgcgtttaccgtcgagtcgtcgaacctgtcatcccaagctcgacccccacctctgatatagctgaggtgcccgatctttcagcgagtagagataattccgatttggcggaagatgacccttgcgatccgactacgacgagcaagcccgagacgcc

SEQ ID NO: 38005 - DNA, 407 bp, Zea Mays
atttggaagtttaaatacaatctggaaagcttaccttatcttctttccaacggatctaaccttgcctcaaaattcattctgagcgctccgcaatcatcgtagagatttcgggactttctatattaacaagatttgttaaatctgatttaaaggggctgttagcaatatccttattgtttgggttgtcatagtaaaaaaagggtttaggcccctgcaaaaaaagaagaaaaaaaagaaaagaaaagaaaaaaaggaaaagaagaagaaagaagggggatgaatctctaaatctgttatttctctttgtgttgtgctagttgttctttttcagtgactacctttgtgcctaggctcacgtctctagcatggtttagcctaggaccagcacagtaccaccgttgaacgat

SEQ ID NO: 38006 - DNA, 616 bp, Zea Mays
tcagatgcaagtgaatcatgcaatgtatatggcatgcttcatttatcaatatacttcacttccttcacatacaatacaacctcaaataatacttcatttaccttcagatacaataccaacctcaaataatacttcatttaccttcagatacaataccaacctcaaataatacttcatttaccttcaggggtgtgaattaatctcatgagtcatactcgaatcataatcatcatcaatatatgattgagcatcagtataatgcaagcaagtaaagcatcaccatagagtccaattatgaaagaatccaatacttctgaatattagagtgtaggcaatagaaataacaggtcagaacggaagcaaccaccgctacattcacttgccttcatcgaagaagaaaaatgtactaggcatgatctggagtgtagccacctgctagcgggcataaaacttagtacaaatatttcacaaacatttgccaacaatcaacaaatcgatcctacacctgaaaccaagacctggtggaaaacctcccactctgaaccacatgccatacaacagcaatgttgtttgttaattttgtatctttagaattataacagtggtgatatcaaac

SEQ ID NO: 38007 - DNA, 1154 bp, Zea Mays
ggaaagcttatgaaattatctacatcttttcttacaaaccaaaggtttaattctgttgataaaattgcataaatcttaagagaacagattctgcacagaattaagagactgaaaaactgctataatcaaactgcaataactctctgatctgatgtccgattgaggtgttcttcgcggccacggaaagatctacaaattatctacgacttatatatagactttttatttttttgaggcctctaagaccacggaaaactgggattaacagaaactgttgaatctgccattctgcagaaaactaaattcgagatcaaaacataaccccacatctaatccaacctctaatcctttaattctcatgatccacaacctccaaaagcacataattacagggaggaacaaggatctcatccatacctagggtttccccaagaaattttgcaagaagagatggggaagaacatctccttgatcctctctgccccttcaactcaatatttgtgctcctcctcttctcgatccttgctgcgcggggggagatctagagggaggaggaagccgtggagaggggctgccatgggaggagaggacagccagcccaagggaaaagaagagaggggcggccaagtgtgggaggggggaaaggggtggcggccaagtaggggcaaaagggggaaaagaccaccactagggttttctttgcgggagaaaagaagcgacgccacagatgactccgacttagcatccaacggcccacaacccttttcctacatccacgcaccgaagatcaacctttggcaacatttttttgggatattacactctaccagggggcagctgcaatccattggggagaaggggagggggcggctagggttggggaggagagggggggggctcccatccaccggatcgagatcaatggcccaaactcgctctttcctttgagctcccgaccccagcgaaaaaatgccaaaagatctactgttttctgaggaatgcctccttaaactccaaaccccaatgccgtagaacatgaaagaaaagagaaaaagaagtttaacttcttttcagaaaattggggtatcacactctaccccccttaaaaagaattcgtcctcgaattcgtccactccaaacaaaacatccatggt

SEQ ID NO: 38008 - DNA, 346 bp, Zea Mays
ctgccattctgcagaaaactaaattcgagatcaaaacataaccccacatctaatccaacctctaatcctttaattcccatgatccacaacctccaaaagcacgtaattacagggaggaacaaggatctcatccatacctagggtttccccaagaaattttgcaagaagagatggggaagaacatctccttgatcctctcttccccttcaactcaatgtcctcctcctcttcttgatccttgctgcgcggggggagatctagagggaggaggaagccgtggagaggggctgccatgggaggagaggacagccagcccaagggaaaagaagagaggggcagccaagtg

SEQ ID NO: 38009 - DNA, 364 bp, Zea Mays
gttggattaaaccctaaattaaaattagggttttgaaagtaagaagaaaaatgatataaaaatataaataatataattatatttccaaaattagaatttttaaagtcacactgtaatttaaggataaagtttgcacaaggtttgaagttaaattcgaattcaaattgactttagaaataaagaaaacaaaatgggagataaaaagaaaaaaaaaagaaaaacaaatctagtctagttgggctcctcccctcaattcggcccagcagccaaaaccaaccgtgcggcccaataccacatctcaccgcgtggcccgcttaccagcctctccgcgcgcactgtgtaaccgcgccgacacctggggccc

SEQ ID NO: 38010 - DNA, 1064 bp, Zea Mays
tatgagtcgtagataatttgtagatctttccgtggccgcgaagaacacctcaatcggacatccgaccagaaagttattgcagttttactatagcagtttttcagtctcataattctgtgcagaatctgttctcttaagatttaggcaattttatcaacagaattaaactgtgggttggtaaaagaagttgtagataattttataagctttccatattgttaaagagtgcattcatatgatttgtgaaactccagttatgtttgttttactgtggctgttcctgtttacctgacaaaaatgagtgggtctgttcactggtgggtttcatctagtaaatggccgaattggctcttccaactatggagacttttgtagagggataaaagttcttacttccagcagaatttcataattgttggttcagcagttttggagatatcgaattttaaagttaaccatactgctgtctaaaacagattcagtcagttatcttgtcagatgttttagaacttgtagatggcagaatttaattatctattgaatactgaagttgtagagtattttgtgtagatactcctagagtatttgtttgatatcaccgctgttttaattttaaagatacaaaattaacaaacagcgttgctgctgtatggcatgtggttcagggtgggagtctttccactgggtcttggtttcaagtgtaggagtgttttgttgattgatggcgaatgtttgtgaaatatttgtactaagttttatgcccactagcaggtggctacactccagatcatgtctagtacatttcttcttcttcgatgaaggcaagtgaatgtagcggtggttgcttccattctgacatgttatttctatcgcctacactctaatattcagaagtatcagattctttcataattggactctatggtgatgctttacttgcttgcattatactgatgctcaatcatatattcatgatgattatgatttgagtatgactcatgagattaattcacacccctgaaggtaaatgaagtattatttgaggttggtattgtatctgaagg

SEQ ID NO: 38011 - DNA, 296 bp, Zea Mays
ggaaacgccgccgtgagtcgtgtgatggctatgtgaaagggggacttggccaccatcgtcgactgcggttctcaaccacacccagtctgcggtgggggggcctcattgcttggtcgatgctccccatccgtggccgtgggcggttcgggcgagaatcggccaccggtgctcgggatctgctcgtcggagagagtgagagagggtcgcgggctccggtattagctgcatatcgcggtgcctcggcgtctaccctgatcgtgcggagaagtgtcgttgtggttccatgcagtggccgg

SEQ ID NO: 38012 - DNA, 539 bp, Zea Mays
ctgagttttaatgtctagtgtgctacctttttgggatcaaattagatatacactatttttaagtggaagtatgtttagaatacttctacaaagtcctaggattttgcagattttgtttgagcagctaactaaaggctcctaagtgatgaaggaaacatagctgagcagcaaatgaaacacaactttccttttttggagcagaataccaattcttcaactgagtttgccttggttttttagctggacggtgatgagtttctgggctaaataaaacctacaaagatggttcttctctggtctacgattctggcgactgaaatgcaggcatgtgtgatctgtctgatgtctgccaaggaaaagcaaaagtagaaaacctcgccgcattctcttcggacaatagattatgcattctgtaccaccctggtcttcaatttacaatgtgcagattttgttttcctctttccccccgcctgttcttcttccctcagtctcgctgcattccatatgcagatgcatatatgcatgtgcgcacacgagcc

SEQ ID NO: 38013 - DNA, 899 bp, Zea Mays
caattgtctaatattgtggatgatcatgatttggtaatgatatatgtggttgattcctatcatggatggagttgaagtattttttttgaatcacgttatatgaagtgttgtaggcatgtcatgcacattgcatcatccatattgcattctgaagttatgtcgtgatcttatggtccgactgtaccggtacatttttagcatcgtacgttgcccgaggaggggtacgatgcggcttcatatccttagaggtatgaaggcagaagtcatccttgcatttgcagacatttgcactcatgaggtatatatatgaagagtgacattactatgttactattgtggtttctacctgcgaggtgtggtagctaggagtgttgtacgttgtatacgtgctgcacctttgtaataagaaggttgtgaaatcaagtggtggtaaaacaatattcttatgtggttaaacagtttgatattattttacttgctgagatgtgtcatctcactcttgcattactcaatgcaggtacttgttacatgttgggaatgaggggagtagcagcacgtccactttcactctcataatagcgctgcccaggcgtagccatgatttaattagaaacttgttgtcaaaagaagttatttttttgctagtcgtgcgcactggttaattcagttcatgtcgtatgtttaacttccctttgctagccgattaataatacttggtatgtttttgtcatgatatatgtttatacactgttgtcccccccccctcagttatgcaattttgcaaaggagatgctgccaaaattttatatagatgtcagaagtgtagttcagtagcattccggggtgtttgtggaccccggggtgttacagttggtatcaaaggataggctttagattct

SEQ ID NO: 38014 - DNA, 460 bp, Zea Mays
catactcgtgcgctgtctcagttctctgccgcgtggggccactccgtcagcatcctccctaacagatcgagcatagcttgtagctaaattgcaacaaagtgccataaccaccgagtcagttgcgcctgctggtcaccaccttggccttgcccctcgcggctatatagcttggtaccccattcatctcatgggtgtcagtcgccgcggtgataccagggagagaaagagttgtcgggcgagatcgatgccggcgcacccacatcatgtgtccgccatggatcggtgtccgaggaatagtcacggaggttcacctacgattgtggagtgcattcaggcaagccctcggacgcgatggtcaccggagcttgacaaatcgctcgccggagcgaggaaaccactgtcgggccgctccatcgcgtcgccagcattacttgggcaacaatcgccggtaaggaagccg

SEQ ID NO: 38015 - DNA, 771 bp, Zea Mays
gtcgtcatcactaaaacaaacgccgctgggacacaattccactcatcctctttctcccccactcctcttctttctcccccacaattttctccaaccctaatcgccaccgccaggacacaaccgccgtcgacgacctgccccctcgaccaggtacctcaccaccgccgcttggacacatccgccgtcgacgacctgccccctagaccaggtacctcaacgccgcccccttacctctcatcgcgtcgatgagctgcgtcgtcgccgacttcactcgccgcatcccgctctatctcattgacatccgcatttctctcgccccttccacctaacacgccccatccacatttctctcgccaacccctaaaccctaaccatcgctggatttgggtcatcgcagacgaccttgatggtgaacataaggaggcacagaagtcagaaaggtccacaagaagaaggtaagccacatgcctaatacgggtagcacacctttatgcattggtatcttgtggttcactctgcctaattcttagttgctaactattaccaagctggatctaaccaaacctagtgatgctagatacatcattcatttatcgacacacatgtgagtgcatcagtgtgtttataaaaatggcatggaagtgccaatgatgcacgcgaaagaaatcctcaacatagtgtgtttaattgattgattgcttccattgccttttgcttgtattagaccttatgcagcacaatctaagccagaataatcgtgtacaatatctt

SEQ ID NO: 38016 - DNA, 833 bp, Zea Mays
gtaaaatcctttacattatctaatacgcacagtgtgcttgttcttatctatcttgcaagtagttcaacatgagctaactgattatgagagaagacgggataaacaagtggaggagaatataaagaaaatgcaagatttgggtctgaacaaatatacttctgttctaaataaatctttatcaccatctacatcaacaaaggggaaaaatgcagcaaacaagaaaattaattgttcagattcggattcatatgtctctgtctatctccttgatgatgatgatcaaggagatactgatgatgatgacactgaatcttatgagcagccacaacccctggcaattaaggtgctccttctatcttcaaagtagtggatggcaaatagttgcattgcatttcaatgtttttaatctggtgtttaatatatgctcatgcttttagattcatcttctttatttcatacctcttaattaatatatggtcttgcttttaaatgcacatgactatttttttgtggacagtatcctagaagtgctagaaacacaacccttgcttcaaagaagaagagaaaccccaacatggatctaggaattaggttcagcaagagagtgagggcaggcgaggacacaaagggaaaacaactggacaggatgactaaagttatgcaaaggagactgtccatagctgttgaggaaggcaaaaaaaggccacatgaacctgttcaagctgccaagtttgcatcagaggctggcatcattattcgggaaaccatgcctatcctaactcgttggaaagattacaaggacgaccagaaatactacaacagctttgtgtcac

SEQ ID NO: 38017 - DNA, 1841 bp, Zea Mays
gttaacactaaggacaaggcaacaaaggaagcttgcaccgatatgctacactctgcggtaaaaaaaccagcattatcggctcaagcagcaatacttcaatggtgtacctgcaaatgagattaggacaacttctcctgtatcttacatgactaatgaacagtgtagggcattagttgcaaagtggtctgatccaaagaacattgtatgggtatcttgtcatatattcttctttcactataagtttgcaaaggatcttcgcatattgaacctatgatctaatctgacatgttcattctcttgtaggaaataagtgaaaagaacaagcagaaccgcagtcaagtcaagtttcatcaggctacgggttctcactgctatgtggcacacttacatgcatatgtaagtaaatattaccctgtactactacctgcacttttgcactcaacaacttctattgcatttgatctgagcaaacttcgatgtgattgtttatccacgaaatagaagcagaagagaaacatagaagaacccagcttagatcagactgaagaactagatgcggtggacgccttcaagacctaccataccagctccaaacgtgtcctgagtgaatcggcaagagaagcacttttaagttcattcgtttgctttatttagtgtattttttatgagatcatatgaggcaacacagttaatcattcacttgaaatattgggtagagatcaaacacattttgcaggacaatatctctaactaagaaagttttaggaagagttttgctactctctactatccttccaccattgatgagtttcacattattgtcagctccaaatctgctataatttgtcatcactagatgtcacatcttatcagttttaaattttcagaaaatagaaattttattgcctgattgtccaactgacagtcttctggaaaggaacatgatatcagagatcatttgtgcctaaatctctgcatttttacctctccaaagcaaatgccaactgcaatcagtttctgtcagtgtagcattggttattatttcattataaacaccttgtgtcatatgtcttcctcaaattattgcaataactaacaattgtcatcttgctgttgctcattagcattaacgtgtaactgttttctgtccatgatatttcagtctcatatggaggctttgagggctgaacctgttgctgaaggtgagatgccagcatccagtgtgcaccttgtgtccaaggtgctatcccagagcagctcacaccatttcctgaagagcgttggcatcaaaacatcggcatcctccaagtcatcatcatcaaatcaaagtgagcttccggaacaacttgcagctgaagcgacggttgctgttcaaggtgaactcgaccaactcaagaagaaatgtgaagaagctaaggaacagcaggcgaggacacaaagggagtttgaggagtacaagaagataacagagaagaacaacaaggagatggaggagaccaatgtgctcatcaagaagctcttgcccttgcatggtaacgcttcttcttcgacatgagggccgctggtcagagctgctgtgtttggcctgttctttgacatgagggtacccaaaaactcaagttgatcgtgggtgtcaactttttattatatgatgttatgtttgtgcaaactcaactgaaatgtgaagtcaagtggtgatgttgtgaactgagttcagtgttgtccacttagtgtgtatgctcactggaatactagttttattcatctacggaatatggaattgtgtgctcattcctcttttctagtatcttttgcaatttccaataaaattattctctgca

SEQ ID NO: 38018 - DNA, 143 bp, Zea Mays
atcctgacctaggttgcaggtcagagatcaagtctccactgtccggggatataacggcgatccgaatcgatttactcagctgaggatctctaaccacacgacatatgtagcacttaacccttgcatatgtcaaccattcccac

SEQ ID NO: 38019 - DNA, 227 bp, Zea Mays
atcaagtggtatcatatttccaggttgaatttgtgtgctttcacgtcatttgttgctggtcgcattgtgttttccaccattcaaaccctagcgcgccgccaccatctcccgtttgatcacgctacaaaccgagtcaacgccgcttccttgtttttctccttcggttacgtaaaaaaacagaaacaaaaaaagaaaaaaaggaaacaaaagagaaaggatagaactag

SEQ ID NO: 38020 - DNA, 571 bp, Zea Mays
cctaagtgtaagacctaaaattggtagaaaaaatataataaaataaagaaataaatatatttaggataatgttgctagatttttttttaaaaaactttggaatttagtagggcattttcttgtcatactccattgagaatactaaattagttaaatggccaataaatagatgaagaaaggttgatctcttgatgataattttggtgatgcattttatggaaaccataaacttgacctccaatttaaatgaaaatataaaataggaatgagaaaggtaatttaaatgaaacccttattcctcccctaaatgaatgacaagaaaaatactattaatgaaaataatagatgttatattttcattagggatatgtttggtatttgggaatttgaaagtcaaaacagaaaagttgaaactggtttgaatttggaatagggatttagaaattaaaagaaactgaaaatagaaaaaaagaaaaaaaaagaacaaacctgcgtctgggccgaaacagcttttccgcggcccgtctccccctttttcctcctctccaccgagccagcccatttttcccca

SEQ ID NO: 38021 - DNA, 252 bp, Zea Mays
gttaattggaacaagaaccacccaggaaaacagtgctaccacaagggtggtatgggacgcccttggcggactaattaggaaagctagtggaggactaccttacccaaaaggggcaagagcagtagaggagtggtcagtgtagggaggtcctcgggttgattttgctgcgatggcggtcaggcgagggatccctgcattggagcttcctagaaactgcagcgggttttctggagctagtggaactttgtaaag

SEQ ID NO: 38022 - DNA, 164 bp, Zea Mays
attttgactaactttaaaagcaatgctcagcttcaaccatcctcgttggtaagtctttcacttcacgtgagctcccatgtttggtgagttcattcacattattccctacaacttgttgagctatgaacgtatgtgagctcactcttgctgtctcacaccctgat

SEQ ID NO: 38023 - DNA, 197 bp, Zea Mays
tgcgatgtagttccccatgttcaccaccccctggcgcacctcccagatcgcacacaattcaccagtctacgctgtgctcgactagcgacgatggtggcggtcgggaccctctctgttgtttctccgcgtgagcccagggttcatggtgctcacccgtgaggaagacagctataggggtgcggtgctctggattatat

SEQ ID NO: 38024 - DNA, 1594 bp, Zea Mays
cttcctcccactgcgcccagccgaatccttccctggcgctcgtccatggtgccatcgtcctcgatctccatttccctggcgcgcggagcttctccccagctccatctcccagctcgcggagctccctgactggcgcgccctcgccttctccctctgctcgcgtcgcgcgcagctcccctttgctcgcccagcccatgccgcgcctgctccctcgccatggtgcgcctggaagctcctctcggccgcgtctggtcgaatctcgcccagtttgcagctcgccggcgcccaaactctctgcccgctatccatcgcgacccccagcttcctctgccgagcccagctgaagctccctatgcgcggtcttctccaatcgagctcgtccctgcgcccgtttctctgcgcccggctcccagcgccgcgcccccttctcggcctcttctaaccatggcactcggcgcccaagttccctgctccctctgtctgtttgctgcgcgagcttgtccctgctcggagtgctttcgtaccgagtccctcgcatctctctccctcgtgttttcctctctcagccatggcgccggccgccctcatcctctacccatcgctcgtctctatcctccattgccgacgattccccagctcggacggcgtccatctccctattcctccatggctacgtcgcgcgtgttcagttcttcctgcgcgtgctgccgcgagctcctctgatcccggcgcagtcgaatcccgtcctcctctactcggcgatgacatgttcggtcgtaggctcgctgctatcctccgcgacaacggcgagcgcgagttcatgttctatcacaatccagcgtcgtgtagatctgtcctgcagcagcaccctgctggttgtcgtgtagtacgccgcgcctgtttagacataagttgtcgtgtgcccagtctccgtgctgcagtactccctctcgcggggcatggttccgtgctgcgctcgcctaggtcgtcgccgttaaatcgttggagtcgctcaactcgccaatcgcatcttggccgattgttaattttatattcgccatggtacaacacagctgttagatccgatctccaaaccgtcatggcgttcatcgtcctctggtcccagcccgacccatccatgcactcgctcttcgtccatcgggcttcacgcgtgctcgcgtttgtcgtcgagctattgaacccatcctcccttgctcatgacttcatcatcgccagagccctcactcgattcgtgtcctcgtcagctcgctctagacacgatctcgtcgtcgttctgtgcgtcatcaagcaatcccaagaatcgggtgaagacgaagctagcagcatgatattcaccaagtgctcgacaacagctcgaacaagttgtcgagcgtcattctcgtctacgccaagccgtgaagacactctggtgctggccacgcgtcaccagctcaacaaaaggaatcccaaggataactggtcaagaatagaaattgtgtacatcgctcgccagacgtgtgtgatcaatgacgtcaaccggaaatcgacatcgtgcttccgactatcccatcgaattagtcaaggtaagcaaatt

SEQ ID NO: 38025 - DNA, 167 bp, Zea Mays
cgctttggtaatttggtcgatgtcgtaggataaaagaggtctcagtgtttgcgggactgtaggtgttaaaaatgggaagttttattaatatatatgatacacaggttaaccggtaaattagtttagaaagttaatgaaagttcttctatcaaacttcataagtgtta

SEQ ID NO: 38026 - DNA, 227 bp, Zea Mays
cttaatactatactccttttgcagggcttgatccttagcaatggcctcaggggacagaaaaatatcgaagatgaagggtgcacaattggtctgaacaaccttcgttcagaggttattgaactaagaaacgaaggccttgaaaaggataaaatactaatttcattggtaaataagataaaagaagacgaggctagttccaaagttcaagctgaggccaaaaagagtga

SEQ ID NO: 38027 - DNA, 281 bp, Zea Mays
cttacgtcgtcggcgattcattccgccgtgggcgcggtggagccaccatgtttggggcgagtcctcaggtggaagacagcccctgtccgttggttttccgatgagcggttgagattgagtcgggctatagcgtttcaaggattcgatcgcgatcgtcgacttttgatcgggtggccttcctggggccctagtgtccaccatcgatcttaggatcaatggtcttgaagaaaagccctataaggttgggccgatctaatctggaccccaaatttcagatcggg

SEQ ID NO: 38028 - DNA, 527 bp, Zea Mays
ggcgtagggtcgttggggccgtcagggctcgtggatcccgtatcatcctctggggagcacgaggatcatcggtgggttccgaatttgtcgccgggcttcgtcaaacgccgcggatccgccgagccgcgtgggtgggggcctctgcgtcaccgtactaggtaagaaccgtcccatttcatttcgccttcatgcctgcgagatgtatcacctttcaaattggaatttagggcaccagtactcagtgtcgagttttctggcatggtttccgccgtcggccaataggtaccgctgtttccagctgatgagggaggaagacgatcggtgagccaatggatcccagccgaacggcagtgattagatcataacctaccctttcgccgattcaatcttgtccgtagatccctaattggatggcttcgagtagatcacaagttaataaaatcgtgactgttgtgatggcatcgggcggtgaggagagaataccgcttcaggccctgttcggttgacagggttttaaatcctaaggg

SEQ ID NO: 38029 - DNA, 331 bp, Zea Mays
aaaagccaaggaccttcgacttaacatattgacgaagctcaagcatgaagatgactgaaaggggctgaagaccttatagtcctcaataattcatgttaggattataggcagttaccaatgacataaatgtaattttatccgggctacgtctcgtgcctataaatagatgaacagtaacaccgtactgttcacgctggattgtaatcgctctcgcgtcattcttgccctctcaccttttggcaagctgaaggtaccatagtaatatgagtattgttaatgcttattcatgtttgatgaagataataataaatgaatcattgatataaaacaa

SEQ ID NO: 38030 - DNA, 147 bp, Zea Mays
gtttaaaaactcgattcaaatcgtctgcttctcgcagctaatgagactgcttgatccatgctgctacattgagtaataagtggaaatgaggtgactggcaaaagatgttgattgataaaatgtttgataccatgtatgaatagctag

SEQ ID NO: 38031 - DNA, 462 bp, Zea Mays
aaaataaggttttaataattctagtttataatgatatttatggtaattaattgtctcttatgtgttcgttatttatttgcctttggaatgatttttttgaatgctcgtgattgattttgaatattgaatatcatttcttcttaaatgaaaattcacataaataatataataaagtccaaaaaaattaatatcttattcttaaaatagttttggtttaattattatgaattttaggattatttaaaagtatatttcgaatttagaaaaaagaaatagaaaaaaaagaaaaaaaaaataaaacctaacctaactaacactaacggcccaattaggcccatgtaaggccggccgccactctccttcccctggtagccgccgcccccaaggtctctctctcacgtactctcttctccctcatctcttcccctttctctctcttctctctctactctaccgcgccag

SEQ ID NO: 38032 - DNA, 163 bp, Zea Mays
cgactacatccattaaccaaattgacataataacactagaaattctattttcattcctagctttttattaattctttaaactgtgtatcttaattacttgacttacctatttatctaaatcgaacatcacaatatgtgtatactaaattaataacaattatcg

SEQ ID NO: 38033 - DNA, 1985 bp, Zea Mays
cctatggggactcgggacatcgccaaattccgctagtggacaaacactatttgtaacaccccgggatccacaaacaccccgaaatgctactaaactacacaactaacattcatatataaaatttcgacagcatctcctttgaaaatttgcataaacgtggaagcaacaaagtataaacagatatcataataagaaaacatactagacattaataatctgctagcaataggaagataaccataacgtcatgaactgaattaactagtgtgcatgactagttaaaaacaaacatcctttgacaagaagtttctaattaaatcatggttgtgtctgggcagcgttattatgagagtgaaggtggacgtgctgctactcccctcattcccaacatgaatcaagtacctgcattgagtaatgcaagagtgagatgaaacatcttagaaagtgaattgtttcgacgagatatttaaaccaaaaaaattgaactaatcaacattttaaagggatcacaattgagatcagaaatacttgtagatatagaactcaatagtcccaaaataaccaatgccatctaatttcctcgaacaaccacaataggttgtataacactttcctgcgtcaacaatacctgcaaatatcacttcgatgtatgcatagtaatgcaatgtgtaagtcctctgccttcatacctcttagagtataaaaccacaccatctacaaataccacttcaatgaatgcatatgaatgcaatgcatatgtcctctgccttcatacctctaagggtatgaagccgcatcgtaccccttctcgggcaacgtacgatgctaagttgtaccggtacggtcggaccataggtcacgacaaaacttcagatgcaagtgaatcatgcaatgtatatgtcatgctgcatttatcaatatacttcacttccttcacatacaatacaacctcaaataatacttcatttaccttcagatacaataccaacctcaaataatacttcatttaccttcagggatgtgaattaatctcacgagtcatactcgaatcattatcatcatcaatatatgattgagcatcagcataatgcaagcaagtaaagcatcaccatagagtccaattatgaaagaatccaataattctgaatattagagcgtaggcaatagaaataacaggccagaacggaagcaaccactgctacattcacttgccttcatcgaagaagaagaaatgtactatgcatgatctggagtgtagccacctgctagcgggcataaaacttagtacaaatatttcacaaacatttgacaacaatcaacaaatcgctcctacacttgaaaccaagacctggtggaaagactcccaccctgaaccacatgacatacagcagcagcgctgtttgttaattttgtatctttaaaattataacagttatgatagcaaacaaataatctaggagtatctacacaaaatactctacaacttcggtattcaatggataattaaattctgccatctacaagttctaaaacctctaacaagataactgactgaatctgtttcagacagcagcgtagttaacttcaaaattcgatatctcacaaactactcaaccaaaaatcatggaattctactgtcagtaagaacttttatccctctacataagtctccatagttggaagagccaattcggccatttacctgatgaaacctaccagtgaacagacccgctaatttttgtcaggcaaacaggaacagccacagtaaaacaaacataactggagtttcacaaatcatatgaatgcactctttaacaatctggaaagtttatgagattatctacaacttcttttaccaacccatagtttaattatgttgataaaattgcctaactcttaagagaacagattctgcacagaattatgagactgaaaaactgctataatcaaactgcaataactttctgatctgatgtccgattgag

SEQ ID NO: 38034 - DNA, 1585 bp, Zea Mays
atgaaggataacatagacaattatatattattatcaacttatttttgcattattattatgaagaaatagaaatgacatcaaattacaaatgtaccttcgacttggaaggagatgaaagtacaagtgtgacgcaaaagcaaatgccaagtcagcgtgaacagtacgggggtactgttcacctatttataggcacgggacacagcccatataaaattacattcatgccctttacatttggtagtaattctatagtaatccaccgaggtctgaatagccttttcatctttaagtcggtttccttttctgctaccacgccgaagctttcccgctcacatcttcgacgttgtatcaaccttcgtattattttgggcttctcctactgtgatatcgactcgagtccgaagatacctgttcacacattatactccagaaacactgttaaatcatgtttttgaggaccttcgggagccgaaggcccccaacatctacaaataccacttcaatgaatgcatatgaatgcaatgcatatgtcctctgccttcatacctctaagggtatgaagccgcatcgtaccccttctcgggcaacgtacgatgctaagttgtaccggtacggtcggaccataggtcacgacaaaacttcagatgcaagtgaatcatgcaatgtatatgtcatgctgcatttatcaatatacttcacttccttcacatacaatacaacctcaaataatacttcatttaccttcagatacaataccaacctcaaataatacttcatttaccttcaggggtgtgaattaatctcacgagtcatactcgaatcattatcatcatcaatatatgattgagcatcagcataatgcaagcaagtaaagcatcaccatagagtccaattatgaaagaatccaatacttctgaatattagagtgtaggcaatagaaataacaggtcagaacggaagcaaccactgctacattcacttgccttcatcgaagaagaagaaatgtactatgcatgatctggagtgtagccacctgctagcgggcataaaacttagtacaaatatttcacaaacatttgacaacaatcaacaaatcgctcctacacttgaaaccaagacctggaggaaagactcccactctgaaccacatgacatacagcagcagcgctgtttgttaattttgtatctttaaaattataacagttgtgatagcaaacaaataatctaggagtatctacacaaaatactctacaacttcggtattcaatggataattaaattctgccatctacaagttctaaaacctctaacaagataactgactgaatctgtttcagacagcagcgtagttaacttcaaaattcgatatctcacaaactactcaaccaaaaatcatggaattctactgtcagtaagaacttttatccctctacataagtctccatagttggaagagccaattcggccatttacctgatgaaacctaccagtgaacagacccgctcatttttgtcaggcaaacaggaacaaccacagtaaaacaaacataactggagtttcacaaatcatatgaatgcactcttta

SEQ ID NO: 38035 - DNA, 400 bp, Zea Mays
caagaccaaaacattattgttaatgaccaataatgaaataagataaccactaactggtgaagcgaggataaattatacaaccaaggatatgagaaaggttttttttttctttttttaaggatacaaaatacaagggcattatcaagtagagagacaaagggtttaatatctcgaggtagatattgtccaaggatgacaatacaatggcaagaaaacaaaggtataagaattcaatagggagaaagcattatcaaggagaaaagtagagaggcaaaagtttaatatatcaaggtagatattgcctaaggatggcaatacaatggcaaggaaacaaaagtataagaagtcaagggttttatagcaatattatggattagaaaacaactacaatataacatcg

SEQ ID NO: 38036 - DNA, 210 bp, Zea Mays
aaaaatctgaaacttggtgtgttttcttcttatgtgctgctgcaaaagaaaaaatataaaaaaatatttgaaaaaagaaaatcgcaaaaaaacaacgactagagcaaaaatcagacaaaagagaaaaagagaaaaagagagagcacataagcagaaacgccagtattctgtgcacctctgtgattattttgccccaagcctgtttccttg

SEQ ID NO: 38037 - DNA, 452 bp, Zea Mays
aagaaatacactagtaccacgttagttacaaaagcaagctgaataatcgttcaacggtggtactgtgctggtcctaggctaaaccatgctagagacatgagcctaggcacaaaggtagtcactgaaaaagaacaactagtacaacacaaagagaaacaacagatttagagattcagcccccttctttcttcttcttttcctttttttcttttttttcttttttttgctggggcctgaacccttttttttactatgacaacccaaacaataaggatattgctaacaacccctttgaaatcagatttaacaaatcttgttaatatagaaggtccagaaatctctatgatgattgcggagcgctcagaatgaattttgaggcaaggtcagatccgttggaaagaagataagatatgctttccagattgtatttaaacttccaaatccgacatgag

SEQ ID NO: 38038 - DNA, 220 bp, Zea Mays
atttgggtttgattattatgaatttcatgattatttaaaataggtatttcgaaattagaaaaaaaagaaaaagaaaaaaaactaacctaactaacccttggcccattaggcccatgagccggccgccccctgccccttttctaaccctaagccgccgcccgtggctcctagccgccgccgccgttccctcttcagctttctctctctcacccgactttct

SEQ ID NO: 38039 - DNA, 411 bp, Zea Mays
cttaatctcgaggacgagattctttttaagaggggtagatttgtgacactatgaaaatcatcaaataaaagtaatacatttagttgttaatggtaataaattttattttaagtgtttgttatttgtttgcatttggaatgatttttgattgctcgtaatggattttggatattgaatatcatttttttaaaatgaaaaccaaataaataatataataattagtccagaaattaatattttatttataaataatttgggtttgattattatgaattttatgattatttaaaataggtatttcaaaattagaaaaaaagaaaaagaaaaaaaaactaacctaactaacccttggcccattaggcccatgagccggccgccccctgccccttccctaaccctaagccgccgccg

SEQ ID NO: 38040 - DNA, 367 bp, Zea Mays
ctcggatcggaaattggcgccttctcctctccctctcctccccactcccctcttctccgggcagtaacagacgtcgttatggccaacgccatcaatggcgttttgattcccgattgccattgatgaccgatcgttctcctcctccctcggtgttctctcggtttcccctctctctataaaaaccgccgaccagagctctctcttctctcccctgcccgagctctccctcacccgcgaccgcgccacaccgccggatgcccacgagcccgccgcctcgccggagctcgaaccctgcctccagtcgacgccagagtcactcgccaatcctcactgcctcgccgtccgccttgctcttgctcggccgtcg

SEQ ID NO: 38041 - DNA, 967 bp, Zea Mays
gaataatcgtcgtgacatacgtacctagcaatctatccattaaaccaattattggaagtggcgaattagcttaccataattaaattcgacttgaaatcatgaaatggacaacgcctttcagctctagcctttccccgaatacatggtgagtgccacatccccgaatacatggtgagtgccacatcgaattacacttcttcgtccacatcgagaattctctggccacgtactgatttattttcttatgcgcctaattttcttagatttttggcgtaggcgaggatgacgacccacgacttgttcgagctttttgtcgagcacttgaagcatcgaccagtggcttgtttctctacatcttattgagattcttttgtcggcgcgaacactaagtcgaagatatcacgcagggggtggcattgagacgagactacggaacaacgacgaactagcgagctgaaccacagcaagtgaggtcttagcgcggatgagcaacggcaactagcggactcggaacagccgagtgaggtgcacggccatcaaagcgtaagcgccggcgagctgaacatccacgacggacgacagcaggatcgaccgagtgcgcacagacgacagcaggatcgaccgagtgcgcacagaggtggatggcacggcgagcaagtccatggacgaacgccgagcaggaacgagatccgggctgggagatgggcagggatggagctcgaccgaacggctgccagcagggggagctgctcggctgcagcatcacggcgtcggcctgcagcatctccaacacggcggccgcagctggaacaaggagaagcgccagcgagcagagaggggcgaccggtgctgctagagctggagcaggaacgcgccatgggagagacgcggacctggggccgggcgcgcacagggagcttcgaccagggcgcggctggggagctcagggagagaaagccgagcgcca

SEQ ID NO: 38042 - DNA, 473 bp, Zea Mays
atctaatgtgagatattgtaatatagttctctttttgcaacatgtatattgtgtccttagacctgagattgtcgctctcaagatgtggattgacctacttagggactatcaaacactactctgtaactgggtagttataaaggtagttttgggtttgtcaggaagcatgctgtgaggcatggtcagtcaagatggaatttgtccctctcttcttgagagagatatctctgggcccctcgagtgattggatcaagaaatgcatggtcgtgctagggttaagagttaaccactgaaatgattccaattcacaatatcaagaaagagaggtcagcttagagccagaccaaatatcgtgagacaaagggaacaacatatacgtgatgttgcaatggttcgtctgatatgatctttacgtgcgcataggagttgacatgttttgctagaagccgttgtcaattattgggccaagtaag

SEQ ID NO: 38043 - DNA, 379 bp, Zea Mays
gttttctcgacctgtgtgagaaggtcttcttcttaatgcaatgcccgggggctgtcttaccccccgcaggtcgagttttttaaaggttctttgtcctcctgctacaaggatctagtctaataacattagagttaccttccttaaagcaaatctaaggtttcatgaccttatgaaacatgttgagactggttttcattgagactgatttctattttgtgagagaaagagtagctaaattatttttggaggtcagaattatatctacaaaggaccaagttgtagatgactttactaagacactgactatgcagaagttagcttcattcagagacaatcttaacttgtgcaagttatgattgaggggggtgttagaatatgc

SEQ ID NO: 38044 - DNA, 542 bp, Zea Mays
tcttccgaaccatacacgacgagtattcctggccctagcatcttccctgtaacgcttgcctcacttcgtctctcccagccaccctctaattttcttgtcgcggacgtctctttcactgctcatccttcttcttccggccatcagtctcaccgctcgcctttagctcttttactctccagcaaccgtctcctgccatcagccaggcgtgcgcaactcatacagcagcagttccaacgaagcacatcagttgtgcggtcgtgccttaacgttggacctccacttccactccctctctttggtcgagcttcacctgttcgccgatctggctgcccgtcgtcctctccatgtcccgcgccttggtccggtctcggctgctgttaaccatcgcgtccggacatcagtgcatgtcaccttcggtttctccctgcccattccatgtcatggtaggcttgtatcggccatcgaccccacgctcatcctcgcaacctcactgcaacgtcgtcgttctcccagttctgcgcgaacgtctgtggtagcggtgg

SEQ ID NO: 38045 - DNA, 231 bp, Zea Mays
gggtgttatccgtcattgccatcgttcggacctcggtgatgggtcgggggcaatcctctggacatattggtgtgtccgggtgctggcgtggacttgtgctaattgcaatcggcgccaattgctcgttggagtcgccctgcctacatttccgccgttctgcgtgggcagaaaccttcgcgtcgtaacccactgtgagttttactccaacgaatttgcgatacttagaacatt

SEQ ID NO: 38046 - DNA, 208 bp, Zea Mays
ctttgcgtaccggttcatttcagaatgtatttaatcctggcacttggatttgatcggatggctgaggtccgtgcttcatgccgctttgcaaaagaaaccctagagtattcagagttcaacctgcagtccacgtcagggacatactgagtcttggaaagtcttacgcaggggtccctgcgctttactgtatttggcacgcaatccagag

SEQ ID NO: 38047 - DNA, 716 bp, Zea Mays
cgcgcgtcctgtttcctgttcgccagcgcgccctctcggctcgctcggctttaattcccaatcgtgtcgtcgattccaccggttagcgtcattcgtcgtcgcgtcgcgtgtgtagctctatatacgtcactctcctgtgtcgtcgtcgttccacgtgtcgtcaagaaattccaagagtcgagtgaagatggagccagcagtatggtgttcaccaagtgcgcgacaaaaagctcggacatcctgcgcgactcaagttcgattcgtcaaaattatttagtcgaggaaaagatcttcagcaaatgattatcgaagaaaagaaggcccctgggtgacgtcaaccggaacctgtagtcgtgcttgcgactatcgcgtcgaattagtcagggtaagttgattcgttttcttgtcaactagatctataaatagattaatagaattattagtcgcgataattgttattaatttagtatacacatattgtgatgttcgatttagataaataggtaaatcaagtaattaagatacacagtttaaagagttaataaaaagctaggaataaaaatagatattctagtgttattatgtcaatggatgtagtcgatgccctgttgtgatatccatggtgcttaatgtttggttttaagtgtttcatccttttagtgagattatctatattatactcgtgctcatacatgtgcatcatgcatctcatgagg

SEQ ID NO: 38048 - DNA, 278 bp, Zea Mays
gagggtgggagagagcagggtggcggctagggcagccagggagcgacggccagagggaggggtgagctggggatgttgggcctcgtgggtcggctaggttaggttttgcgtttttttttctttttttctttttttattcccttttgtaaattcaaaatacattttaaaataaccctaaaaatcataataattaaaccaaaaatatttataaatcaaagtttatttttggactaatattattatatatattatttactaggattttcatttaagacgaa

SEQ ID NO: 38049 - DNA, 233 bp, Zea Mays
ggcacttgctgtcggaggccgacttctcacggacagcgtccgcatgttgcgtccgaagtctctcgacctcggcagacaacgccgccgtaagggcccccgacgcagtgcggctggtgaagtcagccacctgcagaacacacgtaaggcccataaaaaaaaaataaaaaaataataaaaaaataaaaatgtatagctcggcggacctgactcagcgcctccgtcgcacgactcag

SEQ ID NO: 38050 - DNA, 1144 bp, Zea Mays
ctagccttttatttttacactaaaattccatttctaaatcaatttctctgttataatatctatctaggctgcgcaccaaaatttgagaagcacaggggttattctacaaatacacccgagactcagtccaaccccgcagtggaccgcgggttcatctcctaattccagaggggctctttaagcaaaatgcgccacgaaagggtgcgcagcgatcacgaccgttggattagacacgggcgcgctagattaaattattactcttgcgaaccggtacgcgatatcgcccgtcagatcaaatctcaatggtgcggattggaatctagttacaaatagcggcaacacgctagaaccgcccgatttcctatctacgatggagatctaatgaagtccccataccctcattttaaccgtacgattctaatcctacgggccagacccttcgttctctggattcaatcacaactgcacgatgcatatcacacggcacactgtcactctccttcccctggcactggttcacggcgagcaggccaccgcacggcggcgggttcactggagctcgcgaaatccggtcctcccgagcgccatacccccaattcgcacgaccctcgcgaaattgacgatcccccaagcctgattcacccctcgattgctgccaccatccatcgtagaacccggtccacagtgtgccgctccagcaacacccgctaccccgaatcgacacacgagccatggctaattgggttctacgcgaccgacaaactgaggaaattaacggggtttctcatacctaactgcgcagcagaggttctccggccccggtggatgagtggaggtcgggattccgtggcgtcgacgaggaattcccgagcgccgcaacccaattcgtgcgagcagcggccttggtttgcttcctggcgcaccgaagacgccccccggttcacaagtgaggtcccagcgatgtcaatccggctacacccgtgaaggtcgtcgtaggtggttgacgtgaattccgcccgcgatggagtagctaatggcggcgacttgaggtgattggtctaggcgttgtgaggcaaaaaccctagtgtccacgaatttatctcagggtgcggacgagtccgtggtgtagcgaaggtccggccgc

SEQ ID NO: 38051 - DNA, 433 bp, Zea Mays
ggaaagatctacaaattatctacgactcatacatagacttttttatttttttgaggccactaagaccacagaaaactggcatgaacagaaactgtcgaatctgccattctgcagaaaactaaattcgagatcaaaacctaaccccacatcaaatccaacctctaatcctttaattcccatgatccacaacctccaaaagcctataattacagggaggaacaaggatctcatccatacctagggtttccccaagaaatcttcaagaggagatggggaagaacatctccttgatcctctcttcctcttcaattcaacgtgcccctccttttctcgatccttgttgcgtagggggagatcttgggggaggaagcaaaggaggatggctgccatagggggagggggcgtccagccaagggggagaaaaagggggtgg

SEQ ID NO: 38052 - DNA, 960 bp, Zea Mays
tctctggtgcgtggatgaggtaaagggttgtgggccattggatgcaaagatagaagtcatctgaggcgtcatttctttctcccacaaaaaccctaggtggccaccccttttttcccttcacccccccctcttggccgccaccccctttttctcccccttggctggacgccccctccccctatggcagccatcctccattgcttcctcccccaagatctccccctacgcaacaaggatcgagaaaaggaggggcacgttgaattgaagaggaagagaggatcaaggagatgttcttccccatctcctcttgaagatttcttggggaaaccctaggtatggatgagatccttgttcctccctgtaattataggcttttggaggttgtggatcatgggaattaaaggattacaggttggatttgatgtggggttaggttttgatctcgaatttagttttctgcagaatggcagattcgacagtttctgttcatgccagttttctgtggtcttagtggcctcaaaaaaataaaaaagtctatgtatgagtcgtagataatttgtagatctttccgtgtccgcgaagaacacctcaatcggacatccgaccagaaagttatcgcagttttactatagcagtttttcagtctcataattctgtgcagaatctgttctcttaagatttaggcaattttatcaacataattaaactgtgggttggtaaaagaagatgtagataattttataagctttccatattgttaaagagtgcattcatatgatttgtgaaactccagttatgtttgttttactgtggctgttcctgtttacctgacaaaaatgagtgggtctgttcactggtgggtttcatctagtaaatggccgaattggctcttccaactatggagacttttgtagagggataaaagttcttacttccagcagaatttcataatttttggtt

SEQ ID NO: 38053 - DNA, 97 bp, Zea Mays
acatccacaaagtcattaacttaagtcataatcaaagtgctgaatgaaacacagtacgataaggccttcatagacagctgactaggggtttgccact

SEQ ID NO: 38054 - DNA, 220 bp, Zea Mays
ctttctcaagcacttgcagccacacatcaaaccctagccgccccccccccatctcctcctcccatggtgccattcgttgccgctcggatctccgtcgcgtggtgcaaatcttcaacggttttcggtggagggaggaagggaggaagaaaagggggagaacccaaggtggtggacttccggatcgtacttagggatttgcccgaacttccggtaaaggcaa

SEQ ID NO: 38055 - DNA, 213 bp, Zea Mays
cccatctcctcctcccatggtgccattcgttgccgctcggatctccatcgcgtggtgcaaatcttcaacggttttcggtggagggaggaagggaggaagaaaagggggagaacccaaggtggtggacttccggatcgtacttagggatttgcccgaacttccggtaaaggcaagtaaatatagtggtggttgctaccgtttggtttgcatcct

SEQ ID NO: 38056 - DNA, 455 bp, Zea Mays
ctgggatctcatgacatcgagtttctgtaacaccccgagggtccacaaacaccccggaatgctactaaacaacacttctgccatctatatataaaatttcggcagcatcccctttgcaaaattgcataaacgagggggcaacagtgtataaacatatatcattacaaaaacatactaagtactattaatcggctagcaagagaagttaaacatacgacatgaactgaattaactagtgcgcacgactagttgaaaaaaagcaaacttcctttgacaataaatttctaattaaatcatggctgcacctcggcagcgctattgtgagagtgaaagtggacgtgctgctactcccctcattcccaacatgtatcaagtacctgcattgagtaatgcaagagtgagatgacacatctcagcaagtaaaataatatcaaactgtttaaccacataagaac

SEQ ID NO: 38057 - DNA, 434 bp, Zea Mays
ctcgacgaacacgaccatggttacgtgctggcgcgggtaggacaacagtggttggcgagcctaaaagaggagcttgcacaacgataaccaacagggaagcacgcacgcgcagcgagagacaaaatacggaactggagctgagcacggccaagggagcagggccgagcacgacaaggagttccgaaaaaaatcaacgtaggcagcatacagttggaaaacagatcatcggagtcgacgagcacgtcgtggatacaacgtgggccgacgacgaggtccatgacgagcgttagggataagcgacggtgatgagctcggcaagacacaagggccgagcgacagcatccgcgactgcgcacgggaaagccggtgaactccacgaatcaggggcaacccggcgcgacgatggttcagcggataaccgtgaccagaactgg

SEQ ID NO: 38058 - DNA, 494 bp, Zea Mays
gaacgacggcggtcggcactatagggaaacagggacgcacaccaaaatcccgggcgcgacgcggccgccatggcgcacaagaagctgggcgagtagggagccggggacgcgtgtgggagcaggggcctcggcagagcgtggcgagctgagggagctcgggctgggctcgcggcacgagtgagcagagcgctcggacgcggcgagggcgcacagcctggcacagagaacggacagggaggcaatggcttggggactcacgcgacatgggaggagacggtgcagtcagatacgcacgccgacgagccggaggaagccgacgatgcagcagcatggacggcgaggccgcgaacgagctgctggatgacggcgcccggcgaactccatgacacacgccatgcataggagtaggggtggcgaggtccggcctggccaaacgcagggacgagcaggggaccaaagaactacggtggagcttcaccacgacggggtcaggg

SEQ ID NO: 38059 - DNA, 358 bp, Zea Mays
gcttatctcctccccgcgcgcagctttttcctgctcagttccttgccgcgccgccgccgagttccctgcccgctcctttttcagctcccagtcgtcgaagctctctgcgcgcaggggcttcctagccatggcagcgcccgcctccctgctcccagcgccgcgcccagctgcctctctctctccctcagcgcgcctcccctgcatcgcgcgctccctgctccaagctcgccgtcaaagctcccctgccgcgccgcgcgcgctgctccccgagctcgcccaaatcagacagttccttctctgctcctccccgtctccttcctctacctccaactgctttcccatggcgttcagtgtttct

SEQ ID NO: 38060 - DNA, 1101 bp, Zea Mays
atttattcatgcataggtttaattttgatgggatccaataggtcaccctagtctgtttatcttttttaccttgtttatctctgaatcatttgattagttatgttgttgctttacatggttttgggttaatatttcattatatccatgttccaattattctgttatattatttatgttcatgtcaagatcattaatgttaattggaacatggagcttaacttgagaaacacgtgccaccacaagggtggaatgggacgcccttggctaactaattaggaaagctagtggaagactaccttacccaaaaggggcaagggcagtaagggagttgcatgcaaggaggttctcgggttgattttgctgtgatgacggtcagacgggggattcttgcaagtgctcttcccataaactgtagcgggttttcggaagctagtggaactttgtaaaggcctcgtagtggatccctagccattcacctcggtagtgtctaagggccttgcaaaccctggcgacatgggatacacgacttgtgggtacagggtacaacctctgaagagtgtaaaactggtatactagccgagctcacgatcatgagcagctcaggactctcacatgattaatttatataacttaaattcaatttgtcatttgcatttgcatgggattatttattattaattttgttctattatttattatggttcagtatttacttacatttagtaattgctaataaattttgaccaacttattaaaagtaatgctcagctttatcccctattgttgatgagcttcacacatcacatgaactcccacctttggtgagttcatgcatattattccccacaacttgttgagcgatgaacatgtgtgagctcacccttgctgtctcacaccccccacaggagaagaataggtggttccagaggagccacatatcgaggagttcgatttgatcttggtggcgtctcctagttgactttctggcgccaaggatggattttagatcctgttatatttatcttttattttgtaagacttccgctatgtaataaatactctgattattgtgacatttatctctatacactctgtaattat

SEQ ID NO: 38061 - DNA, 195 bp, Zea Mays
ggcggctgggagagggaaccagggcagcggcggttagggttagggcagggggcggccggtccctgatgggccagggttagttaggttttgttttttttctttttttcgaaatacatatttaaatactcctaaaatttatacaaattaacccaaaaatatttataaatacaatatttatttttgaataataattat

SEQ ID NO: 38062 - DNA, 448 bp, Zea Mays
atttctattgcctacactctaatattcagaagtattggattctttcataatttgactctatggtgatgctttacttgcttgcattatactgatgctcaatcatatattgatgatgattatgattcgagtatgattcatgaggttaattcacaccctgaaggtaaatgaagtattatttgaggttggtattgtatctgaaggtaaatgaagtattatttgaggttggtattgtatctgaaggtaaataaagtattatttgaggtttgtattgtatctgaaggaagtgaaggttgttgataaatgcagcatgccatatacattgcatgactcatttgcatctgaagttttgtcgtgacctatggtccgaccgtaccggtacaatttagcatcgtacgttgcccgaggaggggtacgatgcggcttcatacccttagaggtatgaaggcag

SEQ ID NO: 38063 - DNA, 224 bp, Zea Mays
ccgccccctctctcttcctctcttccactcttgctgccgccccaatccctctccttcttccccaagtgattgcagcgccgcccctcaaccctagccgcccccacctcttcctcttcaaggtggagcctccccgcttggtgtccgtcatgtgggtgcgagtcttccatgggagtttggagggaggaagaaggaataaaagaaggaggaaaggaggaacccaaggt

SEQ ID NO: 38064 - DNA, 750 bp, Zea Mays
ggataagcatcaaggtaaagatcaagggatgacaagggttaaggtgataacagacaaacacccaaccaaaaatttattttagaccaaaacttgcaaggtgtcaagaaggggggagcagtcaatgatgaataggtgaggcattatcctcaaacacggatggaaaagaggaggcttcaaaggatatgttcgagataagtaggagggtaaggacatagataccacgagggttttaaaggtaataacggacaaaggtgtaggataggaggtaaataagcataagacaaaagatattagtaccataaaggatggagttaagataggtcctgcaaataaaaaaatgagagggtacgtccaagggccggataggtaaactgccactctgaaattgaggtgaaagagagaagatttttttaagagcaagaataaatataagtgtcaaggcaagaccgatggatgacaaggtaatggtgatagcaaataaaacacacaacaaaggatggaattaagacaagacttgtaaggcgacaagaattgaaaagaaatcaaaggagagatgggtaactcacagctctcaaactgggttgaaagaaaggggaggcttttaaaggataggttcaaagtaaacatttaggtggaaggtctcaatatcacaagggtcaaaggcgataatagacaagggcataagggaaaagacgaaagcacagaagagccagtggtatacgtacaacaaagaatggaggtatgtcaagg

SEQ ID NO: 38065 - DNA, 1070 bp, Zea Mays
aaaaaatgttgaccaaaagttaatctctggtgcgtggatgaggtaaagggttgtgggccattggatgcaaagatagaagtcatctgaggcgtcgtttctttctcccacaaaaaccctaggtggccaccccttttttcccttcacccccctcttggccgccaccccctttttctaccccttggctggacgccccctccccctatggcagccatcctccattgcttcctcccccaagatctccccctacgtagcaaggatcgagaaaaggaggggcacgttgaattgaagaggaagagaggatcaaggagatgttctttcccatctcctcttgaagatttcttggggaaaccctaggtatggatgagatccttgttcctccctgtaattataggcttttggaggttgtggatcatgggaattaaaggattagaggttggatttgatgtggggttaggttttgatctcgaatttagttttctgcagaatggcagattcgacagtttctgttcatgccagttttccgtggtcttagtggcctcaaaaaaataaaaagtctatgtatgagtcgtagataatttgtagatctttccgtggccgcgaagaacacctcaatcagacatccgaccagaaagttattgcagttttactatagcagtttttcagtctcataattctgtgcagaatctgttctcttaagatttaggcaattttatcaacagaattaaactgtgggttggtaaaagaagttgtagataattttataagctttccagattgttaaagagtgcattcatatgatttgtgaaactccagttatgtttgttttactgtggctgttcctgtttacctgacaaaaatgagtgggtctgttcactggtgggtttcatctagtaaatggccgaattggctcttccaactatggagacttttgtagagggataaacgttcttacttccagcagaatttcataatttttggttcaacagttttggagatatcgaattttaaagttaaccatactgctgtctaaaacagattcagtcagttatcttgtcagatgttttagaact

SEQ ID NO: 38066 - DNA, 281 bp, Zea Mays
gacggatctatcaccggggcccgcaagtcggcgagcgagcgccaacgcacaaagagggcaaagtgggtcgcgcggactctgttggtgggctagggtgaggtgaagccggcccaagcgtcgtttctttcttccttttttattttttttattttttagttttcttttccctttttgtttttagagttaaaatttgaattcgaatttaactatgaacttgtactcattttaaatatacaaatggagcacagcaatatgggtggattttatttatttatacattt

SEQ ID NO: 38067 - DNA, 213 bp, Zea Mays
acctagggttttccctaagaaaaatctgcaagagatgggggtagcacatctccttgatcctctcttcctcttcaatccatcttgttcctcctcttctcgatcgttgttgcgtgggggggagatctagggaggaagaagtattggagggctgctgcaatggggggagagggggcgaccaaccaagggggaaaagtgaggcggccaagaaagggg

SEQ ID NO: 38068 - DNA, 168 bp, Zea Mays
caagcaggaaatcgggcccaagcgagttttctttctttttttatttttattcttttccttttccttttcttttcttttcacattttaaatctccattttgaattcaaacttatttgtgaacttcatacctgagttaaatgcctacattcaattattattagggacaga

SEQ ID NO: 38069 - DNA, 830 bp, Zea Mays
cccagaaacaatttcagtacccttttgccaacttgacgcaacatcctcaacaacatctaacataggtggatcagattttgctggtggagaacttattgtgacatgagtaccagttttttcagtaagcaacccattagggtgtggtttaattgtataatattgggactgactagataccggaggcgctacaattgatctgatacatgtcatcgcttgcccagactaagttctcgctgcagcgcatgcagagggactcgatctcgtggagaggcaagatgtgcgcctcctcgccgacagccaccaatggagaaggaactcgagatagaaaaaataaaagaagaacaacacctatgttcacattggattgctctcgcctcggcgtgggtccacaccaccgcgggctcaacacgtccgttgacggcgtggaagcctccgcctcggattcgccgagccacctcgccctcctctcgtgctctatcaatggcacaggcgcgcatccgatgacagtcctgtttggggccctatgcgcggcagctctcgcctctgattagccgtcttgcctcgtcctcctctcgctccaccaccgcgggctcgacacctccatcaacgacagtggctatctcggacaagtggggaggaggcttcatggtggtgacaatctcgggtgaggcgactcgttgttggagcccgggcatcacgagggacaatgcaggcgtacagggggtggcgggcgtgggcctcgcggtcgtctcaagcggctcacacggggagcatctcacgagcgagatttctagtgatagggatgactcgtaggtgggggcacgggcgag

SEQ ID NO: 38070 - DNA, 2663 bp, Zea Mays
caagattgcacagatgccacaacaaacttcaccagaaaatgggtaaccccgaccccgaccccgagtctttcggtcttgcccacgctagggtctataaaaccagacgccgagcaaccccccatcatcccctagagccgagagcaaacccacccggcgccatagtagaaacagagaaagagcatagagaagcagtcgctatgatagattcacgtatggcagcgtcaggccctcggtgtgcgcgcagaatcgttccacggagggcaccgaagtggggagcagcgtgcgttaaggcgaatggtggtcgggcatagaggaattcgtcgccggagcatgccttccagtgccgaaccgcagaacacgtgggtggggtgcctcgtcgtcccaactccaggtaagagagccctagaactactcgccttagtctcagcaatgtgtagctaagtttcaatttgaaggggattcattgagggagctcatagtccggtctcggccatggcgcctccatggtggcctcggtccgaaggcattgaggggaataagggagagagagtaggagtcgtcgatctcgatctgatcggtcttgattagataattaggaccgcttcgaagggatcaaatatagatctcagatcgtacggattggagtggatcttggtgtttaaaatctagcctgtcgatctttgatcctgcagatagcgttgcgtgctggtccaaccttaggttcgatctaatctgagcggttggtcgttgatcggatggctcagcccgtctgatacccttttgacctcgtaacaaaaaagccctcaacttttggttaaacaaacccgccgtcctcagccattggggattcttacatctaggtccctgaaacttgtaaaacatcccctgggtttataaaggaattgtagaaactgatttatagtataaaaataattgtagaaggttagaaaaatcatatcttccgcgtttttactctgatttgacatgttcaagttgcgttagatttgtaatgggattgcctagaacaaagagggggaatgacaatgtttttatcgttgtcgatcgtttttcaaagatggcacatttataccctgtcacaaaactgataatgtttcacatgttgttgatttgttcttcactgagattgtgtgtttgcatggtgtgccaaatactattgtttctgatagggatgctaagtttttaagtcatttttggagaaccttgtggtttaaattgggaacaaagttgctgttttctactacttgtcatccccaaactgatgggcaaacagaggttgtcaatcgcactttatttaccatgttgcgggctgttttgaaggataatttgaggttgtgggaggaatgtttgccacatattgagtttgcttataacagatcaatacattctacaaccaagcttagttcatttatggtagtatatggttttaatcctcgtgctccaattgatttgctacctttaccaacttctgaaatagtgaacttggatgctacacaacgttctgaattcattcttaagttacatgaaacaactaagttgcaaattgaaaagatgaatgaaaagtatcgtattgctgctaataaaggcaggaaggaaatgaaattggaacctggtgacttggtgtgggttcatttgagaaaggataggttttctgatttgagaaagtctaaacttatgccacgagctgctggtccttataaagttcttgcaaaaattaatgataatgcatatacacttgagttgcctccagattttggggttagtcccacctttaacatttcagatttgaagccatatatgggtgacgaagatgagatcgagtcgaggacgaatccaattcaagagagggaggatgacgaggacatcacttctatacatacaatgaatggaccgataacacgatcgcgtgcatgacagctaaatctccaggtacgttctaccctagtcaattgtgtttcagagcttacgcttggggccatggatgttttgatgattaggaaccttggagagaaccagcaaggacttgggaaaggccaaggtgttgagtaggaggagcaagggcgcccacaacaggaaggagatcaagtccgactcggcagcgactccatctcggggttcaggaccagtctgcactaaaatgaacgcccaagatgcatctggactccgattgcgacggaatttatatggttggaacgataaaaagattatctaaccaacccaactggttccaccttaaaattcatccggagtcaacgggaatcgtcgaaaaaaattcagcgttcagattctgttttaatgctgcgacaccgtctgttgggccattgggccgtgtatcgcgtcggagcccattaggagtgagtctaggggtcacgcacgccctaatactctatttattcagcagccgccgccacattaggtttgggttttgcttagatcaattctgtcatcgaatagtgttgtcgtcatcggtttgtgagaccccatcccataatcaatacaattttggttgcgtttctttcctgttcttgcttgtgttcttgattgcgcttgcagggataagccttcgtggtgaggtcactcgtgtgtcacgggtgataaccaacggagccatggtgtagtgattgcgaggaaccgtttgctcagag

SEQ ID NO: 38071 - DNA, 298 bp, Zea Mays
tttttttgcatgcctacgtgggagaagcggaggagcacgcgcgcgcaaacacctccgctccgctcccctccccgctagctgttctcctctggaattgctcctgcaattgacgcgcggtgaaaaaaccgggaggccagcagtgaggattagttaaccagagaggagactctggagtgtggacagccggcgtgggtaatcttttttgtactaggcgccgtgcgatttatggcgatccacccagattaattaacctcgttcgtctgaccaagtcgacgccgccgttgacatgttgggcgtt

SEQ ID NO: 38072 - DNA, 1226 bp, Zea Mays
caaataacaccggtgctccccaaggtgaggaactcgaacgaatgtaccccgcttcttgtaacttcgttaactgcttcttaagctcctttaactcttctacaaccatcctgtatggtcgcttagaaataggggcagttccaggtaaaagatcaatcacaaactcaacttccctatctagtggcatccctggtaactcctctggaaagacatccggaaaatctctaaccacccggatgttgtcaccaacaaactcctcaggtataaagaacattgcacgcatggatgaggtggttactgcaatattaacttgaaatgtttctcctttaggactagtgagctctatagtacccctaccacatgctataatggcctttgcctttcttaaccatgacataccaaggatcagaactatactgctggcatctaatattatagcagtagctccaaattctcttcccataattgataatgtcaatctacgtgtcatttgatttgcctcaataggccctttaggtgtgattactatcattggttttctcatatttagcaggggtatctcattagtgttggcatatcgagcagacatgaatgaatgtgtagcaccagaatcaaataatattgttgcaggaagggcattaatgtaaaacataccgagtacgatgtcagcaccatcaggagtatcatcaacgctgacttgattcaccctggctatagaatatcccttgccaggagtctgttgcttgttcttagctagtgtaccagaatttcccatcggacaagcattagcatagtgcccaatctgactgcacttgaaacatgtagggccggtcttctgtcctgtaggcctcgtcggggtgccagtgggagtagcctgacgagtaggtgtccgtggagagccctgtggagcatactgaactgggcgtggtcctcctggtcgagtcggtgtaccctgtggcggtacgtagcggggacgaacactgctgctaccctgtccttgtgagatagccttcctcttcaaatcacccagttgaacacgcttgtgttcaatagcaagagccttatccagtagcctctgaaatgacggaaatgtgtgtgcaaccaatgcatactgtaagggtccattaagtccttcaataaaatgctcctgctttctttcatcctcaacaacttcctccggagcatatctcgacagctgaataaatttgtctctgtactcactgaccgac

SEQ ID NO: 38073 - DNA, 3626 bp, Zea Mays
aggacctgtcagacgacctgaggcatagagaactttctcccggtctgagcattgggcgatgttgagcatcttctcaattgacttcaaccaatcatctgcatcaagtggatctggcgaactggcgaaggtcggtggcttatgactcataaactctcggtgcttatcacgaggtggaactggtggtggtggtggaggcagtggtacttgttgttgttgctgctgttgctgttgtttttgcatttgctgttgcagctgctgttgttgcgccctcctttcctgacgtatctcttctcgttcttggcgcagctctcgacgtatatcctcccgctcttggcgcatctcctggcgttcctgctgcatctgagcacgcatatctgccatagtgtccgccatctgttgcatcatcctcatctgagctgcaaccagtgggtcaactcctgctggtggaggcggtggtggaggatccatctctactggttgtggctggggttgtctaaatatcctccgagtgtgtcgattgggaggtaaatcaattccaccaccccgcctggtattgacatctgagttagatacatatggtaagagaatagtagacaaggcaggtatttacaaatcaggttactttgggggattttattagctaagcagattaatatcttacctaccatagctaattcaataccttatggtggtacatgctaagatgtccatctataataattcaatcaatcaaagaagcaaatcaggcatttatcatcagcacaatcaaccatttttttaaataaagaaaatagttttaaattttgtcttgggttccctatctcttaaaagatcatagtggtaggatttcaaggtgtgaaacccatcttgtcttagaatagaggaggtaagaatgatcagagtagaacaacaaaaggtgagacaagatcaagatgagatgagtatagaatgagtcagagtaaggtaagtaggaaaggtcctgtccatttctatctaggtttcgtcctacagtcgacatttcctctgataccacttctgtcacacccggttttaaggaacaaagccgggtgcatcttatacatgtgccaaacaagacaacatatataataacatagtgtatagagataaatgccaaaatagtcagagtactttattacatagcggaagtcttacaaaataagagataaatatcgcaggatctaaaatctatccttggcgccagaaagctgactgggagacgccacctagatcaagtcgaatgcctcagtgttaggcggctcctcttcgaccacctgttcttctcctgtgggggggtgtgagacagcaagagtgagctcacatacgttcatcgctcaacaagtcgtggggaataatgtgcatgaactcaccaaaggtgggagttcatgaagtgtaaggctgataaggaaataaaggctgagcattgcttttataagttggtcaaaattttattagcaattactaagtgtaagtaaataccaaaccttaataataataaagaaaagtaatagtaaaataatcccaaatgcgatgcaaatgtccaattaaatttaagttccataagttaatcatgtgagggtccgagccgctcatgaccgtgagcacggctagtataccagttttacactctgcagaggttgcgcatctttacccacaagtcatgttacccatctgccaagagatggccaatcccatacacctctaccgaggaggcgaggcagggtaacactacgaggcctttacaaagttccactagcttcagaaatcccgctacagtttataggaagctccaatgcagggttcttgtctgaccgccattgcagcaaaatcaaccaaggacctccctacactgaccactcccctactgcccttgcccctttcgggtaaggaagacctccactagctttcctagttaatcagccaagggcgtcccattataccattgtggtagcactgttttcccgggtggtcgctccatgttcccattaacataatgatctttacatgaacaataataataaaagagaataaaagagtaattatgaataaagtatcttcatacccaaatccacataaagcaatagcaggtactacccaaagaaatatttcagtggtaaacaaggtataaagatagccaaaactagggtaacctattaggtcccatcaaaattaacctatgcagatcattataattaataagaacatggctgggaaaaagtaagtgatcaagggcacaacttgccttcaatgagctcctgctcagctatctctagaacctcagattccacagtggcttgctcgtctactcgtatcaacacaatacatacatagtatagcaaaaattaacattgcaccaaacatgtgactgaaatacacaataaaattctacacattaaaataagaacctaggaacaggaatcataattttagatttatagattttaagttatgaatttcctaaggtttaatgtgattaaaatagagttaaatgacaaattaattttcttactgctttcatgtcaaaacagagacaataaatgatagagaatattattacaaaattttagaaattggaatggctcaatttggatcaaaaatggaatttctatgaattttacaagtttctagatttgtttttgtattaaaaacgaatttctaatattatttctctgtttttaatctcctctggactgggcctcgatttccagagaagtcaggggcccaggcgcaataataacccagacacataacactgcagaggtggatggcgggttggttttaactaaatcgaggggcctttgtgttaaactacgcccgcgaaggggtatggaaaggcttcggccgttggatcaccagtgtgcggcccagattagatcgctattcgctacgaagcggcatggaatcgggccatcggatcaacgttcaacggttaagattaaaatacacccgatccgatccagtccatacgtcgacgatccaacggtcaggacgagatcaggccgaggcggtgaattctacctaatctacaccgtccatcctcaatcagacggtcgacggtcatttccttcaaatgctaccgacggcggcggcgcaatcccacgcacggcggcgccccggaccggaagatcaatccgcgccctcaggcggccaccacctaattcggcctagctacatgatgtcctatatccgacgaatgcaatgaacggtcgagtacctcacaattagatgcagacgatcccgtccacggcgagcggcggatcggttgagctccggcgaaggattgcttgcactccggtgagtctacgatcacagcgacgccacaccagtatccccccacggaacaaacgaaggcctaactctgatttccgaggcgaacgcggcgacgaggacgatgttcaccggcggcgctctgtctcctttcttccctcacctgtggcggctatggtggtttaggggttagcgacgcgagaggcctaggagctgtcgcagcgaagaacgatcgtggcccgagtcttatcaccctgcacggtcacccgcgtcgtgcgtgcgagaatcgcgccagcggcacgtctgccatagtcgcgttccattgagaggaaggcgctgac

SEQ ID NO: 38074 - DNA, 11165 bp, Zea Mays
attcctttcacttttctttttcaaatttaaattttcatttcaccttttagatttcaaattcaaatttgaatttcagttatggatttgtacttatatcgaatgtgccaatttacattcggagttgaagagaatatatctatgtgtaaatttattccctatgttttatgtggtatttcttttcttttcaaaaccctattttcaagtttagggtttaattcaacttctagtaattattatcttattatcattattattttattgatgtgcaatcatataaaactccaacttgatgcatgtcccttttatttcggtatcctttgtttcgattcatcattaaattttatgtaggctctttgaagatgcaaatgaggcacacaaaattgaggagatctctctattattctttgtatacaactttgagtattacacatggtatgccacattacctcctaattctattgtgtcatggggagatttagaacaaaaattccatgatcactttttctccggtgactatgagttagatttagtagacttggtggccctgcgacaagtgaaagacgaatcggtcaatgattacatccggagattccgggatacaagaaatcgatgctttcagattcatttggtagaaaaacagctagaaagattagcttttaatggattgcgatattatttaaaggaaagattagaaggcatccaatttttcacgctagcacaattacaccagagagctttggcctgtgaaagtcgaagcaaagagactgccaaaaccattcgtcataatgtccatatagtagagtgcgaccaaagtagctcagacaatgaatcaacagaagtgtatgctgctgaaatggtttggccaaagcaggcccaaatcttcggcttgttcctccttgcagccggttcaaaagaaacgacaagaggaggttaaatttacatttaatgttggcaaatgtgataagatattcgatgaattactcaaaaatggcaacattaaaataaatcatattgttccatctgccgatgaactaaaacgtcgtgcatactgcaagtgctataactcattttctcatgccactaatgattgtaatgtattccgtcgatagattcaatcagccattaatgaaggacgattgaaatttcaggaaatgcaggtagacatggagccctttccagtgaacatgatcgacttcgtgggcaaaaaggtcataattcggtctagcacaaccaataaggaaaagggccaagatgtcatcatcgacaacgcacgggaggccaatgaaggtaataaagtttcctgcaggaaagtagtggcggaaaagactcctgatggaggggagaccctgaaggtgaccatcacaacctccgtcactagggggcaagcacagacaaagggacaagcgcgggaacccgtgctgcgcatcacggacggtctggcatccagacgcggacgatccgaagcttctccggacggtccaaaacattccatcgaacggtccagctacactcaagactcacaacgaccacgtacattcaaaccacgatgaccagagataggtacatggaaaacaaatacatttaaagcagttggtcggctggtcaaaaccggcccgaccttcgttcaattattatccaagtatgtgaaaaagaaggccgaccctagtgaccggccagcaaagcgacctcgctagcccattcatgagcaacatcaagtaagaccgattggaccacctcaccaattggaaaaatggaaggtcatactatctagttgaggcctaacatacctacatggacacctccacccccatatctacctatgccatatccatatacatacatacctccaccatatgccccaaatcaaatgtggggcatgccaccatatccatttgggatgccacagtaccccgcttgggggcacccaaacatctgtattcaacaggttggcaccttcagtacacgaccgattgagcactgctcaatccggtcactagatgcaagcacaacaagattgccggaccagtcgaccacagaggccgatcaatccagcaggggggcatatatctgcagcaaccaaaagaaccacaaaaaaggacatcatcaaaataggtactacagatgtcgtcatacaggaaaataatgaagggccgatgatttttggtgaatcggccaacacaaccaaaaaagaggatacgactgccatcaaaatagctgatccaaaatgctccatgcctcgatggtgcccgtcaggattgacacgatcccaaaagaaaaaattacagcgcttaagagcaaaggagaaccaggagaaggaggcgggaaaaaaaattaatgacacacatccacagtaccccccatcgcaaaagaggtggaggccaaaggccgttgagatgaatcaaacggccacaaagacagagaatgagatagcgactccacagctccctacaggtacgacagacagtccggctataaaagcactacaccaagatacctccacagctccccaaatctgcagatgacacggatcgtccgacccttgagtccggaccatccgcactacaccaggatacctccaacgatgtgctgacgcccatggaggaagacgacctactaggagaggacctggtcgactacgaggcgtctctagagcgcacaggtatggacataaatgtgattacattttccaccgattgtactattatcggcgacgatgaacctgtcatcgctcagtttgactttggtcataaagaagccgccttcactaaaccaaaggaatcggtaaatcatttgaagccactcttcgtgcacggtcacattgatgggataccgattgctaaaatgttggtagatggggggcggctgtaaatctaatgccttattcattatacataaaactaggtaaacaatatgacgaacttgtcaagaccaacatgacccttagcggcgttggaactgatagttcgatcaaagccaagggagtcacgtccgttgagttaaccatcgggactaagacccttactgctgcattcttcgttgctgatgtagaaggaaattacagtctaatcctaggcagagattggattcatgctaatcaatgtgtaccttctacgctacatcaaatgttactacaatgggtaggcgacgatgtagaacaagtacatgctgctgcatcggccagtatcgctgtggctgatgcccctgtactttggaccctatgagactgctacatgtctcacaggagtagatttttctgattatcagtttataagtatagataaaaagggtttcattcctataatgctagagccgatggagaaatcagctaaatcctaaataaagtttaaatgatgagtacacacaaaatgcatgagtccctggtcacggatagttcggcttctaaggctggatggtccggtctttcacaaaacagttcggtctttaagaccgaacatctaccatagcataaagtcagtatcacggatgatctggccctcgagaccggagagtccgccatcacacaaagatcatctaattcctctgtgggagacatgatagagggattcagatatctcgacaaattaggacaagggtttacatcggccgatcctttggaggaaatcgacataggagatggtaaaactccaaggccgacttttgtgaataagaccatggagaccgatcctagagatcaaatgatcggtctattgaaagaataccctgattgctttgcttggaattacactgagatgccgggattaagccgtgagatagtagagcatcggctgcccattaagttcggtttcagacctttcaagcagaaactagaacatttcgtccagaccttctcccgcgaataaaggacaaaattcaccagctgctagaagctatttttattagaccttgcagatacgcagagtgggtctctaatattgtgccggtagagaagaatgagtcaggtaagctcagagtatgcattgattttcgcaatttgaatagagcaactcctaaagacgaatatcccatgcccatagccgacacattgatcaataatgcgtcaggaaatagaattattagcttccttgatggtaatgccagatataatcatattttcatggccgaagaaaatgcgtctaaaacggcctttatatgtctaggcttcattggtttatttgagtgggttgttatgacatttggtctaaagaatgctggtgctacttatcaaagggctatgaatttaatctttcatgagctgttgggtgggaaacacagtggaagtctacattgatgatattgtagttaaatctgttgagtttaactctcatatagctgatttacgtaaagcctttgaaaaatgtgtcggtatggtctgaaaacgaacccacgtaaatgtgcttttggagtgtcggctggtaagtttttaggattcatcattcatgaacatggtatagagatataccctgatcgaatcaaatccattcggaatgtgggacctccaacctgtaaggtcgaagtacagaagtttctcggcaagataaattatttgtggaggtttatttgtaacctagccgggaagattgatgccttcacccctatccttcgacttaagaatgatgttgaattcacttgggggacagaacaataggaagcgtttgatctcatcagaaagtatttgtctttggctcccgtattaaaagcaccacaagtgggagtaccgttcagattgtatattgcagctgaagataaggttattggggctgttctgacgcaagtgactgaaggaaacaagcatgtggtaacctacctaagccggaggctggtggatgctgaaacaaggtacacttttatcgaaaagttatgcttatgcctatttttagcatgcaccaagtgtagatgttatttactgtctagtcattgcaccgttgccagtcaaaccgatgtgattaaatacatgttgcaatacccgattatgagtgataggattggtaaatgggcttatgcacttatagagtatgacttggcctaagaaccattgaaatctatgaaaggtcaggtcgtagcagattttattgtagaacatcggatcaatgatactcataaactagacatatcatacctcactgttactccctggactttatattttgatggatcagtttgcaatgaagggcaaggaattggcatcgtgcttgtttcaccaagtaatgtctccttcgacttctctagccgattgaaaacttattgcactaacaatcaagccgaatatgaggctcttttgttcgacttggagcttttaaattatttgggagtaaaacatgtgaaggcatttggtgattcttagctggttgtctaacaggtattagaagaatatcaatgttttgatggtactctaaatagttaccttgaaaagtgttcgggcataattcattcttttgacgaattcagtattcggcacatctctagagttgagaatcatagggctaacaatttggcacaagatgcatcaggttatccgataaagcgagggagatttcacaatactgaaaatctgataaccggtatagggccaatcccctaggtcgcggaccgtccaagtgaagacttcggactgtccggggttgctagtaaagttctcctgattgactcggctgataatgaagccgatggaagtgattggaggacacccataattaattatctacgaaatcctagtgttaggacgaataggaacgttcggtgtacaactttcaagtatgttttaatgagtgatgaactataccggcgaacagtcaacaacatccttcttaaatgcttgggcctaggtgattctatattagccatggccaaagtacatgaaggaatttgtggtacccatcaatcggttctaaagatgaagtggttgttgcgaaggtctggcttctattggcctaacatgatagctgactgttttaagtactacaaagggtgccaagtatgtcaaaaaaatcggcgacttacagttggtccctgcagccgaattacatcctatcatcaagccttggcctttcaggggatggggattggactttataggagaaattcatccttcatcatcaaaaggacatcagttcgtgttagttgccactgactactttactaaatggactgaagtcgttgctctaaagaacatgacacacatggaggtaattcagttcataactgagcatattatccatagattcggcattccccagactttgactacagaccaagggtcttcttttatgtcaaaggaggtatgtgagtgtaacacccctgatgttactgttactaaaacttgagcataacatcataagaattggcatatcatgtgtttgtcacacctagagtgcattcactatgccaaaaatttcaaacaagttgtattgatatgacattttgtagataaaaccctagagtaggctacctaactctagattgggcctaatagagcatagaaatcttaaataggagaaaacttcaaaactcaattgaagtagtcataaaatgtcaccatgaatagacatacatggtattcaaaccctagaagcaccaaaagccctaaatagaaccctagaaagccctagccttaaaccctagggggctaagtgtaaaattagtgcacttttggactaaagtgcaaaaaccatgaaagtaagacaccttaagtactatggttcaaaagaatgtggatttgcaacttaaaccttaagttttggacttatttgcaaaagccacacttatacttaaatggctaagtctgaaattagtgacattggctcaactttgaagctttgtaacttccaaaccataagaactttgccctaggtcaccacatcaaattggtagagctatgtaaggagagtaactttgctacagatattatgcttggtttacataagaaatttggagaaaatttgactccaagttgacctgtcaggctgtcttaggtctgaaatcagactcacagtggcctagaactaggtttgagagccattttgagcttgatctgttgctcgtttggtggttgttgctataacaaaattgcagctggtatgaagggctgcaagtttactactggcaaattagcaagttcttatatagaaatttgtgttctgggcgctacaagttggactgtcaagagctacgaatcacagttccgatggtacagtgtcccgatcaggtcgccagctctatccctcgccgccgacgagccgcgcctggattcgtgctttcaccgccgtgattcgtgctcggatcggttggatagcgcttggggttgagtaaatatcatcgccgtggatatactccggccactaaactactccgaccaccgtaccgagctagtcacagatgcttcagatgtgttcgccggagacagccgcttcacggccttgtcccacgtgcctgggcacatttatcgcattgccgtgactcgcttaagccatccgatcatcgccagggagcctgtgggggacagatatcccccgggtccactggaaggataaaagacctcacgaaaggcccaaggacccaataaattgtaaggtcatcccttcgtgggcctggggaggaacgaccagtgaagcagattgacataaggccggatcggtgcaagcccagacagcccaaatgacttcgagcaagtaatcacaacagtgacccgaccttcccgcgctggaaccccgtacaacagaaccaagcgaggatgggtcggcggaactataggaagatagacttaatcggttcactatttcttaggtgcacattgttatcatatctacatgtattgcccccacggtcgagtatataaggcctagggggcaccctttcagaacgatcgatctcactactcagccatccacctcaactctctacgtttcccgcactagagagcccccttgtaacccgccacataaagcattctcgccaggacgtagggtattacgcatttcaaagcggcccgaacctgtaaaccattgtctactgtttctcgggcatccagcacgaaccattgagctacagtcggtaacaccgtcctactcctaaaaaacaccttgaggggcaaccccgggtgtgcggtcggacccaaaacatcgacagctggcgcgccaggtaggggggtgtgtcgctgatctaagctagctcaatggccgtcaccttccagcacaaaatcatcctccgccccggatccgtgttctgcttcggaactatctcatctgtagaggatgaggaaggaactctacatcgcatcgcagatccgccaaggaggaagtctcctccaacaacctccgaaaatatcggggtgaagcagggaaaagcgcaacctccagcgctccgaaaaaagatcgccttcaacaagccaggagccaagggcccgctgacccagagaactccactgtctacctctccgacgaaagaatggacacaaatcgcaaggaagaaagaaacaaataaaaccaggaggaagcaagttgttctttctgtgcctctgccctcaaaggagaacagaaagaagatcaccacgacagctgcaccattctaccccgacgtcctcttcatcgggagagtggaatcgccctcgtctccgacgacgagccgactgcacccggagaggaacctcctcagcaggaatcccgccgacgaaggaaccaacgccgaaatatccagcgacatcacgaggccggagagcgggacccagagcagcctgtatcgcgagatgaggtctcagagataggagaaactccggaggaacgtgtcttcagggaacgaaggaattcccaacggcgtgatcgccgacgggctcaggaacaagccgagcaggaggcaaggcaacgtcaggaaaatccactcttcgggcgcaacctgaaccccgacttcgcccgagccatgaacacgccgagtgaagtcggaggggtgctggctcggatagctgatgggctccctcggactcccgacgccgagggctatcggcggctgttcactcaggcagccaatcaccttctacctctcgctcacccgccgaacgatctacgacacgccatcaacagtcgccgggacgcacggagctccgtcaatgcctcacgtgaacgacgacacgagaacgagaaccgccaccgggaagagtacgacagggaccacggcatcccagcccggagtcaggccaccaggactgagtcggcaacggctttgactggcggtaccacccggggacggtcgaggcaccacgacaaccactcccctctccgggacagacatcatccccgacgacaggaggacacgtgtggagtatctgcacttactccacgcctcagggccattcaatgacctcctaacttcaaggtatccaatgtcgacaaatatgaaccaaagcaggatccaggaggctggctggacgtttacaccaccgctgctcgagctgctggggcgaccgaggacgtaatgaccgcatacttacccattgtcctcgggcaagacgcgctgcaatggctgcgacatctaccccgacattgcatcaacgactggagcgacttcagtcggtgcttcaccgccaactttcagtccctctccgacaaaccggcgcaaccatgggacctcaaatccatcaagcgccggggggacgaaactctccagtcgtacctcaaaaggttccagaccatgagaaatcatatccccgtggtcgcggaggcggcagtgatcgaggacttctacagaggatctaacgactcggccttcatccgcaccatattacagaaggcgccgactacctccgagcaactgttccaggaagccgacctctacatcaccgccgacgagcgagctcaggacctcatcggaggagcgaagcctgcaccagcagcaccacgacgcgatacgaaccagcagcccgacaaacgctgggagaagaggcctcgcgaagaagttgacgccgccggaccacccgcctcttgcgcccggggaggacctcgaggaggcgaacgcacgctggacgacatcctcgacgctcagtgcccgtaccacaaagacatgcgccacacccttcggaactgcagagacttcaagcactccgtcgggcacggccgacccttccaacctctacctcctcctccgccacggggaggaccaggagaaccgcgacgaccccagcaacaggaggatggaggcggtggagccttcccgcgcgtcgacagagaggtcaacgtcatcttcggcggacacggatcgcaggagaacaaaagacaacaaaaggtcaacgatcgctaaatactggtggcgaccaccggtcctcccgctccataccgatggtcggagcacccgatcaccttcactcgagcagatcagtggctcaacttcgaccacccagggaaatacccgctcctcgtcgatccggtgatccgagagagcagggtgaagaaggtattagtggacgggggggggggcagcatcaacgtcaccttcccccggacactccaaggcttgggagttcacatcaaagagctccacgagtcagatactcctttcttcggcatcgtgccgactgaaggagaatacccgctgggccacatctacatgtcggtcaccttcggaactccggataactacagaaccgagttcctaaggttcgaagtggcaaacttcgactgtgggtacaacgccatcatcgggaggcctggattggcgaaattcatggccattccacattacacatacatgatattgaagatgccagggccacaagggatcataactgtgcatgctgacttccaaggcgccgcagaatgtttccgagtggccatccaggcggccctcaccaccaaaccatcggcgacttcttctgtgcaggcaaactctaagcctgaggaagacctcgcagtgcctgcgaatgaagctcaagccgcgacctctatgcggccgactgaagaaactaaaaggatcaacctcgggttcgctgatgaacgcaagaccgccatcatcagctccagcctggacgacaaataggaaagcgcgctcgtccagttcctgcaagataaccgagacgtattcgcatggcaacctgcggatatgccgggagtcccgagagaactgtccgagcacaaactgaaggtctacccccaggcgaggcctattcggcaaaagttacatcgttt

SEQ ID NO: 38075 - DNA, 408 bp, Zea Mays
ggatagatcaggtggtagattccaccgctggatgttctgtgctgtccttcttggattgctactctgggtatcaccagattagcctggcgaaagaagatgaggaaaaaacaacgttcatcactccattcggtgctttctgctatacctccatgccgttcggcctcaaacacgctggagtgacttatcagagagctattcaaacatgcttagccgatcactggggcaagcgtgtggaagcttatgtggacgatgtggtaatcaaaatagaaaattcggaaaatttcattgaagatttacagctggttttcaacagtctacggcgatatcgatggaagcttatgtggcggaactgcccgaattattccaacttaagtgcctaagtcccgccttagaggctagaccacactt

SEQ ID NO: 38076 - DNA, 4831 bp, Zea Mays
caggcagatcctctggtgcagactcgggggctggatccggggctacctcttgagcagctccttgctccggcacgaggatgtactctccgtcagcaaggttacagtctattgaatgcaatgaacatgtatgtcatgattatgcaggatttaataacgttatgctaaaaagaaactaagtcaagaagtaacttagggtttcttggttatgtggggcttctagcgggttagacttatcacctttaggcttaggtttttgttgaggataaacatagggaatttgtattgctctcgtatccttcagtggataagatgtaaaggattttagggtggcaccatttttctattatccacttttccctttcttttattttctacttatggtttctagggtaggtttgaactatgacaggggtttaatattttccaaaaattctgtaaaaagtacagtgagttgccatttgctattctagcctgttttaagaatttgaggcttaaagtacaaaggctaggctttaaacaaaaataacaagagttatgcaaaatgggccactttacactacatctcttagttaggggtgggttctgtcctaaaagttatttttgctggcattcaatagtgttggggacttgttctcaaatgctatgaattaagaacaaggcaacataaaatgttaaatgttaacgtccttcgtccacgaagcattattcctttgaggataatgaaccttggacgaaggttgatgagaatacgattatgaaggttaagtcttcgtaatcgaattttaatagattgtataagataacataaaataaagagtatcaaaggtaaatgaatcataaacgaaccatattatatttacttaatatattaaattattgaatacagttatacctctgccttggcaaagattggttcccgaatgatgcgattgcaattacaggaatgcgtgaacagtaagggaatactgttcactatttataggcacaggacacagcctgtgaggaattacaatcatgcccctcataaaagtttacaacattgacccagacctttatggactaaaaggtcattctatctttaagtcggtttgtagtaccgaagcttcatgaagaggaaccttcggccgtctcatacaaacagcttcagccgaaagctgcttcttcctacaagaccttcggcgacgaagcatagtcccaacagtagcccctttcgcggtgctagatcgtttttcgtaacgagcttgatccgtgaaaaaagtctcttaagcttcggggagccgaaggtccaaaaaacaccttccctgagctcgttgtcgagaaacgattcagttttccagcgcgtagtggtcccaccttgcagagttactgtttggtctctgcggtccaccacgcagcgagtgcaagcgggtgtccgcctggtgtaaaaatcctggcgcttcgccttcttacctgcagtactatataaacagacgagtaggtgtgaagttaccacagcattcattgctatttgcactgttttgctgccaaaatttttaaccatcgccgaagcttgactctcggaatcgaacgaagctccagcttgaagcctgcttcgtcagaagaaaaaacttcggaagaaaaagtatttaatttccacaaattcagaattaaatggccagagtgcgttctaccgctagggttgagcgtgaggggggcgaagctgaaggttcggagactgttcccatctccgaagcgatgcaacgatctgggctggtaacttcggaaaaaatccccagcgctgatgtagaacaagcagaacaaacaactgccgaagcagaagaagaaaacattgaggaaactgatcctgaagatgattatcgtattgctatgccaagtaaacccagccacttggacttcggaaagtctactgtttcgaaggctgatctctccaagatggtaaagtcgggttttttcagtgaaagccagaaaaagctattacgcttcgggggggaagaaactaccccaaagccggagaaagatgaaatagtcattttcaagagctttctaaaggctggattaagattccccctagatgggattattgcagaggtactgaagaggtttggtatctactttcatcaattgactcctaacgctatcgttaggcttagtgtttatatctgggccctccgaagccaagcggtggagccatttgcggacagcttttgtcgagttcacgagctgcactatcagacgaaggctaggaaagatggattgcatgacaattttggttgctataattttgcttatcggaaaaccacaaagtttcctgtaatcagctaccgaagcaaatgggcagcaggctggaagtcggagtggttctatgtcaaggttgatgacgacaagaagaagcttgtgcaaagtccacttgaactaatcttcggagaaacccgacctcgttgcaacatgacaccagaaggtccaacccaacaggcgttgaatgaattcagaattattgcagagcatatcagtacaagagacctggttcagtagtttttggctttcaaggtttttcctagtttaaaagaatgggaaatgccgaagctaaagggggagaagaaagaaggtgaacttgtgcggttaccttactatttcaagtttaagaaatactttaaaacaccttgccaagagtggctggatacaattgaagtaatgtgcaatgaaatactcggcaattattccaaaaaagaagatcagttgatgaccgcggccttcggcacccgtccgaagcgaagactaaatcgagtgctggacgccttgggttttgaataccctgactacgaaaacctgaataaaggtgtcggaggccagaaaaggaaaaggataaccgaagctttaaatgaagatgagaaagaaccatcaaagaagaaaattccgaagaaaaggaaaacgtcctctccgaagcaaaaagtatccgacgaagaagaaacccccacatcacactctgccactgacgtggaggaaaatttgaaggtaatgactgaatccctgcctgtgaagctaagtccatttgggcctcaactgacaaagttttttcagaaggaaaaggagcccgaaaaaacgaagaaaacgactaaagcaaaaagacaaagaatcatcggtgtgacagaggtcattgacaagacaccaccgagagcttcagctcagaagataccagcagctgagggaatgacaaatattgaaatcacaccttcggaggtcgcggctgccgaagctacctcaattgaagatttgaacttggaaagcacaattgaacacatcgacaaaatgctgctagacatggccgcagaagaagctactactaccgccgaagaggccgtggtcgcagcatcggggaaagaaaaggaaattgctgccgaagcttcagaggacgaggccttcatatttcaaaatttagttggagaaaaattgtcaaaaaccgaaatagaagagcttaaagagtacgccaaatcttgcggatataaaccaggagcactcctcttcggaggtattgatgatgaaaaattggactgtatccggaatcaaactggagctaaggttatcggtactctgtcaaagagtatcggttttccgaagctagaaaccgacattagccgctaccgacgacaacatatcgttggtagtttattttattccaatttcaaggtgaactatttttcccctgacttttattgtttttaatattgaaaacatgtctaacgaaggttgttttcgtgcagagtatgttgttgagcaaagctttgaaaatgcagcaagatttggaagacaagaaacacgaagttataattgaaaatttagaaagcaaaataaaggaacaatcagctgctattgaaaagaagaacttcgagcttcaagcaactgaaggcttattggcggaagccgaagctaaaataacagaactgaacacgaagcttctctgccaatctgggcagtttgaacaagaaaagcaagaacttaatgcaaaacttgaagccgaagttcaacaaaattcagatttgaaaaaactattggcgggccttcaagaaaaatgtttggaatttagcaacaaatgtattcaacgactgagaaaaattttccactcagttggagtgggcagtgagaaattcaccccgtcagctgaagatttaccaaagaccttcgaacatattgagggtgaaattgatgagcttgacgaagttatagccgggcacggtgacttctgcgcctgggtagcttctcggggcactgctgcagctttcctaaaagctggctgtgatcatggaaagattgtcaataggcccaatttcactttatcaccatcaattctagatgacattcctgatctcgcccgaagcatttccaatagattcgtaaagatgaaatggacaaaaggcgggcgagaaaaggctggagacgaagctcggagtcatcttgaaccagtaagaaatcataccttgtgcttacctcttccttcaagctcgattttgactaacaacaactaaattcatgtaggatgacgaagccgaagccgatggttaaaaagaataacgccgaagctgaagtcccttgaagattaaataggagtagactgtagacagactcaaggaacttttgagataacttttgtaaatgtaactgaacttgtctttaatgaattttgttcataccttgtaatatgctcttatccttccattaatgtatgagaggtgctttgatgtggacgaaattatctttttgagccgaaggcgaaaaaacaccttcccttcttttcgtacacagcgaagcatagaaaacaacatttcctttcttccga

SEQ ID NO: 38077 - DNA, 251 bp, Zea Mays
cagacttgcagcttcaaaaattcacaacaaaagattcagacatccaaacaaagtggtcctagactttctgaaaagctaattaaatgttctacaaattatttataaacatccctggctggtttagcatgtatcaagggtaaaatatactatgaaggctgtgctgtccaaaactggacagattcagtcttcacacttcaaacataggtaacttaatcttcagaccaccaaaaatagtgatctaagactttttg

SEQ ID NO: 38078 - DNA, 1521 bp, Zea Mays
attaatcgtttcttaaccttggctcaacttaatttagttaacacaccagtcacctaaaacagcacattgttggggtctaacctagaggcatctacatatggtgtaaaacttcataagacttacatttgctactggcatcaacaatacctaccgacctattattcaccatacgaacgcagttacacgccgcctactagttttttaacataatcctcatatagctcggaattccaactactcactaacaataaatcacgcacgaccactaccacatcgaccggttaatttatttggacaccacctagcgtaccacgagtaccccacattttgactcgacatataaacatagaggaggcgatgactacttcggcatgtcaccacctctctatttaagcaaagacaatttccacctacaacgactgaacattcatgtcgagcacactctattttaccgtgtctcgcatacaaccatgtggtggcgtgcactcgagacacatcgatcaacgtggcgcgactactaatatatgaactccgatactcatgttttaataattcatcctctacgcaactagcattttctaactactcgccacaacaataaatatgctccctatataatcatgaatcccgtcacattgcataaaacaaatcacactttgcgcataaccacatatcgatgcattccccacaacaaaatccgcattttgtaacttagttttcgcattaaacaacgcatatcatattttcctatcaaaatataaaaacagccaagttcctttcttcttcgttttcttctctacgcaaaattcaatccataccaacacaatttttaaacatgcaccacatcgaccaaaacataattagacaactacaaatcgcacgcatcgaacctcttgttctccaattgcaaacgcgatcctaccaatgcgcataatcgaaacattttacacacatgcattcaaaataattaatcgagtcgatcgagagcgatatgcatcggctcaccataaacaaaaccaaacggtgtttgtgaggacgatggcgattcggctttgtgcatcgctccgcacatcgacgagcgtcgagcggcttgccttctccacgcaaaacacggggttatctcctccacaaaaataaaacaaagcagcacacatacataattaatcataggaaaataatgttgatgctgaatcgaacaaggagcgtcgcggtctcaccggggtgaacgacgatgatgttggggctgcgcaaaaaaaacagcaaacactcgacgagcgtcgatggcgtgctgttcactgcgcaaaaacagcaaacacccgacgagcgtcgatggcgtgctgttcactgcgcagcaaaaagcagcgagccacgcggagacgttggggctgctgcgcattttgtcgagcgcctagcaagcatcaacggcgcaggcgcagcagcacacacacacaggaaggaaaccgagtcacaaggcatggagggaatgctccgcggcatctgctgcagcgcgccatgggagag

SEQ ID NO: 38079 - DNA, 3080 bp, Zea Mays
gaagaagacccggctgctgttgcgcgagggagaacgagtaagggaaaagaaggggcgtcggcatgggagatttttctgggcgtccatgggaggtggagctcctgctgcttccatggaaaaaggtagggcgcaggggaaagtggagccggctggaagaaatggcgccgtggagggagctgctgtttggaggaatggagctcggcggccatggagtttctgcccctgcgcacgcacaggaaacagagagaagaggttgctgctcggccacaccattgagccgaggaggaagggcgccatgggggctggccttgctccctgctggctgcttgctgccgtgggagccagggaggaagaagggcgcctgctgcagggatgccgagcgccggagcagagggccggccatgggagagagaccagcgccctgggaggaagggaggaagctccctgcgctggggaagaaaggcgccatggctgctgccgccctgcgcaaggaggaagaagggcagtggcggctgggaaaaattgaggggtgggagtgcaaaaatgcctccacttgctaggggagggctgctatttatagaggggcattagggctagggtttccttagtgggctgggccgggctggaatgggcttggcccaaaacatggaatcgggctgcgctaaatattttcccgaataaaaatgctcccgcggaattcgttggtacgcaaaacagcgtgaactagagttcggacgaacggacggtggcgtgattaactcggccgggagtgtaatttgatttcgttcaaaaataattccctacgcgtgattcgaaaaataaatcgtcctgagatttgatcggatttggatttttagtcggagaaggcgaatcgtgatattttaaaatcgctgtcgatacggggttctgaattcggttcagacataaggtatttggccgagtcggatgaaaattgattagaggacgatatattgattattccgtttgtgagtatggactcggattaaaatagttggacatcgatcgaacgtcgagaaattggattcggacacagcgcgaacagcaactgtcgagcgtttgattaatatgagctttagacgagatttataaatcgagattgaatatcgagattgcattcgtgccgaggataaaagttttaacaggctccaaatattggccttttgtgagactgagtaactccgatttcggtgaaacgtgaacgaataatctggataatcagggacatacgcgagcgagaaatagaaatttttttactgagcatccgagattaggattaatctcccgacataacgcgaaatagacacctggggtatcacagccttccccccttaaacagaatctcgtcccgagattcgaatgagggccttcaagggtggagaagcatgtaactcccaggctggagatagatgcaaatttatgagatgtgatctgacaagataatgaagatggaattggatagaatatcgcggcatgttgagacaaaatgcagcgatcactttgagaggatgttcacaaaagagagcacatcggtatagtcccataatggatcacgactattaaccgcggtaccagcgcgtgccgagcagctcaaccatgtgtgcaccatagtaggctctcggtttcgtcgcggcaccacccgtcgttagtcataacaccattaccaaacgtaaccaacaagaatttcacatagcataaatagatggagcccatgagagtatggctcagaaaatgtgactgaagttgaagcaaagattgttggcaaaagagcatcagatgagaatttttatttaactcagagaaccattttatgatcagcatagagattattagatcagacattaccacgagattcgatatgaggatgaaccgaccatgagatcaaaatagattgttgagcttttagagacatgagagaactacagtcaacaacataatccattgaaccaaatgaatacactgattagagataagttgataaaatgacgtcatgatccttggaggaagagcatgagatcgaccagaattgagagatttaggcaagatcaacatccgatacttgagaacgggttataggagataaccagataatagggcagaattataggggatcccgagattcggatgataaagccaacatgattcacaagaaaaatggttaccagatctaggcaaaaggagaggtaggcaaacaggatcagctaggatgatcaacagaaatgttatgacgttttaggggcaaggacttatgcaaagaaacatggccttgataggggttgcgcaactaaacaccaacaatttttttttgacacgacaatgcacaaggaagctttaggtcgaactagcggtcaagctacggggttctacaaactgtgcaggtgtaaattcaagggtaaaacacacaagggttagaaaacactcacatagcatgattttttttgggaggtttcacttgctaaactcaaggttgtttggagaggtcttttcaggagcaggttagacacatttgtttttgcaaaaagggttgaacaaatacaataccacctagatagcgagacaagagaaacacatagcacgacctaactagacttaccaatctgacacgaggtaagacatttctaacatagccatacatcacattattcacaagtttttattattggaataaaggtaagagaagcatgttgatgcacaaatgacaatcataatgcgacaatcatgatgcatgctcattctagtcgtcttctcagacctaattaatttttcgggtgcttttacagcatccttattaatagtagtagtagcctttatggcctaaataactagccacctagctacccatctattcctagggcttcacgtcctaggtctatccttatcgtcctgacgatctatccaactttggtttctaagcaagttttactttagaaaaggttggtaatcatgacttattgacttctctgtgatggtattcgctccgataccagctgtggcggaaccgcccgaattattccagcttaagtgcccaagtcgcacccttaagggcagcaacacacttaaac

SEQ ID NO: 38080 - DNA, 525 bp, Zea Mays
aaagcaagctgaataatcgttcaacggtggtactgtgctagtcctaggctaaaccatgctagagacgtgagcctaggcacaaaggtagtcactgaaaaagaacaactagcacagcataaagagaaacaacagatttagagattcagcccccttctttcttcttcttttccttttttttcttttcttttttttcttcttttttttgcaggggcctaaacccttttttcactatgacaacccaaacaatagggttattgctaacagcccctttaaatcagatttaacaaatcttgttaatatagaaagtccagaaatctctatgatgattgcggagcgctcagaatgaattttgagacaaggtcagatccgttggaaagaagataagataagctttccagattgtatttaaacttccaaatcagacatgagatgtatccgtggtggcaaaaatgaactagagatgtttatggtgatggtgggtctcgtggtgaccaaaacgtggtagaactcaaaactctaaaggaa

SEQ ID NO: 38081 - DNA, 675 bp, Zea Mays
atttaatctggcgttaaaacattgaaagtaaggattcactttagtaagctatttctgcaaaagtatctaagttgattcttgctaaagcctctccttgattcccaattccagcatacccttgagagtcttttctttagtcgggtaagtcttattgagtaattccatactcagggtttattccctattgtttttcaggttatagtcttgtgatgttgttgatggtgttaagtgccggtgggctcggccttcttatataagtataccccgtctttatcttcttattgaggatggtcacttgacctagcatatatttcaaaactataaataatttataatagttcaaagttatttctttgaatcacttttgtaatcacttcgatcatgtacaaagtaaaatttttgtaacttgtaaaatttggtaataagatttccgatgcaaactgttggtgtgtgtgatttgtgttacttaatcttgcgatcttggttgtaagtggtttatccggggtccttgggacactcggacagatcctgttaagttatctggtgcacatgcatagccgtctgaggtctttgagacaaggacaagtgcatgtgggcccaataacttgggaggttctgccacaaacttggtcaaaccaaaatgacattgtcgactgcataggagatttctcttga

SEQ ID NO: 38082 - DNA, 481 bp, Zea Mays
gaaggggccgggggagcaaaaagaaaaagagttgtcagcattttgagcaagcaagttgtccgacctgtgaaggaagaccaagaggctttgaagaagatgaaaacagcgacggagccaaagacactgactcctaagaaacggaagcctgctgcggaatccttagagaagacgaagacacaagatgtgctgaaaccaactgcaagcccttcgtattctgctgctgagttatcagaaatattgaaggtaatgactgagtccttcccattcacaccgctaaggcctctgggattggaactgaccagcctcttacaaaaaaggaggtatctttggctgcagaaggaagagacggggaccaaaagaaacgacgcattgtgaacatattacaagcgattgaacaaacccccccttcagcttcggcaagcaaagctgccaaaccaactgatgtcgaagccactgttacagccaaagatgaaaaacttgc

SEQ ID NO: 38083 - DNA, 357 bp, Zea Mays
ctgattaccctgttccttgtcatccttcagggtgatgatgtagaaggccgatgaaccgaagctacatttgaagccttggagtagtcttcttaggatcgtgcctgatttctgtaaaaatactttggaaattcttttgcacaagaaatgtaatatttgtaaccataatgaaaaaattgtgaatacttgtaaatgctttgtaatattatttacctttcgtttgtacatcatctgctttgttgtggacgaaaccgacacttgcatcttttgagccgaaggcgaaaaacaccttcccttcttttcgttcacatcgaagcacattttgtataaaacgaagtttcctttgaaatgaagcacctt

SEQ ID NO: 38084 - DNA, 780 bp, Zea Mays
ccttaattcccttaggaccctcattgactcgatttatgccaactttgaaggactgattgaagaggaagttttgaaactgggggagaaaggcgaagctctagggtacgtccctggtgttttactatttggtggggaagaccggatgctgatgtgcataccagatcccaatgaattgaagattgttaggaatataacctgaagcatcagctttccggacatcaaagagaaattgtgccaagtaaagaagaagaaactctcccacagcctggcctatactagtatcaaggtacagagatttttttttattttgatgtagcctcaagaatttttacattttgattaaatcattcatcatcaacattttttatgcagggactaatgctaagaaaagccttgagaatgcagtaagaaaaagaagaaaaagaattctccgctcttcaagctgaagctgccaaacttcgcaagagtttggggaaaaacatgcaaaaatggcgctcttgatggagaaggtagaaaaagtcgaaaaggaaaatgatgaagcaaggaggatacacgatgctgatgtttcaaagttaaagaaataagatgagtttataaaagagcttcaggccaacctcgatgctgagaaaagggtaatgttgataagtatatggaaaaccaaaagttgttaggaagtttaaatcagctttgagagaacttttttgttgcttcgcgctgccgcgatactcttaggaagattttttcctcaaccagtgccatctcaagagcaaccacatacac

SEQ ID NO: 38085 - DNA, 652 bp, Zea Mays
caagtgactgctgtattgctgtccaaaaatctgcaagtgcccatttgatgattgagttcactcttttggctaaaaatgcttagttagcacttagcggacatagactcataatggctaaacataggctaacatgtgttccatgattaaggtgcttgcttggtgtagttgattgtgatagatgagtccaccgactttgatgcatcggtcctctgttaaacttgtgtgtgatgcttttgtgtgatcaatagaactaatgcaaagtcgtagcaattaaataaatgcgtgtacctgtgatatcatatttgtgttgcgtaaataaataaaatatggtcgtcttgttaatggtgttaatgatgaacgccgataacgtgcgaatagctagcgcttgcgtatagtcgttgcggtgtcttctcatttaatgtttagttcgccgctgtgtctttgtatatcttgtgttactttcattatattcatacatatgcatcttgcatctcatataggaccgagaggtgatgatccagccagtgatgtggtgccaaccacaagatgcagttggtggacgacctgaagaatggtggacttacccagtggatgctcgccaagcgagtacccaccccagcaaacactatccaagtgttaaattaaaggcaag

SEQ ID NO: 38086 - DNA, 253 bp, Zea Mays
ggctctgattgtcttccttgcagtggaaggacggaggatcagaaacttgctgccttgaagtcctacagaagagccaagggtttatgttttaaatgtggtgaaaagtggaattataatcaccattgctctaacagtgttcctcttcatgtggtggaggagatgtgggctgtgactgaccatggaaaggaggaaggggacactgatccaaaggatgagcattatgaaactgagaacgaggaggcagtgttggcgg

SEQ ID NO: 38087 - DNA, 168 bp, Zea Mays
tttccacaagcaccagcttggggtcaaactgttgttaaagaagtgggaaatgtcagcagagcagatcacatggaccatgcagaggatcggactcaagcagtgcaacggaaggcacaaagagagagtcaaggaagacaattagagtcggcgcagccgtcgtgtaccaaa

SEQ ID NO: 38088 - DNA, 357 bp, Zea Mays
gtcgaatctgccattctgcagaaaactaaattcgagatcaaaacctaaccccacatctaatccaacctctaatcctttaattcccatgatccacaacctccaaaatcacataattacagggaggaacaaggatctcatccatacctagggttttcccaagaaattcttcaagaagagatggggaagaacatctccttgatcctctcttccccttcaattcaacgtgctcctcctcttctcgatccttgctgcgcgggggagatctagatggaggaggaagccgtggagagggctgccatgggaggagaggacggctagcccaaggggaaaggagggaggggcggccaagtgtgggag

SEQ ID NO: 38089 - DNA, 665 bp, Zea Mays
atttcgacagcatcccctttgaaaattgcataaacggggaagcaacaaagtataaatagatatcatgataaaaaaacataatagacattaataatctgctagcaatggaaagacaaccataacgacatgaacaaaatcaaccagtgcgcacaactagttagaaacaacatcctttgacaagaagtttctaattaaatcatgactgtgcctaagcagggttattatgagagtgaaggtggatgtgctgctacttctcacttcccttgatgagcaacaagcacctgcattgagtaatacaagagtgagatgaaacatctcagtaagcgaattgttttgacaagatatttaaaccacaaattgaattaatcaacattttaaaagaatcacaattaagatcagaaatacttgtagatatagaactaagtagtctaaatataaccaatgccatctcatttccttgaacaaccacaatagtttgtataatacttccctacgtcaacaatacctgcaaatatcacttcaatgtatgcataggaacgcaaagtgtaggtactctgtcttcatacctctgagggtataaaaccacatcatctgcaaatatcacttcaatgaatgcatatgaatgcaatgcatatgtcctatgccttcatacctctaagggtatg

SEQ ID NO: 38090 - DNA, 569 bp, Zea Mays
ctgcatagaataaagagactgaaaaactgctataatcaaactgcaataactctctgatctgatgtccgattgaagtgttcttcgcggccacggaaagatctacaaattatctacgactcatatatagattttttattttttgaggccactaagaccacggaaaactgatatgaacagaaactgtcgaatctgccattccgcataaaactaaattcaagatcaaaacctaaccccacatctaatccaacctctaatcctttaattcctatgatccacaacctccaaaagcacataattacagggaggaacaagtatctcatccatacctagggtttccccaagaaattctgcaagaagagatggggaagaacatctccttgatcctcttttccccttcaattcaacgtgctcctcctcttctcgatccttgctgcgcgggggagatctagagggaggaggaagccgtggagaggggctgccatgggaggagaggacggccagcccaaggggaaaggagggaggggcggccaagtgtgggaggggtggcggccaattaggggcaaaagggg

SEQ ID NO: 38091 - DNA, 161 bp, Zea Mays
ggaacctcacgagcccttctcatccgcatcagatctagcgccgcctccttcaccctgctggccggtgagctcctcatcacggtgagtcccatttcccctctactctcctcttcccctatgctctcctcttccttcatcctgctgaccggcgagctgctcag

SEQ ID NO: 38092 - DNA, 144 bp, Zea Mays
gttcttgtcaatttgtgtttcttgcgctactgaattgtttttagacttgagtaatgtaaataattctatacaaatattgtatgcagatcataatgtattaatatgcagatcgtaattgctattagttcctttatattttgttat

SEQ ID NO: 38093 - DNA, 270 bp, Zea Mays
catactcatccacaagttattgccattataaattaatctccttattagtgaacttagcagcaattcttgacttacaaatctacgacatactcatcgtatatggttcttgacttacaaatgtacaacagttcttatcaatttgtgtttcttgtgctactgaattgttttttatacttgagtaatgtaaataagtctatgcaaatattgtatgcagatcataatgtattaatatgcagatcgtaattgctattagttcctttatattttgtt

SEQ ID NO: 38094 - DNA, 433 bp, Zea Mays
aatgataatgagaagagtatttgaggaaaaaaaagagaaagaaagggataaaataaaatataaaacaaagtttagaaatacacaaactcaaccatactggtatgattaaaaatctaatttgagtacaaattcaaagtcatacttgaacttcaaattgggtactagtttcatactcatattttgaagttcaaattgggaattgaaaaaaaataaaaagaaaagaaaacagaaaacagaaaatataaaaagaaaagaataaaaaggcttcatgggccaattccactctattaggcccaacttcgagccaactcctcgcttcgcgcggcccaactacgttctcgcgctcgctggcccatcgcacaccccggctcgctggcgggcgggaccctctcgtcagccgctcaccgcaccagctacgcgaccaaactatcac

SEQ ID NO: 38095 - DNA, 1232 bp, Zea Mays
aacacttccccgcgtcaacaatacctgcaaatatcacttcaatgtatgcatatgaatgcaatgtgtaggtactctatcttcatacctctgagagtataaaaccacatcatctgcaaatatcacttcaatgaatgcatatgaatgcaatgcatatgtcctctgccttcatacctctaagggtatgaagccgcatcgtacccctcctcgggcaacgtacgatgctaaattgtaccggtacggtcggaccataggtcacgacaaaacttcagatgcaaatgagtcatgcaatgtatatggcatgctgcatttatcaataaccttcacttccttcagatacaatacaaacctcaaataatactttatttaccttcagatacaataacaacctcaaataatacttcatttaccttcagatacaataccaacctcaaataatacttcatttaccttcaggggtgtgaattaatctcatgaatcatactcgaatcataatcatcatcaatatatgattgagcatcagtataatgcaacaagtaaagcatcaccatagagtccaattatgaaagaatccaatacttctgaatattagagtgtaggcaatagaaataacaggtcagaacggaagcaaccaccgctacattcacttgccttcatcgaagaagaagaaatgtactagacatgatctggagtgtagccacctgctagcgggcataaaacttagtacaaatatttcacaaacatttgccatcaatcaacaaaacactcctacacttgaaaccaagacccagtggaaagactcccaccctgaaccacatgccacacagcagcagcgctgtttgttaattttgtatctttaaaattaaaacagcggtgatatcaaacaaatactctaggagtatctacacaaaatactctacaacttcagtattcaatggataattaaattctgccatctacaagttctaaagcatctcacaagataactgactgaatctgttttagacagcagtatggttcactttaaaattcgatatctcccaaactactgaaccaaacattatgaaattttgctggaagtaagaacttttatccctctacaaaagtctccatagttggaagagccaattcggccatttactagatgaaacccaccagtgaacagacccactcatttttgtcaggcaaacaggaacagccacagtaaaaacaaacataactggagtttcacaaac

SEQ ID NO: 38096 - DNA, 309 bp, Zea Mays
gtctattccaaccctttccctctctcaatcggtcacatagaccggtcgagacttctccttaatcacttgggtcactaagacctcgcaaggatcaccacacacataggtgtctcttgctagctttacaaagcacttagaagaataagaatgagaaggataaagcaatccaagtaacaagagcaacaaaagaaacacaaatgatcctctctctctcaagtctctaagcaattgagttgattttggagcttggagtggattgaatgctttgattgtgtctttagagtgtttggctttgctcttgtattgaat

SEQ ID NO: 38097 - DNA, 233 bp, Zea Mays
ctcactcttgcttaaaaaaccatcctcgccctatgttgtccccactgtattcagtgctcaggaggagatgcagacaacatggaggactttgagaagttccaagactacgacgagttctagttgtgttagtggcaaacccccagtcagctgcatgtgaaggctatatctgctacgttcgtttttccgcactttgataatattaatgactatgttatattaatgactctatggat

SEQ ID NO: 38098 - DNA, 251 bp, Zea Mays
cttgggttggtcggccacaaagcattgctagatctcttcaagctttcatattgtccttcgttttttcaaaatgcatgcagatgtgtatgatgcttcaaaaatattactttcttggtgcatgatattaatgttgtgcacaagaatcaatgacgacatataagggagctcccacagaccacatatattgtccagtagtggtacactccgaatccttggtctttgtcccctttttcatttaggaaaaggttgtt

SEQ ID NO: 38099 - DNA, 328 bp, Zea Mays
ctcatctctaagacaggaaatagaatcattgcaaatatttaaagctttagccttggaaattaaactagcattttcagttttaaggctagagattgattcattcaatttatcaatcttagtaattaaactagcatttctatttctaagattgataattgaatcatggcaaatgctaagcttcttagtcaagttttcatttttctctacttcctgagcataagtgagagcacctagaggggggtgaataggtgatcctataaaacttaaaacttaacaccacaaacttgattaagagttagaacaatgaaatcaagtgagtagagaggag

SEQ ID NO: 38100 - DNA, 418 bp, Zea Mays
atcgacgctaacggtttaaatccatttattttcggcggccgtgtcaacggccgccgaaaatagcgttattttcggcggcttgcgtcagctgccgaaaataaggagttatttttttttcggcctacgtcagccaccgaaaataagagtggccaccgaaaatcgtctgcagtgctgttgtgtcagttagctagcttgtttcctttctgttcatgcatcgagccctgacatgtggaggagaatagctccagttagttgtgttcgcatttgagagcgtccatgacttgtgacgtggggatagacacgcattcgagctcgtcgcgtgtttcactcgtcgacgctttgtttctccatgcccgcgttcgcataaaggaagaagaagcacaaaaaatgttgcagcggttcacaagcgcaaagagtg

SEQ ID NO: 38101 - DNA, 2001 bp, Zea Mays
ggcgatgatcggataaggaagaccagtgtgcaacgagtacgatgacaatatgaaggtctgatgttcaaggatggcgagggcgtcaagaatttcaccccgcgcttcaccggcatcgtcagccagctctccatcttggctgatcctaaagatcctgcgaaggtcgccaataagtacctctacatctctcgtagcaggtataagcaggtcatcatttcaatgtaaaccttgctcaatatctccaccatttcggtcgaggacgttagcaggagattgctggcgtaagaagatgcgtctgacccagtaccaaatcacaacgattgaatggtcgcttcttgaagcaatatcatcctaatgtatggcaagatgcttagaaaaccagtgttcttacatcgagttgataacagtctatacgaggtgcttttggttcgcttaacttccccaaaagacaaggggatgtgttgagcaccatttgtgacacctgggacaaatggacggtccgaccatgaggttcggacggtcctcgcctcggatattccgcgggtatagtccggacggtccgcgatcagattaactcaggcgagagtacttatctcgtgcgttcttatccgactaagcgcatgaaaatctattgggatacgcctaggaacgagttcatacctccccctatatatgtgaaggggtacaccaccgattggaacaaaacacaatcgaatctatcaatacaatcaactttttttgctttgttcttcaatgcactaggagtaggagtaatttagatctagtttagctttccccaaccctaaatcttcatcccttttcatctctacgttgtctagggacatcccgggtggtctaccgacctaggggcacccctaaaactctcctccccgacagggtccctcccgggaggtgagttctagggttttctaatgaagaagacaactctgcaacatcgtggaccgtccggacctgcatcatggaccatctggtgtggcgcagagaggagtcgctcctacagcgaggtcacggattgtacgcattcccgcaaagagtacagcagatggttcacccttaatgtttggacccaaatccaagagactctttatatctttactaacttaaagaatagagattttagcgaaaaaatatcatccaacaacctcttcaattggatatgaaaatatatacaccatctattccagaattcttgctacccaaatatgaagaacgaggatacctcttatcggtgtttcgaacctcgctccgacaagtaaatttattgtgcgcgtttcgagctccaaagggtgtacatcgtgagcacaagatttatactggtttgggcagaacgtccctacttacagtcatcggcggcttgtgatactagcaccattgataatcaaaactcgtagtaggggttacaagtgggtgagagagggaggagaggctcccaagtctctttatcggggtggaagtggagtcctagctaagtcttggcttggcggtggggctctggcttcctagtcctcgtcgatgctcctcctcctgttcttgggttcatctagggctcgtccttgtgtgtgcgtgttcaagtgaactcagcttgacccaaccgtccctttgcctgggggccaaccccctccctttcataggccgggagtggggtcaaccagcggtagcttccttgggaaggagtcgtaagacaagggtaaaaccaatgttcttacccgaggtaaagccacgagtactcgtgggcctagggacgcctggttgtctcgtatttaatttggtgagggtctcctcgaggctctccgtgaaacgtggaggggtccttggtcggcgcgatcatgaggcattcctaggcctcatcaccacctgtaaaccaaccatctctgatcaaagtacctctaatcaatggagctcccttggccgctcataaccgcgagcacggttgatatatcagtttcataacactctgcagaggttgcgcactttacccacaag

SEQ ID NO: 38102 - DNA, 2753 bp, Zea Mays
cgcccgttaggtttcctaaatgcaccgcactcctccccaatgggcgaaccaaccttggcagagcgagccgcatataccgagccccattaacggcacgacggcgaagcaaactacaccccagttcctctaattattcagctaagggcgtcccattccaccctcatggttgcactgttttcccgggtggtcatccaacgaacaagtccttacggagaggcactcgagaaaccgctcaagtcccctaaaatgccacaagtatatcatcatatccagaataaaatcatagtaccatcattgtatctcatcatgttcattgattaaagtaaagcgctagcatgaagctaaccattgtaagccgaaaggtaatcaagaacaaggtaaatagaaagctagtcaatccttaggttgttcatagtatgcggggcaatgaattataaagtaaataggacataatgggtcagatgacacttgccttcaccaaacagatgctcagggtcttcagcctcgtagaactcgaagagcttgatctcaggaccagtggttcaccaagttttgatcgtcgattcctcgaagctcaggaacagatcgcaatatattcacgacgcgtaacgaatacaaataggcacaaacaaaacatatactttgcataagaacattacaccatactagataaaatattatcaaatgagcaataaaaacagagagcgcttctacggttacgcgaggataaaaaacgtgacggtcgaagctacggtcgagaagttatcgcgtttacacttaaaaattattagttacaacatttaattcgacattatcaaatataaattataacaactatttaatttcgactaacttactgttttagtagacgacgattaaacaaatcattaatcaaccgacatgagtggttatgtgtgaatggtttaatatcacgcgcggacgacgcacgatacgcgaaaactgtgtgcacgacagacacacgtgaacgacgcgaacaacacgacgtcacgcgtgaacagcacgcgacaacatgcgaaccagacgcgcggcacgaacgcgcgaacaaacgacgacgcacaaatagcgcgtgaatgacacgcgaaacagcacgccaccacgtgcaaaacagcacgtgcgacagacggagaaatactaattagatgttgtgtttaaactaaacaagtattaaataaataaaaaaaagtatttaagttaatattaactatgttaatgtttatttataaaagcgcaagttgaaaactatatatttaaatactaatctaatgaacatagtcaagcaaacattaaataaattatttaaaatatgtgacctgatgaatgttattaacatatggacaacgcaatttgaacagtaccaaacggacttaaaatacaaaagatatcacatttttattaactcttgcataaactattaactaaataattaacgagacaagtgttgcgacaaaataattaatttaacgtgtacacgatattattataaagtgaacataactggaaccgtacaaaacaattttactaagcaaattctattgaattcttagtaattccctgattatagccaaatgacacattcctattagccaaacacgagaccacacatagggccacaaggtgctagcgcagaagatcccacctatcagccgaatgtgtagggcacttttcacgctttggatgcatgtctgcatgcacctatcgtgtgccatgcaatgggtgaggcctaggctggagattatacaggttacatgcaagaggggccagggcggttatcttcccttgaccaagcacgcacggaaaccgcttcctttccctctcaacgcagatggcgactgcatagagcaaagacgggcaggcagccggcggcggcatgacaatggtgaggcagggctggacagcaccggcgaccagcaggcgggcttgccggagcgtggctagcaccaagcgcgcgacgcacaggggcagatggctgagcagcggcgccgagcagagagagagccggggagtggggatggttttctctctgtttttttctgcaaccgaataagaactttcttcttcctcggacgaagcagagaacggagggagaggagatcggccagcaggggatctcgccgtccatggagactacgcctggcgcgcgcaaagcaggaggctccgaggggctcacctgccatggggaacgccttcggggacgacatcacggacgcttcgcccgggaacaacgtagcagcaggattggtcgggtggctctggccaacggccatgacacacacggggctgcatctaggggcactgaggctcgacggcgagggggctgggtgcacgccgcgcgggctgcttgacggcccagagcgtgacccgaagcaacggtgtggcacagataggctgctacggttgcgcagcgcgaggaggggaacacgggggaggagagagagaggcgtcataccttcgcagcacgacgacgaggcctctaggggcgcgacgtagcgacgctgtaactgcgcgcaactgcaaggcaaagcgcgggcgtggcgactgcaaggcgtggatgagttttttttgaagatggggttgtagacagcgacgccgagtgcttgaataggggtgtgtgagcggttgatgcgaaacccacgagacgtggacgagatttccttggcatgcgcacagaggtggttgcgagggagaagaaaacaaagctgaccagtggggggccctgccgggacgggcgcgac

SEQ ID NO: 38103 - DNA, 561 bp, Zea Mays
agtaccaatattcatttctttcaaaactggtttctcaacataaacaatcattctttgcaatgatagttggagctatccaccaaccgctcaacaacttaaattcaaattgatgattaccttgtaccccaaaacacgcaattcacactcctcttagaaacatccacaatcaagcatatataacaatattattgtaataaaactcaaccatgaaaaacatggtgaaaacgacataggcatacttgtatatcacaagcataataacaacttcattctcaccaatgaccagcgatatctaccgcattaataaaacaatatcaaaatttcagaaataaattatatcaagcattaagccataacttaccacatcaccgtaaaggaatagggaggggtgaaactattgtcatctgcactccaaagacattaatatatatcaaagatatttgaacccatacccttcctatatgtgcaagtgtgtcaaatttatcttcaaattgccaagaatctaaagcctatcctctgataccaactgtaacaccccgggatccacaaacacctcagaat

SEQ ID NO: 38104 - DNA, 276 bp, Zea Mays
gaactaggtgtaagcctaattccctttcagggtgcatctcatacatgcgccaaagaagacaacatatataataacaaagtgcatagagataaatgtcacaatataatcagagtatttattacatagcggaagtcttacaaaataaaagatatttataacaggatctaaaatccatccttggcgccagaaagtcaactgggagacgacgacctaaacctctcacgaacaccgcgcaacatccaccatgcgcctcatccagtggtacctaatcttgac

SEQ ID NO: 38105 - DNA, 760 bp, Zea Mays
gtcggaccatccgcgtctggatggcggactgtccgcgatgcgcagcacgggttcccgcaactgtctccctgtctgcgtttgccccccagtgctagaggctgtgatggtcaccttcagggtctcccctccatcgggagtcttctcggccaccactttcctgcaagaaactttacaatcaccatcagcctttttagcattgtcgttgattgtttctttgcctttgcctttatcggctgtgtttggccgaaccaggactttcttgccctcgaagtcgatcatgttcatcggaaagggctctgtatccacctgcatttcctgaaatttcaatcgtccctcgttaatgaccgattgaatctgtcaccgaaacacattacaaccattagtggcatgataaaatgagttatgccacttgcagtatgcacgacgttttagctcgtcggtggatggaacagtgtgatttgttttaatgttgccatttttgagtaattcatcaaatattttatcacttaccaacattaaacgtaaacttaacctcctcttgccgtttcttttgaaccggctgtaaggaggaacaagccgaagatttggcctgctttggccaaaccatttcagcagcatacacttctgttgattcgtcatctgagctactttggtcgcattctactatatgtacgttgtgatgaattgttttagcagtttctttccttcggctttcacaagccaaagctctctggtgtaactgtgctagtgtaaaaaattg

SEQ ID NO: 38106 - DNA, 1118 bp, Zea Mays
ctctaatcgacgtagagtcgaagagaagcggagaatttggggatcgagaggctaaactagaactagactagaactaccctaattgtactggaaataaatgtgaaatagaagttgtattgattcgattgattgcctctaatcggccgtaatcctctgcttttatagaggagggaggctggacccgttaccaacaaaactccgagcaaatcccgcgattttcgccaacaaacgcagcgaaaaactcggaaccctaatctgttctgcgcgtgcgcggaccgtccggcctcagggccggaccgtccgtcggctcaaattggtgcccaacagtctcgcacccgagataacgacacattctatccccgatgcgactacaccactgtccgtcaaccaagaggtaccatcagttttccatcatgttccctttagattcagcttcgatccaccaagcgaccccagtggcggagggcgcacaaaatgtaaggtatggctaatttatataaatccgtgtttcgaaacagattttatacaacacctatttcaccgtggttcttaaattaattaaccaatatatcaattcgctaactgattaaatagactaaactagtgaaacaaaatgaggtttaattaaagtaaatacactcattgctctatataataaacaaacgcttagagaagtaaaatactgtgccattttacttaatgcggaagccttataaaaggggccatggagcattaatctctactactaattataaacctaatgtaggcgtccacaccccgcggtgttctgccgcccgcggctgcaccctgccccgcatcacgcaatccagcgcaattccccggcccacacgctcgagcacgccccctgccccacacgctcgagcacgcgccgccccgggggatctgccaccgcctccacctcttcctcggccgtggcggtgagcgcagcgccgcccccagtgtagatcttgaggcggcgacgaagcttcaagcccacgcgcccctcgaggtatggctacgatgcagtccccaggtcgcaactgatttagacgcagagatggaggtgtcggcggcctccgacgaaaccctaccgacgtgctcgaccacctcaagcccca

SEQ ID NO: 38107 - DNA, 550 bp, Zea Mays
ggaaaccccaccttaaccaaggtgagctcatactcaatacaaggttaagatttgatccctttagcacacgaacaccttcacccttaagatacacttccctctcaggtcgagataaactttaatgcacaaattctccccctttgacatcaaacaccaaaaccatataacaaacaagaacatagcttgatgtgaagggacattagggtacgaagcagggaaatgcatcacacttacattactcacacttaaaacttaaaaatatgcaacacaagcatcagagggaatcaaggtacaaatactcaacataaaagtgataataccttcttttgtacctttgttacatttacaaagtcatggtaccctttccatccaaatcagtggttccctttgccataagagtttcccatttgaagattccatccccagggagcttccccacacttgtgtctgatcctttaccctgatctttccttgttgctaagacactagacttagaacaagttatagcattgtgtcacgtgataaactcctactcgagagaacaccaaag

SEQ ID NO: 38108 - DNA, 2230 bp, Zea Mays
gcagcattattatgagaatgaaggtggatgtgctgctacttcccactccccttgatgagcaacaagcacctgcattgagtaatgcaagagtgagatgaaacatctcagcaagctaattgttctgacgagatatttaaaccacaaattgaattcatcaacattttaaaagagtcacaattaaaaatcagaaatgcttgtagatatagaactcagtagtcccactataaccaataccatctcatttcctcgaacaaccacaataggttctataacacttccctgcgtcaacaatacctgcaaatatcacttcaatgtatgcataggaatgcaatgtgtaggtactctatcttcatacctctgggggtataaaaccacatcatctgcaaatatcacttcaatgaatgcatatgaatgcaatgcatatgtcctctgccttcatacctctaagggtatgaagccgcatcgtaccccttctcgggcaacgtacgatgctaagttgtaccggtacggtcggaccataggtcacgacaaaacttcatatgcaaatgagtcatgcaatgtatatggcatgctacatttatcaataaacttcacttccttcagatacaacacaaacctcaaataatacttcatttaccttcagatacaataccaacctcaaataatacttcatttaccttcaggggtgtgaattaatctcatgagtcatactcaaatcataatcatcatcaatatatgattgagcatcagtataatgcaagcaagtaaagcatcaccatagagtccaattatgaaagaatctgatacttctgaatattagagtgtaggcgatagaaataacaggtcagaacggaagcaaccaccgctacattcacttgccttcatcgaagaagaagaaatgtactagacatgatctggagtgtagccacctgctagtgggcataaaacttagtacaaatatttcacaaacatttgccatcaatcaacaaaacactcctacacttgaaaccaagacccagtggaaagactcccaccctgaaccacatgccatacagcagcaacgctgtttgttaattttgtatcttcaaaattaaaacagcggtgatatcaaacaaatactccaggagtatctacacaaaatactctacaacttcagtattcaatagataattaaattctgccatctacaagttctaaaacatctgacaagataactgactgaatctgttttagacagcagtatggttaactttaaaattcgatatctccaaaactgctgaaccaaaaattatgaaattctgctggaagtaagaacttttatccctctacaaaagtctccatagttggaagagccaattcggccatttactagatgaaacccaccagtgaacagacccactcatttttgtcaggtaaacaggaacagccacagtaaaacaaacataactggagtttcacaaatcatatgaatgcactctttaacaatctggaaagcttataaaattatctacaacttcttttaccaacccacagtttaattctgttgataaaattgcctaaatcttaagagaacagattctgcacagaattatgagactgaaaaactgctatagtaaaactgcaataactttctggtaggatgtccgattgaggtgttcttcgcggccacggaaagatctacaaattatctacgactcatacatagactttttatttttttgaggccactaagactacggaaaactggcatgaacagaaactgtcgaatctgccattctgcagaaaactaaattcgagatcaaaacctaaccccacatcaaatccaacctctaatcctttaattcccatgatccacaacctccaaaagcctataattacagggaggaacaaggatctcatccatacctagggtttccccaagaaatcttcaagagaagatggagaagaacatctccttgatcctctcttcctcttcaattcaacgtgcccctccttttctcgatccttgctgcgtagggggagatcttgggggaggaagcaatggaggatggctgccatagggggagggggcgtccagccaagggggagaaaaagggggtggcggccaagaggggggggtgaagggaaaaaaaggggtggccacctagggtttttgtgggagaaagaaacgacgcctcagatgacttctatctttgcatccaatggcccacaaccctttacctcatccacg

SEQ ID NO: 38109 - DNA, 374 bp, Zea Mays
ctcactcttgcattactcaatgcaggtacttgatacatgttgggaatgaggggagtagcagcacgtccacttacactctcacaataacgctgcccaggcgcagccatgatttaattagaaacttattgtcaaaggaagtttgtttttttatatagtcgtgcgcactggttaattcagttcaggtcgtacgtttatctttccttgctagccgattaataatgcttagtatgtttttgtcatgatatatgtttataccctgttgcccccttatttatgcaatcttgcaaaggggatgctgccgaaattttatatatggacgtcagaagtgtagttcagtagcattctgggttgtttgtggaacccggggtgttaca

SEQ ID NO: 38110 - DNA, 247 bp, Zea Mays
gtggaattaaccccaatttgaaattagggttgaaaatagggaaggaagagataaaagaccatttaatacgaaataaatttataaacaaaataagtttattccataataatatgttcaaactatacattcaaaatttgagtacaaattcggcacgagatttgaattcaaattttatgtttgaaataaaaaggaaaaacaaatcagaaaataaaagaataaagaaaaaaaaaataaaaaacgggcgctg

SEQ ID NO: 38111 - DNA, 286 bp, Zea Mays
attgaaaccccttttgttggattataattttagaatatatacagtttatttgtttcattgcataatgggagcatttacttaatagatgaaagcaaaaaaatataataaataaataaatatttcatgctgcaacatctcttttgttggtggaaacacaaaattgaatttggtcgaaatttgatatttggaaaatagaaaaaaaaacagaaatctgaaaagaaaatgtgaaagaaaaaaaaaaattcaaaactgcgtttgggccaaatcgccaacagccgacccaatt

SEQ ID NO: 38112 - DNA, 337 bp, Zea Mays
cctcccctctctcttccactcttgcagccgtcccaatccctctccttcttccccaagtgattgcagcgccacccctcaaccctagccccccccacctctttctctccaaggtggagcctccccgcttggtgtccgtcgtgtgggtgcgagtcttccatgggagtttggagggaggaagaaggaagaaaataaggatgaaaggaggaacccaaggtgattttcgtgatcattttgttgtatttgtgctgcaatccaattggttacatgtttacctatgcgatttggtagaggtgctgtccagaaatttagtgggtggacgaacagcagtagttctagt

SEQ ID NO: 38113 - DNA, 379 bp, Zea Mays
ctcctcctccccttggccgccgcccccctgcccatctcttcctctctcaatttttgcagccaccaaaccctagccgccccccctcccaatcccctcctcccaaggtgccaatccttgccgctcggatcatcgtcgtcgtggtgcgagtcttcaatcgttttggtggagggaagaagggaggaaggaaaggggagaatccaaggtggtggacttccggatcgtacttagggatttgcccgaacttccggtaaaggcaagtaaatacagtggtggttgctaccgtttggtttgcatcctattccctgtcattgagtatgcataagttttaattatgttaatcattgaattctatgatgaagtttatttgtttggaagtatt

SEQ ID NO: 38114 - DNA, 1147 bp, Zea Mays
ccagtgcctagccatagtgctgctagagctcgtcagcgcactctgctcccctggcgctgctctaggttcagtcggcgtcttcctcacgttgctggtcagcagagctcgcccgactttgacctctgccttgcccttgaccccacttgcccgtccctgttctcgacgctcgagctcacctcagctccgctgtgcccctatcagcggacgtgctcggtctcggccacgtccctgcaccctgtgttcagcctccttcctgcatcagcggacgtgacggctgctgcgagcaccccttccttctccccagcctcaccgtggccaacagcttcaaatccatgggcgagccaccctcttcaccttgctgcgcgccggaagcctctctctgctcgaatcggtgtggtgctctggccatgcgtccactctactcggacctcgagtctccctgctgcccacaactgtcacactagccatcgtggcgtcgttatttcctgctgcgccgcgacatcgtcaagctccggtgcttagtgtcgaagtcgatgcgccgttgtcgctctggcttcctttgtcgtcgcgcggtgtgtggcggtcgtgtccacctccatggcatcaacatctgcatccccggcatcgtcgtcgttttagcagcttgttgcaccttgcgttcgcgccagaagacaaaagggaagcgagtataggtgcatcgtcgatttcatggtttcaagttggatttagctttggtgagttgatttattatttttgttagctggtttgatgaatggcttggctaggtgtgttagtcgtgatgatcttgtgactatacttagtgttgttcaaccaatcgtttcatgcagtgaggtgattgtgaagtggtcgcgttaggtgttgaagtctagattttaaatatagatttatgcaaagaatattagtagatatatatatatgcgatatgattgtgttaacgtttgtgacatatttgcgtcatatgaaatataggtttaagattccatttatgggaagagtgcttcattgggtatatatataatccgcgtatatttaactagattttatatgcgtgacaagtggtgatagtaagtatttgtgaaatactttgttcatgtagtaatgtgatagaatccaatattgttaaatc

SEQ ID NO: 38115 - DNA, 571 bp, Zea Mays
gttattatgagagtgaatgtggacgtgctgctacttccctcattcccaacatgaatcaagtacctgcattgagtaatgcaagagtgagatgaaacatctcagcaagtaaattgttttgaggagatatttaaaccaaaaaattggattaatcaacattttaaagtgatcacaattgagatcagaaatacttctagatatagaactcaatagtcccaaaataaccaatgccatctcatttccacgaacaaccacaatatgttgtataacacttccctacgtcaacattacctgcaaaatatcacttcaatgtattcataggaatgcaatgtataagtcctctgctttcatacctcttagagtataaaaccacaccatctgcaaatatcacttcaatgaatgcatatgaatgcaatgcatatgtcctctgctttcatacctcttagagtataaaaccacaccatctgcaaatatcacttcaatgaatgaatatgaatgcaatgcatatgtcctctgccttcatacctctacgggtatgaagccgcatcgtacccctcctcgggcaacgtacgat

SEQ ID NO: 38116 - DNA, 111 bp, Zea Mays
cgtcgtcggggctgtgcgccgccgtcgcgccggtcgcgtcgaagccgccgtcgcgccggttgcgtcgagccgccgccgcgtcggtcgcgtgtgtccaggcttcgatccgga

SEQ ID NO: 38117 - DNA, 604 bp, Zea Mays
gttggatggaacgaagaaatcaagtcacgggattatatactccgaagggatcaaaatgaggaaggttggttagccgtgtgattcgcaggtagttacaactacctaatcgtaataggctcgtcatggagaaagtagctagcaggaagggtcccacccggcagagaattaactcccatgagcacggtggatgggaagcataggtgcgggccccacgagtcaatggtactaggatgcacgtgggggatccatggaaaacgagttgggctggtgcaaggcaagactcgccagttttgttttttttttctttcctgattttatttttttatatttttagtttattcaaacttgatttgtgtttttgaattctacactcaagttcaaatgcacaaaaatagactccaacatgaaatgcaaaattgtattttatttataatattttgttatctacatgcctcaaaatataaaccacatacacatatatattttttataagatactcgtttggaacgtatactctaaattccatacttatttttagaaatatatatatatatatattacatgtaccacgaattattttaattcaaatgcatatatttatttg

SEQ ID NO: 38118 - DNA, 595 bp, Zea Mays
atctcttttgaaagattgcataaacgaggggcaacagtgtataaacatatatcatgaaaaaacatactaagcattattaatctgctagcaaaggaaagttaaacataacgacatgaattgaattaaccagtgcacacgactaggaaaaaacaaacatcatttgtcatcgagtttctaattaaatcatagctgcaactgggcatcgttattataatagtgaaggtgaacgtgatgctacttccctcattcccaacatgaatcaagtacctgcattgagtaatgcaagagtgagatgatacatctcagcaagcaaattgttttgacgagatatttaaaccacaaattgaattaaacaacattttaaaggaatcacaattgagatcagaaatacttgtagatatagaactcaatagtcccaatataaccaataccatctcatttcctcgaacaaccacaataggttgtataacccttccctgcgtcaacaatacctgcagatatcacttcaatgtatgcataggaatgcaatgtgtaggtcatctgccctcatacctctgagagtataaaaccacatcatctgctaatatcacttcaa

SEQ ID NO: 38119 - DNA, 177 bp, Zea Mays
cttggccgccgcccctctgcccatctcctcctctctcaattcttgcagccacaccaccaaaccctagcccccccaatttcctcctcccaaggtgccaatccttgccgctcggatcatcgtcacgtggtgcgagtcttcaatcgttttggtggagggaaagaagagaggaaggaaagg

SEQ ID NO: 38120 - DNA, 295 bp, Zea Mays
cttagggttagggggcgcgcggctgttgggccttttgggccaaacggcggctagggtttctttaggttttgttttttttttctttttcttttccttttttttaaatttcgaaatacctatttaaataaccataaaaattcataatattcaaccaaccctattcataattaagatatttattttgagactaataattatcatatcaattatgtgaatttttatttaagaagaaatgatacttaaaatgagcatctcaaaaatcattccaaatgcacataaataacaaacacttaaa

SEQ ID NO: 38121 - DNA, 651 bp, Zea Mays
agatagttcattcttttacataagtaattatatgttgcctaattttattccaaattacccgcaggggtatgcttctagttaacaatatatatttatcacggaagcatattgtttgctttcatgacaattccaagcaataccttgtgttactcaggtgtctttgagacactgcaaagaatttgagtccggtagtgctagcaccattgtgactctttgaaaaagccatggaaagtatttgacaagatttatggttagagatatttgctcgttaataattacgtgggaatcgacatatggccatgaactcaaggtatgtacaatcctgagactccgatttagttttcaaaaaatacaataaacagttaagagactgcatatacaacactgagattctggatcataaatataactaagagacaacatgtatggagagtcgtgaagaaacgtactattcgcgaagagcctgtcgcttgtatttttttcacttagcctcttagaaactcctagagaaaccctatattacatagggttgtatatgtcggaatacattccaatgttacaattaatgttcgtatttaccattaagcaagtagatacttaagcattaaatcattgtgcaattactttgaatactaatgtctatgatatctg

SEQ ID NO: 38122 - DNA, 117 bp, Zea Mays
gttgacatatgcaagggttaagtgctacatatgtcgtgtggttagagatcctcagctgagtaaatcgattcggatcgccgttatatcctcggacagtggagacttggtcactgacct

SEQ ID NO: 38123 - DNA, 415 bp, Zea Mays
ctcccactgatccctactaattgcccacgaaaaattcccagaaatcactagaactactgctgttcgtccacccactaaatttctggacagcacctctaccaaatcgcataggtaaacatgtaaccaattggattgcagcacaaatacaacaaaatgatcatgaaaatcaccttgggttcctcctttcctctttcttttcttccttcttcctccgtccaaactcccatggaagactcgcacccacacgacggacaccaagcgaggaggctccaccttggagaggaagaggtggggggggctagggttgaggggtggcgctgcaatcacttggggaagaagaagaaggattggggcggctgcaagagtagaagagagaggggaggggcggccaaaggggtgggagagtgagagggag

SEQ ID NO: 38124 - DNA, 105 bp, Zea Mays
catcgaccttgtttgtccttgcgtccaccccaccacatcctcctgcatgcgttccctctccgatccatccaccgcactgccgcctgccggcccggctggctgtct

SEQ ID NO: 38125 - DNA, 341 bp, Zea Mays
gcaggtagccttcagggcagcatattggtgccgcttctggtctcagcttcagcctagaagggaggaccaagagttaataaagtcttcatgtcgtaatgtggagagggtgctactacagttctttagcaattttggatggggatatgcgttgcgtttaactatgtagtagctgtggttcggtagctgaagttcttcaatttggctagttggggttctctgatgtggtcataggaggagttttggcaatatgcctgcgtcccttgtaataaatggccgtaacctcatttgaggccaaggtcggatgatttttccattatctaaaaaaatacgccagagtaggg

SEQ ID NO: 38126 - DNA, 197 bp, Zea Mays
cccctctcaagtgatccaatgaccgacttgaataccggtgttttctttcttatactctttcccgtttgcgaggaatctccacaacttggagcctctcgcccttacaattgatgatcaaaaagaagcacggaagtaaggttgggaagagcaacacacacaagactcaaagcacgagcacaatcacgcacacaagccac

SEQ ID NO: 38127 - DNA, 430 bp, Zea Mays
ctcaaagctagggggttgctatacgtacacctcctccttgattgcccattgaggaaagcgctcttcacatccatttggaacaacctgaaggaatggtgagcgacataggctaacaaaatgcgaatagactctagcctagccacaggagcaaaagtctcctcaaagtccaaacctgcgacttgggcataaccttgtgccacaagttgagccttgttccttgtcaccaccccgtgctcatcctgtttgttgcggaacacccacttggttcccacaatgttttgcttgggacgtggcaccagggtccaaactttatttcgcttgaagttgttgagctcttcctgcatggccaacacccaatccggatctagcaaggcctcttctaccctgaaaggctcaatagaagagacaaacgagtaatgctcacaaaaat

SEQ ID NO: 38128 - DNA, 369 bp, Zea Mays
atattgtcatgcatgttttcgacctgtacgacaaatctgatttttgttcagtgttttaggtttcctgtactattggctcatgtcttaactcaaatcttattttcggttagatgtcttaatttaaatatgattttcggttagatggacaaatctggaaaagtggtagcaaagtgggacataaggtgtcacacccggttttggaaggtaaccgaatgcgaaccatgtacgtgccagaatcagaaattcacatacacaatgattacataaatgactcatcatagcacagtgcttcgaataacaataaagagtaagtaatagtattaaagactagagtcatttacataatataaatcaaagtgcacataatag

SEQ ID NO: 38129 - DNA, 188 bp, Zea Mays
gccaatccttttctactgtaaacttgtgatctctttgctgcatatgcttggtttctgtttttttgtttgttatttcccaagtacatagtgtgaatgattactttacgtagacaacgagcagtctgtgtttctcgaggaagtggcagaagaagtccctgatcagcagtttggtgaaggcaagtgtcctc

SEQ ID NO: 38130 - DNA, 205 bp, Zea Mays
gccagacctcccgacctggtaggaggagaacatagaggcatcaacacacacatgaatgtttgcaccactgtccatccaccactcaggtgaattacagactgaaagaacaaatggtaaagaattaccatacccagatgttccaccttcagttccagtggttacaacattagctgatttcttgtattgagtgaacttgcgatcaggg

SEQ ID NO: 38131 - DNA, 227 bp, Zea Mays
gccgcccccacccctctctcttccactcttgcagccgccccaatccctctccttcttccccaagtgattgcagctccacccctcaaccctagccgccaccccacctcttcctctccaaggtggagcctccccgcttggtgtccgtcgtgtgggtgcgagtcttccatgggagtttggagggaggaagaaggaagaaaagaaggaggaaaggaggaacccaaggtgat

SEQ ID NO: 38132 - DNA, 796 bp, Zea Mays
caattgtctaatattgtggatgatcataatttggtaatgatatatgtggttgattcccatcttggatgaagttgaagtattttttgaatcacgttatatgaagtgttgtaggcatgacatgcacatcacatcatccatcttgcattttgaagttatgtcgcgatcctatggtctgaccgtaccggtacatttttagcatcgtacgttgctcgaggaggggtacgatgcggcttcatatccttagaggtatgaaggcagaagtcatccttgcatttgcagacatttgcactcatgagacatatatgaagtgtgacattactatgttactattgtggtttccacctgcaaggtgtggtgactaggtgtgttgtacgttgtatacgtgctgcaccttcgtaataagaaggttgtggaatcaagtggtggtaaaacaatgttcttatgtggttaaacagtttgatattactttacttgctgagatgtgtcatctcactcttgcattactcaatgcaggtactttatacatgctgggaatgaggggagtagcagcacgtccactttcactctcacaataacgctgcccaggcgcagccatgatttaattagaacttattgtcaaaggaagtttgttttttaactagtcgtgcgcactagttaattcagatcatgtcatatgtttaacttctctttgctagccgattaataatacttagtatgtttttgtcatgatatatgtttatacactattgccccctcatttatgcaatttgcaaaggggatgctgccgaaattttat

SEQ ID NO: 38133 - DNA, 632 bp, Zea Mays
atcctgtctcacttccttggtagaggtgtatggggcccgtacaacccgtggcagatgggtaacatgacttttgggtacagggtacaacccctgcagagtgtaaaaccggtataatagcagagctcacggtcatgagcagctcaggactctcgcatgattaaattatggagctaaattcaatttgtcatttgcattgcatgggattatttattaattttattctattcttattatggtttggtatttacttacatttagtaaatgctaacaaaatttgaccaacttaataaaagcaatgctcagctttaacccctattattgatcagtcttacacatcacatgaactcccacctttggagagttcatgcacattattccccataacttgttgagcgatgaacatgtgtgagctcacccttgctgtctcacaccccccataggagaagaacaggtggttcaagaggagcccacaacgaggagttcgacttgatctatgtggcgtctcccagttgactttatggcgccaatgatggactttagttcgttttatatttatcttttattttgtaagacttctgctatgtaataagtactctgatggtattgtgccatttatctctatacactctgtt

SEQ ID NO: 38134 - DNA, 1810 bp, Zea Mays
aatgctactaaactacacatctaacattcatatataaaatttcgacagcatcccttttgaaaattacataaacggggaagcaaaaaaatataaatagatatcatgatatgagaacataatagacaataataatctgctagcaatggaaagacaaccataacgacatgaactaaatcaaccagtgcgcacaactagttagaaacaacatcctttggcaagaagtttctaattaaatcatgactgcgcctaagcagcgttattatgagagtgaaggtggatgtgctgctacttcccacttcccttgatgagcaacaagcacctgcattgagtaatgcaagagtgagatgaaacatctcagcaagcgaattattttgacaagatatttaaaccacaaattgaattaatcaacattttaaaagaatcacaattaagatcagaaattcctgtagatatagaactcagtagtctcaatataaccaataccatctcatttccttaaacaaccacaatagtttgtataacacttccctgcgtcaacaatacctgcaaatatcacttcaatgtatgcataagaacacaaagtgtaggtactctgtcttcatacctctgagggtataaaaccacatcatatgcaaatatcacttcaatgaatgcatatgaatgcaatgcatatgtcctctgccttcatacctctaagggtatgaagccgcatcgtacccctcctcgggcaacgtatgatgctaagttgtaccggtacggtcggaccataggtcacgacccaacttcagatgcaagtgaatcatgcaatgtatatggcatgctgcatttatcaatatacttcacttccttcacatacaatacaacctcaaataatacttcatttaccttcagatacaataccaacctcaaataatacttcatttaccttcaggggtgtgaattaatctcatgagtcatactcgaatcataatcatcatcaatatatgattgagcatcagtataatgcaagcaagtaaagcatcaccatagagtccaattatgaaagaatccaatacttctgaatattagaatgtaggcaatagaaataacaggtcagaacggaagcaaccaccgctacattcacttgccttcatcgaagaagaaaaatgtactagacatgatctagagtgtagccacctgctagcgggcataaaacttagtacaaatatttcacaaacatttgccaacaatcaacaaatcgatcctacacctgaaaccaagacctggtggaaaacctcccactctgaaccacatgccatacaacagcaatgttgtttgttaattttgtatctttaaaattataacagtggtgatatcaaacaaatactctatgagtatctacacaaaatattctacaacttcggtattcgatggataattaaattctgtcatctataagttctaaacatctaacaagataactaactgaatctgttttagacagcagcatagttaactttcaaaattcgatatctcacaaactactcaaccaaaaatcatgaaattcttctgaaagtaagaacttttatccctctacaaaagtctccatagctgggagagccaattcggccatttacttgatgaaacctaccagtgaacagacccgctcatttctgtcaggctaacagaaacaaccacagtaaaacaaacataactggagtttcataattcatatgaatgcactctttaataatctggaaagcttatgaaattatctacatcttttcttacaaacccaaggtttaattctgttgataaaagtgcctaaatc

SEQ ID NO: 38135 - DNA, 156 bp, Zea Mays
ctcctctctcaattcttgcagccaccaaaccctagccgcccccccccctcaatcccctcctcccaaggtgccaatccttgccgctcggatcatcgtcgtcgtggtgcgagtcttcaatcgttttggtggagggaagaagggaggaaggaaaggggg

SEQ ID NO: 38136 - DNA, 387 bp, Zea Mays
gtcgatatctttaccaagcccctggagaaaagacttttagcaagcttaggaatgagctaaatatcctagattctcggaactttgattgaaacattgcacatattgctaatttatatacctttgatcatgtctctctcatttggtacaaatgcatatttcttattcttcttgtgccaaagctaagactaatgtacttccatgagtatctctatgattagtattaaattgaaagggaaatgtaggattcatcaaagacaaggcttccactctactctgtcgatatcatttattctttgccctcctcataaactttcattcatattcaataggggagaattaaaaggcatctcaagtttctttgtttttggcgattaattccagaggggg

SEQ ID NO: 38137 - DNA, 234 bp, Zea Mays
acggatggcgactccaagaagaaagggccaaagaagaccaaccacgtcaagggaggatacacaccaactcaagtcttcaaggatcaagcgggatcacgagatgagtcaaaatccataatctaggatggagtcttttcttaccctacgttttcttaaccaaacctatctatgctctaaaaacatcttctatcctacataataaagtggacatacatatatatatatccatgctct

SEQ ID NO: 38138 - DNA, 254 bp, Zea Mays
ggttgtccacattgtaaccactgctcaggagaagatgaagccgtggaaggagacttccaggagttccaagactacgacgagttctaagtgtgggttggcggcaaccctcagtcagctgcctgtgaaggccctatctttactgtgtttcgcttagcactttgatttacccgttaagttaacgactatgtggatgtttctgactctgtgatgtaataagttaatactcttttatgttattattcgagcactgtgcg

SEQ ID NO: 38139 - DNA, 538 bp, Zea Mays
caaccttttgcaggatgtaaaactggtatatcagtcatgctcacggtcaagagcggcccagaccctcacatgagtaagttatggaattaaacttaacctttcatttgcattgcattgtgagatttattcatcattgagatcaattatttaattgggttggtattgacttatacttaataattgctaatagatttttgaccaacactaaaagcaatgctcagccttaaccattttccttggtaagccttacactacactttttcccacatttgctgagcaatgaacgcatgtgagctcacccttgctatactcacacgaggtcaagaataggtaccgccaagatgaggagcataattgatgctacgatgagttcgaaaaggtctagaccgtcgtctcccagtcaactatggttgcagaggattgttgccatcatatgatgtatttatttagttattttgtacagaacccctatatgtaataaagatgtgacattaatttctgtaccatgagtcatcgtatgtatgagatatgatcctag

SEQ ID NO: 38140 - DNA, 173 bp, Zea Mays
cctagggtttccccaagaaaatctacaagagatgggggtagaacatctccttgatcctctcttcctcttcaatccatcttgctcctcctcttctcgatccttgctgcgtggggagagatctagagagaggaggaagtagtggagggtggctgcaaggggaagggggaggggcg

SEQ ID NO: 38141 - DNA, 270 bp, Zea Mays
aaaacaaggaagcggcgttgactcggtttgttttttttctgtttttttttttgacgtaaccgaaggagaaaaataaggaagcgacgttgactcggtttgtggtgtgatcaaacggaaaatggtggcggcgcgctagggtttgaatggtggaataacacaatgcaaccagcaacaaatgacgtgaaagcacacaaattcaacaatgcagattattgaaagaaagtgcgaggctcaaaagggtgctgggataaggtctaacctaaattttta

SEQ ID NO: 38142 - DNA, 1469 bp, Zea Mays
ctaaaacagattcagtcagttatcttgtcagatgttttagaatatattgatggcagaatttaattatccattgaataccgaagttgtagattgttttgtgtagatactcttagagtatttgtttgatatcactaatgttttaattttaaagatacaaaattaacaaacagcgctgctgttgtatagcatgtggttcagggtgggagtctttccactatgtcttggtttcaagtgtaggagtgttttgttgattgttggcaaatgtttgtgaaatatttgtactaagttttatgcccgctagcaggtggctacactccagatcatgcctagtacatttttcttcttcgatgaaggcaagtgaatgtagcggtggttgctatcgttttgacctgttatttctatcacctacactctaatatgcagaattattggattctttcataattgaactctatgatgatgttttacttgattgtattatgttgatgctctatcatatattgatgattattatggttcaagtatgacccatgagattaattcacacccctgaaggcagatgaagtcttatttgaggtttgcattgtatctaaaggcatacgaagtattatttgaggattgcattgtatctgaaggcagataaagtattatttaaggtttgtattgtatctaaagtaagtgaaatttattgataaatgcagcatgccatatacattgcatgactcatttgcatctgaagttttgtcgtgacctatggtccgaccgtaccggtacaacttagcatcgtacgttgcccgagaaggggtacgatgcagcttcatacccttagaggtatgaaggcagaggacatatgcattgcattcatatgcatatattgaagtgatatttgcagatgatgtgattttataccttcagaggtatgaagatagatgacctacacattgcattcctatgcatatattgaagtgatatttgcaggtattgttgatgcacggaagtgttatacaacctattgtggttgttcgaggaaatgagatggtattggttatattgtgactactgagttctatatctacaagtatttctgatcttgattgtgattcttttaaaatgttgattaattcgatgtggtttaaataactcgtcaaaacaattagcttgctgagatgtttcatctcactcttgcattactcaatgcaggtgcttgttgctcatcaaggggagtgggaagtagcagcacatacaccttcactctcataataacgctgcccaggcgcagtcatgatttaattagaaacttcttgtcaaaggatgtttgtttttaactagtcgtgcgcactggttaattcagttcatgtcgttatggtcatcttcccattgctagcagattattaatgtctattatgttttcttatcatgatatctatttatactttgttgcttccccgtttatgcaattttcaaaggag

SEQ ID NO: 38143 - DNA, 3446 bp, Zea Mays
agctttgagtatatgatcaagggctcaaagaaaatcaatgagctagatgatccctccacatccgaagcacaaccggttgcattcaaggcaacgaaggagaagaaggaggagtctacatcaagtagacaaccaatcgacgcctcaaagctcgacaatgaggaaatggcgctcgtcatcaagagcttccgccaaatcctcaagcaaaggagggggaaagattacaagccccgctccaagaaggtttgctacaagtgtggtaagcctggtcactttatagcaaaatgtcctatttctagtgatagtgacaggggcgacgacaagaaggggaaaagaaaggagaagaagaaatactacaagaagaagggtggcgacgcccatgtatgccgtgagtgggactcggacgagagctcctccgacgaggacgccgccaacatcgccatcaacaagggccttctcttcccaaacgtcggccacaagtgcctcatggcaaaagacggcaaaaagaagaaggttaaatccaaatcctccactagatatgagtcctctagcgatgataatgctagtgatgaggaagataatttgcgtactctttttgccaacttaaacatgcaacaaaacgaaaaattaaatgaattgattagtgatatccatgagaaggatgatctcttggactcctaagaggacttccttattaaagaaaacaaaaaacatgttaaggtaaaaaatgcttatgctctagaagtagaaaagtgcgaaaaattatctagtgagctaagcacttgccatgagactattgacaaccttagaaatgaaaatgctaatttgttagctaaggttgattcaaatgtttgtaatgtgtcaattcccaatcctagaaatgataatgatgatttgcttgctaagattgaagaattgaacatttctcttgctagccttagagatgaaaataaaaaattgcttgctaaggctaaagattttaatgtttgcaatactaccatttccgaccttagaagtaaaaatgatatattgcatgctaaggttgtagaattaaaatcttgcaaaccatctacatctaccgttgaacatacttctatttgcactaaatgtagagatattgatattaatgctatacatgatcacatgactttaattaaaaaacaaaatgatcatatagctaaactagatgctaaaattaccgagcatgaacttgaaaatgcaaaatttaaatttgctcgtagtatgctttataatgggagacgccctggcatcaaggatggcattggcttccaaaagggggacaatgtcaaacttaatgcccctcctaagaaattgtctaattttgttaagggcaaggctcccatgcctcaggataacgagggttacattttgcaccctgccggttatcctgagagcaaaattaggagaattcattctaggaagtcacactctggccctaatcatgctttcatgtataagggtgagacatctagttctagacaatcaacccgtgctaaattgcctaagaagaaaactcctagtgcatcaaatgatcatgacatttcttttaaaacttttgatgcatcttatgtgttaactaacaaatccggcaaagtagttgtcaaatatgttgggggcaagcacaaggggtcaaagacttgtgtttgggtacccaaagttcttgtgtctaatgccaaaggacccaaaaccatttgggtacctaacgtcaagaactaaatttgttttgtaggtttatgcatccgggggctcaagttggatcatcgacagcgggtgcacaaaccacatgacaggggagaagaagatgttctcctcctatgagaaaaaccaagatccccaacgagctatcacattcggggatggaaaccaaggtttggtcaaaggattgggtaaaattgctatatctcctgaccattcaatttcaaatgtttttcttgtagattccttagattacaatttgctttccgtttctcaattatgtcaaatgggctacaactgtctatttactgatgtaggtgtcactgtctttagaagaagtgatgattcagttgcatttaagggagtgttagagggtcagctatacttggtagattttgatagagctgaactcgacacttgcttaattgctaagactaacatgggttggctctggcaccgccgactggcccatgttgggatgaagaatcttcataagcttctaaagggagagcacattttaggattaacaaatgttcattttgagaaagacaggatttgtagcgcatgtcaagcagggaagcaaggttgtgttcatcatccacacaagaacatcatgacaactaataggccactggagctcctacacatggacctattcggcccgatagcttacataagcatcggcaggagtaagtactttctagttattgtggatgattattctcgcttcacttgggtattctttttgcaggaaaaatcccatacctaagagacattaaagggattcttgagaatggctcaaaatgagttcgacttaaggatcaagaaaattagaagcgacaatgggacagagttcaagaactcacaaatcgaaggcttccttgaggaggagggaatcaagcatgagttctcttctccctacaccccacaacaaaatggtgtagtgaagaggaagaatagaactctattggacatggcaagaaccatgcttgatgagtacaagacttcggatcggttttgggctgaggcggtcaacaccgcctgctacgccatcaaccggttgtatctacaccgaatccttaagaagacatcatatgaactcctaaccggtaaaaagcccaatatttcatattttagagtctttggtagcaaatgctttatacttgtcaaaaagaggtagaaaatctaaatttgctcctaagactatagaaggctttttactaggatacgattcaaacacaagggcatatagagtctttaacaagtcctctggacaagttgaagtttcttgtgacgttgtgtttgatgagactaacggctctcaagtagagcaagttgatcttgatgagataggtgatgaagaggccccgtgcatcgctcttaggaacatgtccattggggatgtgtgtcctaaggaatccgaagagcctccaaatgcacaagatcaaccatcctcctccacgcaagcatctacaccaactcaaaaagaggatgaggctcaagttgacgaaggagaagatcaacaaaatgagccacctcaagatgacggtaatgatcaagggggagatgcaaataatcaagacaatgaggatgaagaaccaaggccgccacacccaagagtccaccaagcaatccaacgagatcaccccgtcgacaccatcctcggcgacatccataagggggtaaccactagatctcgtgttgcacattcttgtgagcattactcttttgtt

SEQ ID NO: 38144 - DNA, 383 bp, Zea Mays
aagaaattgtctaattttgttaagggcaaggctcccatgcctcaggataacgagggttacattttgcaccctgccggttatcctgagagcaaaattaggagaattcattctaggaagtcacactctggccctaatcatgctttcatgtataagggtgagacatctagttctagacaatcaacccgtgctaaattgcctaagaagaaaactcctagtgcatcaaatgatcatgacatttcttttaaaacttttgatgcatcttatgtgttaactaacaaatccggcaaagtagttgtcaaatatgttgggggcaagcacaaggggtcaaagacttgtgtttgggtacccaaagttcttgtgtctaatgccaaaggacccaaaac

SEQ ID NO: 38145 - DNA, 476 bp, Zea Mays
aagaatcttcataagcttctaaagggagagcacattttaggattaacaaatgttcattttgagaaagacaggatttgtagcgcatgtcaagcagggaagcaaggttgtgttcatcatccacacaagaacatcatgacaactaataggccactggagctcctacacatggacctattcggcccgatagcttacataagcatcggcaggagtaagtactttctagttattgtggatgattattctcgcttcacttgggtattctttttgcaggaaaaatcccatacctaagagacattaaagggattcttgagaatggctcaaaatgagttcgacttaaggatcaagaaaattagaagcgacaatgggacagagttcaagaactcacaaatcgaaggcttccttgaggaggagggaatcaagcatgagttctcttctccctacaccccacaacaaaatggtgtagtgaagaggaagaa

SEQ ID NO: 38146 - DNA, 440 bp, Zea Mays
ggccaacgacgcggaggtggagacagggagcgggtctgcgatttgctgcgccattcatgcggtgcacgatgaccagagttgagggatgcatctggaatgtggggaccgcctggcagtgggatttgcgcaggggtatgccagggtgggtccaagcgggtgtgagagaggaggatgggccgagggaaatggacttggcccaagtctggacaggtgaacttctcttttttttctattttcttttcttgtcttctttctttttttttaatttttagattcctaatttaaatacccattcaaattcaaacttcctggccaatttgttctctcattaaagactcattttagacaaggtatggataaatttgtctaaatttagtatttatttcatgataattattgctctctttctccaattctagagtttcttttagatctcaaat

SEQ ID NO: 38147 - DNA, 397 bp, Zea Mays
ccggcccatcgtatgacgaagagccggcccggcgtgctcctcggtcctcccccgtctggttcggcagcggcagcagcgcgaagggagttcctcagcagggtagccatgcttggtcttcgtgcccgcgcagcgtcgcagctccagcgcccaaccccgtctccctcttccgcttcctcggcgtcgttctcgctcgcgaggctcgggtgcgcctccccgctcgccgccctcgcatattccgtgggttgttctttggaatgattccgaaactaactttacttctgtggggcttgttccaagagtgatttttttcttgtgtgtagctagtctcgggagttaattcctaggtcctagcatattctagtagttccatgttcagaaaattcaccgacaatttggc

SEQ ID NO: 38148 - DNA, 271 bp, Zea Mays
gttcatccatcgggctgatgccacctggtgccccggtcgctcccgtgcatgtcacctgcaggatacagccttcagactattacgtacggatagttgggttggttactctgccttttagaaagttaattaaccaagttgttgttttgccgcattgtcgcgcggatgacacactcacacatgcgggccaactccgatccggctgagttccgtaggaaaaaaaatactcctgtgacaaggattaccatccgaagaccacggcaaccaaaaaaaa

SEQ ID NO: 38149 - DNA, 2606 bp, Zea Mays
attcgacacatgaaaagggagctgcgcccagggacgagttggatcagttttgtgcaaccacatccatctcatacgaagagcccaacacatctcgggtagactggagatgcccagaccaccaagcctgagagggtgacaaactctcccccaggacacaagacaatgaccacccttggcctatttgcgacctctccaaagaaagccttttttgattttgtcaatggcatcccaggcccaggaagggaaatcgatagccattgctaattagaccattattccagtcaaaacatgctgaacctggatccttctacccgctcttgtcaatagatctgccttccagttagggagctgccttgcaatgttatccacaaaaggttgtacttggtctttagtaagcttgactagggagagaggaagaccaagatactgacagagaaacactgacagcgcacaaggcaatagattttgagtaaccgtaatatcctccacagagcattggataggatagacattggacttgctttcattatgctgaaggcccgaggaggcaccaaacaaatgcaaattctccaaagctgctaggatatcatccgccaccgggtgcaggaatatgccacattgtcagcatacatagagacccagtgcaatctctgtgatggtgacaaaggttgtaaaagtcctgcatcttctgctctagcaaataacaaacccagaatgtccatggaaagaataaaaagcatgggagaaagtgggtatccttgcctaagacccctccgatggataatgcactatccggggaaaccgttaagaagcacttgagtggaagaagaggagagcagcccacagataatatccctccaaatttgaccaaaaccgaggtgtttcatgacatcaataagaaaaggccaagagactgaatcgaaagccttagtgatatccaacttgaagagaagactggcctttttctgatgataaagtagccgcgaggtctgctgtaccaacatgaagttatcctaaataaatcgcccctttatgaaagcactttgactgcgagagaccatctcatgaagccttgcagccaatcgattggcaaagattttagtgatgagcttagcaacactatgaaccaaactaataggcctaaaatccttaacctgggcagcatcctcctttttagggatcagagtgatgtatgctgaattgagtttgccaaagttgttgaattttctgccccaaactgctgacaccactttcatgaaatcatgtttgattatgtgccaacagactctgtagaatcgtccagtaaaaccatcgggtccaggtgccttatcaggggggagacttacaatagtgtcccatacctctttttcagaaaaaggtgcatccaactcagagagttcatgactgggaatagcaagagcatctaaatcattgattctatctctgcccacatttgtaccaatcaggttgaagaagaaatgatccactgctgcagccttctcatcatgcccagttaaggtgacatccccttccctcagagaggttacaatgttcttccttttacggtgtctggcatgcaaatggaatagcttagagtttgcatctccatccttgagccacgatattctggattgcagcctggccatggtccttctcaaggaagaaagcagcagggtatgcttctttaacttattctttagccatagttcattcatggaaaggatcctgtcatcctgaccaatctccaacctatgaaggatttccttggccatggctaattggaacctgatgtgtcccacctgattattactcgaaataagacttttagctgtcttctttaacttcagaaaaaaggattggaaaggacacatctccctagtaacaaaatccgaggcggtctgaacaacatcgtggaacccctccaatttaatccagaaagcttcaaaatgaaatattctttttcctaagatattatcatgaaggcccaagatcaagggtcagtgatctgagtcaatagaagcagaactctgaagcagaacgttaggaaagatcatttcccagtctactgaacaaaaaactctgttcaatttgacaaggacaagggcttcacgctgatttgaccaagtaaagcgacgtccattcaggggaatctccttaagagccacatcttcaattagccttctaaatcggtgcatcataggacgattgagatttgaattgtttttatcaatcgcatgaagaataatattgaagtccccaacaacaagccatggcccattacaaacagtcctgatagacctcagctcttgaaggaacataaccttttcttgatcgtcttggggcccatacacactattggagtgaatattctttatgttagggctaacccaacagggtagctatatagtgtttacatgggccacatgggcctagccttaacaggcctaatactctaacaccccccgcagtctggactaccgacgcagcggagtacacagactggactcaaaaagaagtacatcacacaataggaatactctaacacccccccgcagtctggactaccgacgcagcggagtacacagactggactcaaaaggaagaag

SEQ ID NO: 38150 - DNA, 279 bp, Zea Mays
gtgacgaagacgaagaagatgtggcgtgcggaagccgaagggtgtagaggggccccgtgctgtcacatcggaggagggggcgccgagttgccgagtccttcacagtaagaccagaagagtcaaactcgacagaacaagaattatcagcagtaaaccgatgaatagaaagaagattgtggaccaaagaaggggcgacaagaacatcgggaatgcgaaaagagccgggagagccggcggcacccacagatgtgacaggaagacacgagccattcgccacca

SEQ ID NO: 38151 - DNA, 217 bp, Zea Mays
tccccatcctgctcattggcgagcaacgtggagcagccaccggccaagcagcaagggggtagaagacgaggtcgaggaaggtcactggctggcactggtgtagaggagaggagggacccgccgcacggaacgcgcgacgccaccagcggcatggcgtcctgagccctggcatggcacccatgggcacgacgcccctgtacacggggctgaaaccgcc

SEQ ID NO: 38152 - DNA, 468 bp, Zea Mays
gtcactttcagtatttacactgatgcttgtctgactggtgtgggagcagtattggttcaaaaagggcacccgttggcatatctcagcaaagccctgggacccagaaatcaaggtttatctacctatgagaaagaatacatggctattctgctagcagtagcacaatggagatcatatcttcagttggttgaattctacatctacacggatcatcagagtttaactcaattaaatgagcaaagacttcatactatgtggcagcagaaggtctattccaagttagctagtttacaatatagaatcatctataagaaaggatcagagaacactgctgatgctctctcacgatatcctcatacccagggacaattgtttcatgtgtctcactgcacaccaatctggatacaggaggttgtgcaaggctatgaacaagatgatttagctcaatagctattgagccaactggcg

SEQ ID NO: 38153 - DNA, 728 bp, Zea Mays
gtttcgttcacacatgcccgggcaaatggtttcagtggctcccagttgctgaattttggtataacaccaacattcactcttccttgggtacatctccattcgaagttttgtatgggtatctacctcgccactttggtattcaggattccacggtggttccttttgatgatctgaattcttggctgaaagacagagagttggttactaagttggctcggcaacacttattgcacgctcaagcttggatgaaatatcaagtcgataagaatcggactgaacgagtatttcaagtgggtgataaagtgcatttgaagctctagccgtatgttcagtcatctctcgcaactcgatccaatcagaaattggcgttcaaattttttggaccttacacagtgctacaacgcattggtgatgtcgcatacaaattacagttacctgacagttccaacatgcatctagtctttcatgtatctcaattgaagactgtgttgagcagagatcataaactaattcctcagctgccagatgatgctaatgtcttttagattccagttcaaattcttcagagtcgtatggtgcagcgttggaggctcttttgtggcacaagtgctggttctctggtcaggtttggatgcttcattagcaacatgggaggatcaggatgctctgaagaatcgatttcccaatgcaccaacttggggacaagccatatttgaaggagaggggaa

SEQ ID NO: 38154 - DNA, 88 bp, Zea Mays
aaccacaaggtgcagttggtggatgacctgaagaatgatggacatgaccagtggatgctcgccaagcgagtgccacccaacaaacact

SEQ ID NO: 38155 - DNA, 235 bp, Zea Mays
gagaagaacaggtggtccaggaggagccctacaacgaggaatatgagcttatctaggttgcgtctcccagtgtgcttgatgacgacaaggaataattatttagttcattttattgttatcatctatttttgtaagacttccgctatgtaataatgatacttgtgacatttatctctatacactttgtcattatatgtgatgttctcctttggcgcacatatgagacgcactcagc

SEQ ID NO: 38156 - DNA, 1250 bp, Zea Mays
ccccgggatccacaaacaccccaggattgctactaaactacacctctaacattcatatataaaattttgacagcatctcctttgaaaattgcataaacgaggaagcaacaaagtataaatagatatcatgatatgaaaacataatcgacattaataatctgctagcaatgggaagacaaccataacagcatgaactaaattaaccagtgcgcacaactagttagaaacaaacatcctttgacaagaagcttctaattaaatcataactgtgcctaagcagcattattatgagagtgaaggtggatgtgctgctacttcccacttccctggatgagcaacaagcacctgcattgagtaatgcaagagtgagaagaaacatctcagcaagcgaattgttttgacgagatattaaaccacaaattgaattaatcaacatcttaaaagaatcacaattaagatcaaaaatacttgtagatatagaactcagtagtcccaatataaccaataccatctcatttcctcgaacaaccacaataggttctataacacttccctgcgtcaacaaaacctgcaaatatcacttcaatgtatgcataggaatgcaaagtgtaggtactctgtcttcatacatctaagggtataaaaccacatcatctgcaaatatcacttcaatgaatgcatatgaatgcaatgcatatgtcctctgccttcataccgctaagggtatgaagccgcatcgtacccctcctcgggcaacgtacgatgctaagttgtaccggtacgatcggaccataggtcacgacccaacttcagatgcaagtgaatcatgcaatgtatatggcatgatgcatttatcaatatacttcacttccttcacatataatacaacctcaaataatacttcatttaccttcagatacaataccaacctcaaataatacttcatttaccttcagatacaataccaacctcaaataatacttcatttaccttcaggtgtgtgaattaatctcatgagtcattctcgaatcataatcatcatcaatatatgattgagcatcaatataattcaagcaagtaaagcatcaccatataatccaattatgaaagaatccaatacttctgaatattagagtgtaggcaatagaaataacatgtcagaacggaagcaaccaccgctacattcacttgccttcatcgaagaagaagaaatgtactaggcatgatctggagtgtagccacctgctagc

SEQ ID NO: 38157 - DNA, 592 bp, Zea Mays
gaaaaactggcataaacagaaactgtcgaatctgccattccgcagaaaaccaaattcgagatcaaaacctaaccccacatctaatccaacctctaatcctttaatccccatgatccacaacctccaaaagcacataattacagggaggaacaaggtattcatccatacctagggtattccccaagaaaatctttaagaagagatggggaagaacatctccttgatcctctcttcctcttcaattcaacgtgatcctcctcttctcgatccttgctgcgtgggggggatctagagggaggagggagccatggagagggtagggggtggctgccaatggggaggagagcaagggagggagggggcggctgcaatccattggggagaaggagagggggcggctagggttggggaggagagggggggggctcccatccaccggatcgagatcaatggtccaaactcgctcttccctttgagctcccgaccccagcgaaaaaatgccaaaagatctactgttttctgaggaatgcctcctgaagctccaaaccccaatgccacagaacatgaaagaaaagagaaaaagaagtttaac

SEQ ID NO: 38158 - DNA, 378 bp, Zea Mays
ctaaactacacatctaacattcatatataaaatttcgacagcatcccctttgaaaattacataaacggggaagcaacaaaatataaatagatatcatgataagagaacataatagacattaataatctgctagcaatggaaagacaaccataacggcatgaactaaatcaaccagtgcgcacaactagttagaaacaacatcctttgacaagaagtttctaattaaatcctgactgcgcctaagcagcgttattatgagagtgaaggtgaatgtgctgctacttcccacttcccttgatgagcaacaagcacctgcattgagtaatgcaagagtgagatgaaacatctcagcaagcgaattgttttgacaagatattt

SEQ ID NO: 38159 - DNA, 797 bp, Zea Mays
accataggtcacgacccaacttcagatgcaagtgaatcatgcaatgtatatggcatgctacatttatcaatatacttcacttccttcacatacaatataacctcaaataatacttcatttaccttcagatacaatatcaacctcaaataatacttcatttaccttcaggggtgtgaattaatctcatgagtcatactcgaatcataatcatcatcaatatatgattgagcatcagtataatgcaagaaagtaaagcatcaccatagagtccaattatgaaagaatccaatacttctgaatattagagtgtaggcaatagaaataacaggtcagaacggaagcaaccaccgctacattcacttgccttcatcgaagaagaaaaatgtactaggcatgatctggagtgtagccacctgctagcgggcataaaacttagtacaaatatttcacaaatattcgccaacaatcaacaaatcgatcctacacctgaaaccaagacctggtggaaaacctcccactctgaaccacatgccatacaacaggaatgttgtttgttaattttgtatctttaaaattataacagtggtgatatcaaacaaatactccatgagtatctacacaaaatattctacaacttcggtattcgatggataattaaattctgccatctataagttctaaaacatctaacaagataactgactgaatctgttttagacagcagcatagttaactttcaaaattcgatatctcacaaactactcaaccaaaaatcatgaaattctgctgaaaataag

SEQ ID NO: 38160 - DNA, 1639 bp, Zea Mays
aacaccccggggtccaccaacaccccggaatgctactaaacaacacttctgacatctatatataaaatttcggcagcatcccccttgcaaaattgcataaatgagggggcaacagtgtataaacatatatcatgacaaaaacatactaagtattattaatcggctagcaaagagaagttaaacatacgacatgaagtgaattaactagtgcgcacgactagttaaaaaaacaaacttcctttgacaataagtttctaattaaatcatggctgcgtctgggcagcgttattgtgagagtgaaagtggacgtgctgctactcccctcattcccaacatgtatcaagtacctgcattgagtaatgcaagagtgagatgacacatctcagcaagtaaaataatatcaaactgtttaaccacataagaacattgttttaccaccacttgattccacaaccttcttattacgaaggtgtagcacgtatacaacgtacaacacacctagtcaccacacctcgcaggtagaaaccacaatagtaacatagtaatgtcacacttcatatatacctcatgagtgcaaatgtctgcaaatgcaaggatgacttctgccttcatacctctaaggatatgaagccgcatcgtacccctcctcgggcaacgtacgatgctaaaaatgtaccggtacggtcggaccataagatcacgacataacttcaaaattcaagatggatgatgcgatgagcatgtcatgcctacaacacttcatataacgtgattcaaaaaaatacttcaacttcatccaagatgggaatcaaccacataaatcattaccaaactatgatcatccacaatattagacaattgagaattaatacttccaaacaaataaacatcatcatagaattcaatgattaacataattaaaacttatgcatactcaatgtcagggaataggatgcaacccaaacggtagcaaccaccactgtatttacttgcctttaccggaagttcgggaaaatccctaagtatgatccggaagtccatcacctgttttttacacacaacttagtgcaccaatttcacataatcaggctcataaacgacgccgcacctacgcacaaactcaaaccccgccgcgggttacatctctccccacacccaccaaactgcagcggcgctgcttaataatttcataactttaaaattatgacagcagtggtaacaaaaaaaactccagagacatctacatgaaattccccacaagttttgtatacaatttataattaaattccaacatctaattagcccaaaacagtccacaagatgaactctgtaatctgtttttttgtcttttggacagcgacatacccggattcaaacagcgatatcttctaaaatataattccaaatcaagcacataagtacttattggaaagataagacaaagccctacatgattatcatactggttaacactaattacctacgaaaaattcccagaaactgctaatactactgctgttcacccacctgaaaaatctgtttttttggacagcaacataactggattcaaacaacgatatctcctaaattataactccaaatcgagcgtataagtactcgttggaaaggtatgacaaag

SEQ ID NO: 38161 - DNA, 495 bp, Zea Mays
gaacctcccaagttattgggcccacatgcacctgtccttgtcccaaagacctcagacggctgtacatgtgcaccagataacttaacaggatctgtccgattgccccaaggacatcggataaaccacttacaaccagaaccgcgggattaagtaacacaaatcacacacaccaatattgttgcagcggaaatcttactaccaaattttacaggttacaaaaattttatattagtttatcagagtgattacaaaagtataagtttgaaatatatatgctagctcaagggatcatcctcaataagaagtatagaagggttacttagacttataagaaggccgagcccaccggcacttaacaccatcaacaacagcacaaagttagaacctgaaaaacaacagggaataaaaccctgagtatggaattactcagcaagtcttacccgactaaagaaaagactctcaagggtatgctggttatatgggagtcaaggtaag

SEQ ID NO: 38162 - DNA, 2310 bp, Zea Mays
atcaagcctacatcgacaaggtccttaatcgactcagacggagacactacaccgagactcctttctcgtgcaagtcacccgcccggtctcagcttaatctttttaacccaaaaacttggtacctggcagaggtacatcttttccgatgttgaatccatcatgaccatgttggattcaccatcaagttttattttcgaaaacaaccctcccactttgccaaacatcttttgtaaaacaaatccttttgtttttctaaagcaatactaagcatagtaaaatctttttgtaaaaacaggatttcaaggagggtaatcaagatcaaggaaggtaatgcaggaattgtttaatcaatcaactcctatcacctaatgcagcaatcaagtgagaaagattttaaaaacatcaagggaggtggcaaatgcaccggggtttgcctgagtaacactaggttagtgttgttaggtgacgtccacttgacgatcagcttttgggtctgacacttgttcaatttatccatcttcagattcgtccatcatcatcaccatgcggagtagcccgcgcttggggtcgacttggctcttcttccgcatcacgcgattatttatcgtacctcatgagatgcatgatgcacatgtatgagcacgagtatacgagtatattatagataatctacactaaaaaggatgaaacacttaaaaaccaagcgttaagcaccatggatatcacagcagggcatcgactacatccattaactaaattgacatattacactagaaaatctatttttattcctagctttttattaactctttaaactatgtatcttaattacttgatttaccgatttatctaaatcgatcatcacaatatacgcatgctaaattaataacatttattgagaccaataattctattcactctatttatagactcagttaacgggaatacgaatcaacttacgctgactaattcgacgcgatagtcgcaagcacgacgacgattccggttgacgccatctagggactttttttttggtaatcaattgctgcagatcttttcctcgactgaataactttgtcgaaccgaacttgagtcgcgcaggatgttcgagctttttgtcgcgcacttggtaaacaccacgctgctagcttcgtcttcatccgattcttcggatttcttgctaacgcacggaacaacgacgagatcatgtttagagcgagctggtgaggtggggatcgagctgggatgacgggtttgacgactcgacgataaacgcgagcacacgcgaaatccgatggatgaaaagcgagcgcacacggggctggcagcccggatttgaggcgtggaaaaattgcccacgacgaaatcagccgagcaaggagcgctcgtgaactttatggcggggtcggcagcagccagagcgcacggcgaggtaatttcgtcgatggcgaacagagagcttcgcgcgcccaacagagaacttgcgcgcgcagtgaagaacgacgagctggaaaagctgcacgcgatctcggcgcgcagggaaaacactaaagcagcagccgcagcgagatggacaggggcgcggctggagcttggagacggactggggcagggagaggcgaccagcgcgcaagggagacgagctggggcgcggcaccaggctgaggctctgcgcagggactccagggagttgagcgacggcacagggacgagcggagcttgggatgcgcgagggagcagccataggggagagacagggggatgagcgcaggaatccaagcaggaagaacgagctggagctgcgacggcgacttggaacaaggagcacagggaggtgggcggcgtccatgggagggagaggtcacggcgccggggctggggcgagcaccagggagtcgccacgggagaggggaaagggaaccagcgagctcagtcgagcgcgcgcagggagaagctgggcgcggcaactggagttccaggcgagcaggttggacgcgtgccatggaggaacgccggtgaggaagaaaccaagctcggcgagcagagcagagcagggaggaagggagcggtgttcctgtgtactgcacgcatagatagaaggggcgccgtggggaggagccgctcggcagggatggagcgaggaagctccagcgcgcagagagaaattgggagaaggctgcagcgctgggaaggaaaacggctgtagaagaagataaagatgatgctcagcggtggaaaggatcagacagagagacagggcggctgggagatgaagatgccagcagaaaaaaatcagaggagggagaggat

SEQ ID NO: 38163 - DNA, 2299 bp, Zea Mays
atcaagcctacatcgacaaggtccttaatcgactcagacggagacactacaccgagactcctttctcgtgcaagtcacccgcccggtctcagcttaatctttttaacccaaaaacttggtacctggcagaggtacatcttttccgatgttgaatccatcatgaccatgttggattcaccatcaagttttattttcgaaaacaaccctcccactttgccaaacatcttttgtaaaacaaatccttttgtttttctaaagcaatactaagcatagtaaaacctttttgtaaaaacaggatttcaaggagggtaatcaagatcaaggaaggtaatgcaggaattgtttaatcaatcaactcctatcacctaatgcagcaatcaagtgagaaagattttaaaaacatcaagggaggtggcaaatgcaccggggcttgcctgagtaacactaggttagtgttgttaggtgacgtccacttgacgatcagcttttgggtctgacacttgttcagtttatccatctttagattcgtccatcatcatcaccatgcggagtagcccgcgcttggggtcgacttggctcttcttccggatcacgcgattatttatcgtacctcatgagatgcatgatgcacatgtatgagcacgagtatacgagtatattatagataatctacactaaaaaggatgaaacacttaaaaaccaagcgttaagcaccatggatatcacagcagggcatcgactacatccattaaccaaattgacatattacactagaaaatctatttttattcctagctttttattaactctttaaactatgtatcttaattacttgatttaccgatttatctaaatcgatcatcacaatatacgcatgctaaattaataacatttattgagaccaataattctattcactctatttatagactcagttaacgggaatacgaatcaacttacgctgactaattcgacgcgatagtcgcaagcacgacgacgattccggttgacgccatctagggactttttttggtaatcaattgctgcagatcttttcctcgactgaataactttgtcgaaccgaacttgagtcgcgcaggatgttcgagctttttgtcgcgcacttggtaaacaccatgctgctagcttcgtcttcatccgattcttcggatttcttgctaacacacggaacaacgacgagatcatgtttagagcgagctggtgaggtggggatcgagctgggatgacgggtttgacgactcgacgataaacgcgagcacacgcgaaatccgatggatgaaaagcgagcgcacacggggctgacagcacggatttgaggcgtggaaaaattgcccacgacgaaatcagccgagcaaggagcgctcgtgaactttatggcggggtcggcagcagccagagcgcacggcgaggtaatttcgtcgatggcgaacagagagcttcgcgcgcccaacagagaacttgcgcgcgcagtgaagaacgacgagctgtaaaagctgcacgcgatctcggcgcgcagggaaaacactaaagcagcagccgcagcgagatggacaggggcgcggctggagcttggagacggactggggcagggagaggcgaccagcgcgcaagggagacgagctggggcgcggcaccaggctgaggctctgcgcagggactccagggagttgagcgacggcacagggacgagcggagcttgggatgcgcgagggagcagccataggggagagacagggggatgagcgcaggaatccaagcaggaagaacgagctggagctgcgacggcgacttggaacaaggagcacagggaggtgggcggcgtccatgggagggagaggtcacggcgccggggctggggcgagcaccagggagtcgccacgggagaggggaaagggaaccagcgagctcagtcgagcgcgcgcagggagaagctgagcgcggcaactggagttccaggcgagcaggttggacgcgtgccatggaggaacgccggtgaggaagaaaccaagctcggcgagcagagcagagcagggaggaagggagcggtgttcctgtgtactgcacgcatagatagaaggggcgccgtggggaggagccgctcggcggggatggagcgaggaagctccagcgcgcagagagaaattgggagaaggctgcagcgctgggaaggaaaacggctgtagaagaagataaagatgatgctcagcggtggaaaggatcagacagagagacagggcggctgggagatgaagatgccagcagaaaaaaatcagaggag

SEQ ID NO: 38164 - DNA, 681 bp, Zea Mays
cagcgagtcatttcgacatactttattacagacacgacccaacccacactgcccaagcggtgtccggacgcggggccctgctacatgggctgaattgcacacgggcctctccctgctctagggggaggccctatggtcttcgcggggccttcgtcttgtcttgtcggagcgaagggggccgaacaggcctccatatggacggtgtccttggtctgtccggcggggcctacggacgcggtcttcgttcgtgcagcgcgaggtagatgtcgtcgagcgaagggtggcgtgttcgccttcgccccaacacctctcaagtggcactagataaccataatacaaacgagttttcctcctctcttaatagtatgactatgttcccgattaacccatccattttacatcctttaatcacctcatgaccagctaagacaaaccctactattatgcatttcccttgaaactttcatcatgctttgttgccatcttcaacatgacatccatgtatctgaaagcatccttgtggactaagacttttaacctacatatctcagatgaatttttagtccacaagtgttgtcattagttaccaaaacccaaataagtagattgagtggaaaaatattacaactcaaaacacaagagagaagtgattttcgctgaagttcaagttcccactttgag

SEQ ID NO: 38165 - DNA, 485 bp, Zea Mays
ctctcgaccacttccctcttctccattagttgaccttttatttattgtggcaacatgacaaccctcaaaaggcttccccatggctttccataagcatgaacggtcacttgacaacgccaagagtaacacatgcttcatgaataggtttggcttgctctcttttgctttctaacaccaaatctctcaacccaactcactatactcctcaaattccacaacctgagaaaaagggcttgggagtgctctcaaggcttatgataatctctaatatcaccttaaatcggtatcccacttaagaggcatgggacgagacattcaccccaaaactagtcatcagagctctaaatcaaaccattggacctacaaactatgggacttcaacatctatgccacttgcagtgaatatgatagcaaggtggagtgttggttaacaacaccaagctcaatggcaagagcctaaaaccaaacatgatggcaaagtagag

SEQ ID NO: 38166 - DNA, 377 bp, Zea Mays
caagaatctagcattttgtatgttgaaccccaccttgttttaacatcaaggcacaacccttgtcctactttaacagaatattggttgcaaacttctacaaacttgtacatacgggttggagacctcttaaagtacttcactgtgtttctaagatcacttatcaatgaatcaattggttgcaacccatcattcacaaccaaattgactatgtgggcagcacaacgaacttgaaagtacatagggtcaacgctcgagttctttctagcaagaaacttggacttcagatttgtaatagcagaatcattactagaagcattatcaagagtgattgtcaagatcttatcctcaattttccattcaaccaaacattcaaaaac

SEQ ID NO: 38167 - DNA, 405 bp, Zea Mays
ttcatatattacactcgggaaacattgttaaatcatgttcttgaggaccttcgaaagacgaaggcccccaacaggtattaacataagcaatttcgatatctcccttttgttggtgatcccttagaaagtgatactgaatgtctatgtgcttagtgcggctatgctcaatgggattatctgccatgcggatgcactctcatttatcacataggagagagactttgctcaatttgtagctatagtccctgagggtttgcctcatccaaagtaattgcgcacaacaatggcctgtggcaatgtactcgacttcgacggtggaaagagatacgaagttttgtttctttgaagcccatgacaccagggatcttgccaggaactgacaagtccctggtgtgctcttcctat

SEQ ID NO: 38168 - DNA, 3916 bp, Zea Mays
cgcttggttttcttcctcccagtcgcgcctccctgagctccatggtgcgcgctccctacccagccggcgtgcgctcatctctctgagcacctgcacgccgtggcttccctctcccatctcccacggtcggctccctccctgcttttctctccctatctctatccatggcgcgcggcttcgatttcaccacgtccagctctgccatggccgcgccggcttggagcttccatgaccgccgccctgccctgccttccatggttgtgcgcttgctctgctcggaatccctcccatggcgagctcgccggtcatccctgccccagctcggatcccctccctctgctcagcccaccgagtcaactcgcgccggcgctcctccttcagccacgccagccgccgagctccctccactcgtcttccctctgttctgagcgtcgtcgccttgctgctcgcccctgcgccctcctgctgctcggtgcccagccattcctctcttctccctcaagctcgcccttgctcgaacgtgttcccctgcgtcctcccctgcatcgcgcgctccttgctccaagctcgtcacgcacgcctaggcgctgcccatggtggccgcctgctctccctgcgtcgcgccaagtttctccctcgccatggccggtcgagttcttcccagccgtgaaactccctgcgcgctctgtttctctgcgcgcgcgtgctcgccggctgtgcagctcgtccatggcgcccatctctctgttcgcctctgtgcgcagctccccaagctcccatggctggcgcttggtcccaactcgccgcgctctgccccctgcgcgcagctgcgagctccacttggtcgctctccctgctcgcccaggttggatggggatccacctggtggcgtttgtggcagcgagggcttcctgcaggtgtttcatgtgtcggcactgctgattggggccgttgcccgtcggtccagtcagtcgtcgtcgatagggttcccctgcgtgtttccccaaaaaaccgccgcgtgtgctggtcaccttgtgtgttcggccgtgggcgccgtcaagccgtcgaatcccgcccaccctctgccagccgctgttctctcgtccgtgtggcagtcgacgtcgtggagttttgtttggtcggctcgtcgttgacctcgtcggtgtcgtcaaaccgtcgaaccctttcctcagtcgcgtcaggtcttcatgtctgttgtcgatcagctaccgaagcaagtggccggcaggctggaaatcggaatggttttacgtcaaagttgacgatgacaaggagaaactggtacagagcccgcttgaactgatcttcggagagaccagaccccaatgcagtatgacaccagaaggtccaacgcaaatcgcgttggctgaattcaggattattgcagagcacattggcactagagatttagtgcaggaattttttgctttcaaaatatttccaactatgaaggaatgggctatgccgaagcttgaaagagagaagaaagagggggaacttgtccgactgccctaccactataagttcaagaaatattttaaagcaccctgccaagaatgactcgaaacaatcgaagtgatgagtactgaaattcttgggaattattctaaaaaagaggatcagttgatgacagcagcctttggcacccggccgaaacgaaggctaaacagagtgcttgatgctataggctttgaatatcctgattatgggcggctcgataagggtgccgaagggctgaaaaggaaaagagtagcaggcactttgattaaagacgacgaagatcaaccaaaaaagaagaaagaaaagtttgaaccgaaggtagctgcttcaagaaaaagaaaagctgtatctccaaagcctgtatctccagaaccagagagattggtccgagatgaggaagttcctgcgacaccttctgctgccgaagtagaagaaattctaaaggtaatgactgaatctttgcctgtcaagctaagtccgctggcaccggaactgacaaagttttttcagaaggacaaagaagcttcggcagcagaaagtcctgcaaagccaaaaaacgcagaattatccaagtgacagatgtgattcatcaaacgccgccaccggtatcggcgtcaaaaattgttattgccgagaccgccgaagccgaagccgccgcagccgaagctaccagggctgaaaccactgaaattgcaactgccagagccgaagctaccggagctgaagccgccgaaactaccggagccgaagctaccggagtcgaagccggggctaccgaagattcaaacctgtaaaccacactggaagttattgacaatattcttctgaaaatggctgaagaagaagctgctgtggctgcggtgaacacggctactaaaaagggaaaagagcaggttgaagacattttggaggaagaaaaatttaactttcaagatttacttagacaagatttaactagtgctgaaaaagaagagctgaagaaatatgccatatcctgcggatataaaccagggtctatgctatttgttggggtcaacgaagggaaactaagatgccttcggaatcgcaccgaagccaaagttgttagaaccttctccaaaagcgttggcatgccgaagatagaagcagacctttgcagctatcagcgacaacatatcgccggtagcctgctctatgctaattttaaggtaaaaaatattattattattttattattattattattattatgtcgttttctgacgaaggttgttttggcagagtatactattaagtaaagtgctaaaaatgcaacaagatcttgaagaagagaagaataaagctatcatcaaggatttagaagaaaaaattgaaaattacgaagctgttctgaagaagaaggacttcaccattcaagaccttgaaatcatagctaaagaacacgaaggtgccctagaaaagaatgactttgttattcagtctatggaaggctccttggctgaggtccaagccgaaaatgacagtttaaagaatgaattactcaaaaagtcagaaaaatatgagcaagaaaaggagaagcttgaagcaagtctcaagactgaggtcgagaaaaattcaaatttgcaaaaatcatttaaggatctccaagagaaatgcctaaatttcggcagccgatgcgtgcaacggctgaaggacgtatttcactctatcggagccagttctgaaaaatttttaccttcagccgaaaacctgcccagcaccttggaacatattgaaggcgagattgatgctcttgacgaagttattggtgggcatgccgacttctgtgccctggtagcttctcgaggcacagctaccgcttttctaaaggctggctgtacgcacggaaagattgtgaataggccaaacttcagcttgtcagcagcagatttggttgatatcccaagcttagcccgaagcatcggaaatagatttatgacccaaatttgggtaaatggtgggcaaaaaatggctggtgacgaagctcgaagccaccttaagccagtgagaaacttatatttgttacttttaccttctccttgaaatttgcacctttcttattctgttctttaatatgtgcaggatgacgaagctgaagtatgacgaagttgaagtatgacggcctgaagcttaatagttgttataatagactttcctgcaaaaaattctgaagagatccttgtaatataattatggaaaaaacttatgtaaatttgtacataccttgtaatatatcttgtctcctttatccgtgtacaatatgctttgctgtgaacgaaactacacttttgagccgaaggcgaaaaacaccttcctttcttttcgcacacaacgaagcatgaaaattttcctctttcttcaaagtttttcctcattg

SEQ ID NO: 38169 - DNA, 374 bp, Zea Mays
gctgagcccctccatggatggcgcccttgtgcgcgcgccagatcctttccctccctgctcggattccgccagacccacgcagctcccctggtgcctggctcgccggcgtttggactgcggcttcctcctccaactccgttcggccaagagcccagctgccccttgcttctctccctccatctcccagcagcgccctgtcgaagtcctccctgcgcacgtcttcttccccgtcgtgccctctgctccatcttcaccagccacgcgctgtgaagcccctggcgtgtcccttgttttcccagccgcgcctgctccctgtcccacgctcgtccggtggcctgggcgcgttcgtgcggtccacttcggtgcggtacgcg

SEQ ID NO: 38170 - DNA, 782 bp, Zea Mays
ccagccatgagcgccgacgtcctatctctgtgctcgatctccctcaactccgactgtgttgtctgctgcgtcgagctcggggcctgctcgcaagtccttcagctcgcgattggcccagattgaatcttgcttcagcttgccgtctcctttccttgctgtggtagttggccactgctgctaggctttgctgatgcgcgtgatttgccggccatgtcccttcaccggtggtctcctcgacgcgtgcgctggtcgccttgtgtgctcggccgcgggcgccgtcgagccgtcgaatcctgcccaccctctgcccagccgccgcttgtcactgccccaacgctgtggccggctctggaccctgctggcgagtttttccccagcgccgtctgtttgccggtcatcttctgctcctccccatgtcggtgatgttctccgccaccgctcaaatttccgtgctcaattcgtggatgccccggctccgcggtaatcgtcgggtctcatcctcgacgtcggtcgctcctggtgccgaacccctagcttctggtgtcacgcatcttctcatcgtcgctccctgcgccagcgctcatactcgccatcagttgcgccatgtcgctgtgcctccttgcgtaagtgtcgtcgggcgcttgccagcgctttctctgctcgtcgacagctcaaccgtgtttccccgcgagctcgcccccatgctcgggctttgctagtagtcggctccctctacgtcgtgcccttcctgcccggtctcgcagacgccgagttcgcccagg

SEQ ID NO: 38171 - DNA, 236 bp, Zea Mays
ggactcttgggtgtggcggtcttggttcttcctcatcctccttttcttgatcatttgtatctcccccttgatcattgctatcatcttgaggtggctcatcttcttgattttgctcttcatcattttgagtctcatcctcattttgagttggtggagatgcttgcatggaggaggatggttgatcttgtgtacttggaggctcttcggattccttaggacacacatccccgatggac

SEQ ID NO: 38172 - DNA, 352 bp, Zea Mays
cttccatcctctcggacgctccctaccatcttcactatcgagctttcagccaaaacgctgtgggcctcgttccttccagtacacggtggcggtcgtaccacaaacattgttgatgcggtctcacaagactctcacctcactcggtataatattacaatggctcgtgcaagagacgaggggtttgtgggtctgctaacctcactcatacaactaggaacaaacctagagcaagcgccattgcggtctaactaacctgatcacttcgcaaagcacctacgctaatccccttgtgattctattgagcacttgggtgtttgagctgttggagatgtgtttctacatttgagcaaac

SEQ ID NO: 38173 - DNA, 332 bp, Zea Mays
ctgtagaacatatgatctagagcaaactaattagtccaattgtttgtgttggacattcaatcaccaaaatcatttaggaaaaggtttaaagcctatttccctttcacctacacgcagcacgaaacccttctatacaaggctcaagtgcacagaaaaatctatggaagtacaccttttcatctacaacttgggtgtctatctccaccacactattaggggcttttatcaaaatttcttccttccacctatacaacatactgaaactatcatcccaattgccatatatctcttttaaagcttcctgcattcctttccaagtcacatcataactg

SEQ ID NO: 38174 - DNA, 711 bp, Zea Mays
ctggtcttaggtggactggacaacatgatggatgagtagttgaaatttggggtgatcggatgatcgatgaatagtaacggtgaatagtaacggtaaaaagtaacggtaaaaagtaacggtaaatagtaacggtaaatagtaacggtaaaaagtaacggtaaaaagtaacggtaaatagtaacggtaaatagtaacggtgaatagtaacggtaaatagtaacggtaaatagtaacagtaaatagtaacggtaaaagtaacggtaaatagtaacggtaaatagtgatggtgaatagtgcgtatgaacgaacgatgaacgatggataggaactatgaacgaacgatgaacgatcgaatgatcgaacgaacgaacgatcggaatttcggcagcataacgacaggaaaaagattatttggacgaacgatcaaacgatcggacgaacggacgaacgaaccatgaacgatcggacgaacgaacgatcggaatttcggcagcataacggcaggaaaaagattatttggacgaacgaacggacgaccgatcgaacaatcggacgaacgaaccatgaacgatcggacgaacgatcaaacgatcggacgaacgaacgaacaactaagaacagggggacgaacgatcgaagaacgaccgaacgatccttgtgctagtgtgtgcttgtgtggaacatggagtgggtgtgtgtggggggagagag

SEQ ID NO: 38175 - DNA, 334 bp, Zea Mays
cagaggactcgcagtcgcagtgagagaatgatctccaccgttggtttgcccgtgctcacggctctcgaagcctgctgggacgacgtccaatcccgtggctgctctgccgcttttcgccatgtgtctcgttccgtcgaatcaaaatctgagaggggaggcgtcggcatgcagcctggagcaagcaacggtgtagtcaaaggcagcgtcggggacggctgaccgcggcaacagcctgcctgcgacaatcatccccgtccatggcgtcgccgaaatgggtcgcttctccgaacttggaacagatgatcttcaagatttagcgttcacgaagattttg

SEQ ID NO: 38176 - DNA, 351 bp, Zea Mays
cccacgcttggcccgagaccaacccgtcataaatgaccagctgcattaagggtgtgtttagttggatgtacaaggagggatggaagggggcggccacaatttctatagtgtttggaagagagtcacgtgggggcgaggtaaacaccagagtaattttttgtggcggcatgatcccgaaaaatcgaggggacgatgtcgtccccgtctcatcctactttgacctcaaaccgaacacatcctaactgcgcctagcgtcaagccacagcaggggcatcggaccgcctcccactcatgaccaatgaacccctcaggccgcatagtactcatgggctacgagcccctcagaccgcg

SEQ ID NO: 38177 - DNA, 5004 bp, Zea Mays
agcttgttttgcttgtactcgggcgtcatggatgtatttttcgcttttcttcataatttcgtgtgccatctcttggccaccatttacccagatgtcattataaaattttctgcccattaaacttgctttagccgagggatcttttgtatcatccacagagaaggcagctttggcctgggccagagtcttgacatggtcgcatcccgccttctccaggatggctgaaataccccttgcaccagagaacgcgcacacatccccgcgatcgcttagaatttcttcaaaagcttcggcttctccgcttatccattcgataacaccttcagggtcccctcgtatgaagttatcttcgttagaataggcgcccacattggcgaagctagcctttattttctccatgcagctcaaagatttttcaaaacatctttccttggatgcacgaagttcttcaattgtctgctctaaataatttttccaatatttgctgctctctcggttagcttctgcgagagcgcatttttctttagtttctgccaactgtttccgaagatcttcgatttcattcttctggatttcagcctgagccttgaaactagcttcatcttctttcacttttttactaatgaaatcaagattttgtctttttcaagacctttgttccttaattcaattacctccgaacgaaggttgttcagagccattgtatatccttcatcttcaatgtttttctgggcccttaatgcattgctaagaatcaggccctgcaaatggaagaaagaataagcatgacaaataaagtaccccatttttaagtttaaatataactcttatacctttatgctatttgagagcacctagagggggggtgaataggtgatcctgtaaaaacttgaaacttaatgccacaaaatttgattaggagttagcacaataaagccaagtggctagagaggagttcttgcaaaacacaataaccacaagaagatcaacacagataggcacagtggtttatcccgtggttcggccaagtccaacacttgcctactccacgttgtggcgtcccaacggacgagggttccactcaacccctctcaagcggtccaaagacccacttgaataccacaatgttttgctttgtttcactatatcccgcttgcgaggaatctccacaacttggagcctctcgcccttacaatttgatgttcacaaagaagcacggaagtaaggatgggatgagaaacgcacacaagacacaaaatcagagcacaaacacgcacacaagtcacaactcgaggtcacaacagaacccgaagagttctctactcaaatggagctctagttgctatcacaaagaatcaaatgctcggaattggagtcttggtgcttaggaatgcttagagaatgcttggtgtcttcctccatgcgcctaggggtcccttttatagccccaaggcagctaggagccgttgagagcattccaggaaggcaattcttgccttctgtcgactggcgcaccggacagtccggtgcaccatcggacactgtccggtgtggatttctttcttgttttggcgcagccgaccgttggcgatttggagccattggcgcaccggacactgtccggtgcacaccggacagtccggtgccccctttcagaccgttggcccggccacgcgtcatgcgcagattgcgcggccgaccattggctcgaccgaccgttggctcaccggacagtccggtgcacaccggactgtctggtgaatttttgccgtacgccaccgacgaattcctgagagcggccttttcaccaaggccagcctggcgcaccggacacttttcggtgcaccaccggacagtccggtgctcccagactgaactgtctttggctgaacaaagccatctcttttccaaattgatttctcctgtttccagtacttagacacaatacattagtccttaaaacaaagtactaagtcttagaaacatacctttatgttgattttcactttgtccatcatttggcatagattaacacatgaccacttgtgttggcactcaatcaccaaaatacttagaaatggcccaaaggcacatttccctttcaatctccccctttttggtgatttatgccaacacaacaaaagcaatacaaagatgtgcaacatcaatgcaaataagaacacagatttgatttgaatcaaatttggcatatttggatcattctttgccaccacttggttttgtttttgcaaatcaacctcaatttcctatctctaagtcaaacacacttgttgagacataaagagagttgttccaagataaattgatcaaagatttcaaaaactcccccttttcccataatcaaccattctccccacaagaggccaacttttgacaagagagacaataagagagttttgtcaaaccaaaagttctattctactattttcaaaattctcaagtggtagctgatccatttattgctttggccttaatttctccccctttggcatcaagcaccaaaacaagatcatttttggccttaaaaccccattgcctcaccaaaagtgtcaaataagagcaaaaggcaatgagagacatggagatgaacttggagtaagttaccctctcattggagtgcagtgaaagtctttcatggtacaagtccacatttccctttcaaacctcctttgagactaaattaagagaactcaagcacatggtcagtctcaaagggtcaagttgtagcacatctccccctaaatatgtgcatcactcacacatggacttttgaggtccggggagtgtttgtacaacttgaacaccataaataaacaacaatatgcataaaggaacacgatcaaaggcataaaacacatgtatgctataaatcaatccaagttccacgaatctaagacatttagctcactacgcagcctgcaaaaggtcttctcatctagaggcttggtaaagatatcggctagctggttctcggtgctaacataaaacacttcgatatctcccttttgttggtgatctctcaaaaagtgatgacggatgtctatgtgctttgtgcggctgtgttcaacaggattatccgccatgcggatagcactctcattatctcataggagtgggactttgctcagattgtagccaaagtccctgagggtttgcctcatccaaagtagttgcgcgcaacactgtcctacggcaacatacttggcctcagcggtggatagggcaacggaagtttgttttttagaactccatgacaccagggaccttcctaagaattggcacgtccccgatgtactcttcgtatcgaccttacatccagcatagtcggagtctgaatatccaatcaagtcaaatgtagaccgctttggataccagatcccaaagcaaggcgtagcgactaaatatctcagaattcgcttaacggtcactaagtggcactcccttggatcagattgaaatctagcacacatgcatacgctaagcataatatctggtctactagcacataagtaaagcaaggaacctatcatagaccggtatgctttttgatcaacggacttacctcttttgttgaggtcgacgtgtccgaccgttcccattggagtctttgcgggcttggcgtccttcatcccaaactgcttgatcaagtcttgcgtgtacttcgtttgggagatgaaagtgccatccttgagttgcttcacttggaacctaaggaagtagttcaactcgcccatcatcgacatttcaaacttttgagtcatcaccctgctaaactcttcacaagacttttggttagtagaaccaaatattatgtcgtcgacataaatttggcacacaaataaatcgccatcacatgtcttagtgaaaagagttggatcggctttcccaaccttgaaaagcattagcaattaaaaagtttctaaggcattcataccatgctcttggggcttgcttaagtccatagagcgccttagagagcttacacacgtggtcggggtaccgttcatcctcaaatccagggggttgctctacgtacacctcctccttaattggcccgttgaggaaagcgctcttcacatccatttggaacaacctgaaagaatggtgagcagcataggctaacaatattcgaattgactctagcctagccacaggagcaaaagtctcctcaaagtccaaacctgcgacttgggcataaccttttgccacaagtctagccttgttccttgtcaccactccgtgctcatcctgtttgttgcgaaacacccacttggttcccacaacgtttttcttgggacgtggcaccagtgtccaaacttcatttcttttgaaattgttgagctcctcctgcatggccaacacctagtccggatctagcaaggcctcttataccctgaaaggctcaatagaagagacaaaagaataatgctcacaaaaattaactaatctagagcgagtagttactcccttgctaatatcacccaatatttgatcgacgggatgattcctttgaatcgtcgctcgaacttgagtcggaggggcttgaggtgcttcttcctccatagcatgatcatcttgtgctcccccttgatcacacgcctcttcttgatgaacctgttcatcgtcttgagttgggggttacaccattgttgaggaagaaggttgatcttgctcttggtgttcctgtggtcgcacatctccaattgccatggtgcgaattgcggccgttggaacgtcttcttcatctacatcatcaagatcaacaacttgctctcttggagagccattagtctcatcaaatacaacgtcgctagaggcttcaaccaaacccgatgatttgttgaagaccctatacgcctttgtatttgagtcataacctaacaaaaacccttctacagctttgggagcaaatttagaattcctacctttatttactagaatgtagcatttactcccaaatacacgaaagtatgaaacatttgg

SEQ ID NO: 38178 - DNA, 448 bp, Zea Mays
ccgtgttcacggcttccgaccaaaatcgatcgagggtcttgaactctccaagcatcgtcctcgccatgtcaatgagagttttattcttcctctctactacaccattttgttgtggtgtatagggagcggagaactcgtgcttgattccttcctcctcaagatactcctccacttgaaggttcttgaactcggacccgttgtcgctccttatcttcttcactttgagctcaaactcattttgagctctccttaggaagcgcttgagggtcccttgggtttcagatttatcctgcaaaaagaatacccaagtgaagcgggaaaaatcatcaacaattactaaaccatacttacttcccccgatgctaaggtaggcgacgggtccgaagaggtccatatgtagcagctccaggggtcttgatgtggtcatcacgttcttgttgtgatgagc

SEQ ID NO: 38179 - DNA, 237 bp, Zea Mays
ggagctcagccatgactattggcgcctagctaagcgtcatatcaggtggcgaacagagacctcggctctattgttattaacgtcgagatctataacctcgacgctaataatgatagtgtcgatgttagaatttttttaaaaaataaaactaaaaagatgtatatatgtaaaactttcgaaaaaaagagcaaaatacaaaaaaaaaaaaagacggcccgccgtgcgcccttggccatc

SEQ ID NO: 38180 - DNA, 323 bp, Zea Mays
atcacatagtggattaagtctaatctggctttttaattctgcaaaccgaagcatctgatagagtgaggacaatcattctacttgtttggggcaaataaattagagtcaataaattatgttggttcatccggttttcttgtgttgtctgttttcttgtactgctaggtggctcaaatggttggttcattcgattggttgtgtgtgatgtcacagtggaatcataaaattgtcgtctatggtgcaatgattgtacagtattctggcttagtttacattaacttgattcataacttattcagtttcttaccaatcttctcttcttg

SEQ ID NO: 38181 - DNA, 201 bp, Zea Mays
cctctctctaggcttggaggacgcccctctcactcctccacccatttgcagtcgccacccaacctcccccatcaaaccctagccgccccctcctcaagcccttctctccaaggtgccattcctttcccgctcggatctacgtcgcgttggtgcatgtctccaattggattttggtggagggaataagaagggaggaaaggg

SEQ ID NO: 38182 - DNA, 2499 bp, Zea Mays
ggcatctcctttgaaaatggcataaacggggaagcaacaaagtataaatagatatcatgataagaaaacataatagacattaatagtctgctagcaatgggaagacaaccataacggcatgagctaaattatccagtgcgcacaactagttagaaacaaacgtcctttgacaagaagcttctaattaaatcatgactgcgcctaagcagtgttattataagagtgaaggtggatgtgctgctacttcccacttcccttgatgagcaacaagcacctgcattgagtaatgcaagagtgagatgaaacatctcagcaagcgaataattttgacgagatctttaaaccacaaattgaattcatcaacattttaaaagagtcacaattaaaatcagaaatacttgtagatatggaactcagtagtcccactataaccaataccatctcatttcctcgaacaaccacaataggttctataacacttccgtgcgtcaataatacctgcaaatatcacttcaatgtatgcataggaatgcaatgtgtaggtactctatcttcatacctctgagagtataaaaccacatcatctgcaaatatcacttcaatgaatgcatatgaatgcaatgcatatgtcctctgccttcatacctctaagggtatgaagccgcatcgtacccctcctcgggcaacgtacgatgctaaattgtaccggtacggtcggaccataggtcacgacaaaacttcagatgcaaatgagtcatgcaatgtatatggcatgctgcatttatcaataaccttcacttccttcaaatacaatacaaacctcaaataatactttatttaccttcagatacaataccaacctcaaataatacttcattttccttcagatacaataccaacctcaaataatacttcatttaccttcaggggtgtgaattaatctcatgaatcatactcgaatcataatcatcatcaatgtatgattgagcatcagtataatgcaagcaagtaaagcatcaccatagtgtccaattatgaaagaatccaatacttctgaatattagagtgtaggcaatagaaataacaggttagaacggaagcaaccaccgctacattcacttgccttcatcgaagaagaagaaatgtactagacatgatctggagtatagccacctgctagcgggcataaaacttagtacaaatatttcacaaacatttgccatcaatcaacaaaacactcctacacttgaaaccaagacccagtggaaagactcccaccctgaaccacatgccatacagcagcagcgctgtttgttaattttgtatctttaaaattaaaacagcggtgatatcaaacaaatactctaggagtatctacacaaaatactctacaacttcagtattcaatggataattaaattctgccatctacaagttctaaaacatctgacaagataactgactgaatctgttttagacagcagtatggttaactttaaaattcgatatctcccaaactactgaaccaaaaattatgaaattctgttggaagtaagaacttttatccctctacaaaagtctccatagttggaagagccaatttggccatttactagatgaaacccaccagtgaacagacccactcatttttgtcaggcaaacaggaacagccacagtaaaacaaacataactggagtttcacaaatcatatgaatgcactctttaacaatctggaaagcttatgaaattatctacaacttcttttaccaacccacagtttaattctgttgataaaattgcctaactcttaagagaacagattctgcacagaattatgagactgaaaaactgctataatcaaactgtcataactttctgttctgatgtccgattgaggtgttcttcgcggccacggaaagatctacaaattatctacgactcatatatagactttttatttttttgaggccactaagaccacggaaaactgacatgaacagaaactgtcgaatctgccattctgcagaaattaaattcgagatcaaaacctaaccccacatctaatccaacctctaatccttcaatccacatgatccacaacctccaaaagcatataattatagggaggaacaaggatcctatccttacctagggttcccccaagaaaatctgcaagagatggggtagaacatctccttgatcctctcttcctcttcaatccatcttcctcctcctcttctcgatccttgctgcgtggggggagatctagagggaggaggaagtagtggagggtggctgcaaggggaagggggaggggcggccaagggtggggaaaagggggggttggcggccaagaaaagggaaaaataggggggcgaccactagggttttgtgggaaaaagaaacgacgcatcagatgtctcttgactttgcatccaacggcccacaactctttccccacatccacgcaccgaagataaacctttggcaacatttttt

SEQ ID NO: 38183 - DNA, 126 bp, Zea Mays
ggggagtgttggcccaagagatctaaagcccgctgctatacgtgcgggcgcgtgtgtcgtggcccgacagcctgggtgggcgcgccgtgtgtgcgggcggccccgacggacacaccatgtgtcggt

SEQ ID NO: 38184 - DNA, 328 bp, Zea Mays
cccccatgtgcagccgccccccacttctcttcccccttggccgtcgccccctgcccatctcctcctctctcaattcttgcagccaccaaaccctagccgcccccccctctcaatcccctcctcccaaggtgccaatccttgacgctcggatcatcgtcgtcgtggtgagagtcttcaatcgttttggtggagggaagaagggaggaaggaaagggggagaatccaaggtgatttttgtgttcatcccttgttcatttgcgctgcaatttaattgattagaggttgcgtttgcgattggggtagaggggggctgtccagaattttaggt

SEQ ID NO: 38185 - DNA, 584 bp, Zea Mays
atttggtttgacgtttgcgttgcggtcgggagctgtcgcgtgggttagttgggccgcaattggagtttcggcccattaaccatcccaaaccctagccgcctccctcctaaccccctccccccatgtgcagccgcccccccacttctcttcccccttggtcgccgcccccctgcccatctcctcctctctcaattcttgcagccaccaaaccctagccgccgcccctctcaatcccctcctcccaaggtgccaatccttgccgctcggatcatcgtcgtcgtggtgcgagtcttcaatcgttctggtggagggaagaagggaggaaggaaagggggagaatccaaggtgatttttgtgttcatcccttgttcatttgcgctgcaatttaattgattagaggttgcgtttgcgattggggtagaggggggctgtccagaattttaggtggtgggtgaacagcagtagtctagcagtttctgtatttctttcgtgaggaattaagggaaatcagtttggggatcatgtagaactttaccttacctttccaacgagtatttatgcgctcaatttggagttataaattg

SEQ ID NO: 38186 - DNA, 872 bp, Zea Mays
ctcacatgaggggaacgacgccaccatgatcaccaatatagagttggtggaaggcgaactaggaaggttcacaatgatcaggggataggagccaactcaaacgtacaacaggctcaagaccctggtcaacaaaatcaggagctatggaagcacaagatggacggaccatgacgtcgtccggcttatgctaaggtccttcactgtccttgatcctcatcttgtaaactctattcgtgaaaatcctaggtacaccaagatgacgcccgaggaaatactcggaaagtttgtaagcgggcgaatgatgatcaaggaggcaagatatgttgatgaggaattgaatgccccaatgccgatccacgagcctcaaaccgttgctctcaaagcaacaagcagcagggaggggctacctagcaaggtggtgcaagttgaggcggccgggctaaatgagattgaaatggccctcattatcaagcgcttcaagacgacgctcaaaggtcggaaggagcatcccaacaagagcaaaacgaagggaaagcgctcctgcttcaagtgtggtaagattggtcactttattgctaactgtcccgataatgatggtgaccaggaacaaggaaagaatgggaagagagagaacaagaaggtttacaagaaggctaagggcgaggcacaccttggaaaagaatgggactcgaattgttcttcgtccgactccgacgacgaaggactcgccgccatggccttcaacaaatcgtctctcttccccaacgagcatcacacctaccccatggcaaaggagaagaaaggtaagcactcaaaatactattgcatatgcttcttcaagtgatgatgaatctagtgatgatgaagtagac

SEQ ID NO: 38187 - DNA, 926 bp, Zea Mays
cccaacttaagactagcaagaatgactttgataaactaaaatttgcaagggatgcctacactattggtagacacccctcaattaaggatgggcttggctttaagagggaagccaagaacttaacaagtcaaggggctcccattttcaacaaggaaaaagggaaggctcctatgaccagtaatagtcaaaagaaccatgctttcatgtaccatgataggaaatattctagaaatgctcattataataggagttataatgcttttgactcacatgccatgattgcatcaagttccaagtttaatggtaggcctaggagaacttttgtgtctcatgctcctaggaaagtgtgtaatggatctaccactgtctttcatgcttgtaatgctaaatttgttctctcatgcaaaaatgaaaaagtgattgctaaaaaggtgggggccaaatgcaagggagacaagacttgcatttgggtccctaaggctattgttactaaccttgtaggacccaacaagagttgggtacctaaaacccaagcctaatttgccttgcaggtttatgcatccgggggctcaagctggattatcgacagtggatgcacaaaccacatgacgggggagaagaagatgttcacctcctacgtcaagaacaaagactcccaagattcaatcatattcggtgacgggaatcaaggcaaggttaaaggactaggaaagatagctatttcatccgagcattccatatctactttgtttttagttgaatcgctcgggtataacttgttgtccgttagtcaattatgcaatatgggttacaattgcttatttacaaatgtagatgtgtctgtctttagaaggagtgatggttcattaggttttaagggtgtactagacgacacactctatttagttgatttcgcaaaggaggag

SEQ ID NO: 38188 - DNA, 2531 bp, Zea Mays
gggaagcaacaaagtataaatagatatcatgataagaaaacatataagacattaataatctgctagcaatgggaagacaaccataacaacaatgaactgaattaatcagtgcgcacgactagttaaaaacaaacatcctttgacaagaagtttctaattaaatcatggctgtgtctgggcaacattattatgagagtgaaggtggatgtgctgctacttcccactccccttgatgagcaacaagcacctgcattgagtaatgcaagagtgagatgaaacatctcagcaagctaattgttctgacgagatatttaaaccacaaattgaattcatcaacattttaaaagagacacaataaaaaatcagaaatacttgtagatatagaacacagtagtcccactataaccaataccatctcatttcctcgaacaaccacaataggttctataacacttccctgcgtcaacaatacctgcaaatatcacttcaatgtatgcataggaatgcaatgtgtaggtactctatcttcatacctctgggggtataaaaccacatcatctgcaaatatcacttcaatgaatacatatgaatgcaatgcgtaggtactctatcttcatacctctgggggtataaaaccacatcatctgcaaatatcacttcaatgaatgcatatgaatgcaatgcatatgtcctctgccttcatacctctaagggtatgaagccgcatcgtaccccttctcgggcaacgtacgatgctaagttgtaccggtacggtcggaccataggtcacgacaaaacttcatatgcaaatgagtcatgcaatgtatatggcatgctacatttatcaataaacttcacttccttcagatacaacacaaacctcaaataatacttcatttatcttcagatacaataccaacctcaaataatacttcatttaccttcagatatgtgaattaatctcgtgagtcatactcaaatcataatcatcatcaatatatgattgagcatcagtataatgcaagcaagtaaagcatcaccatagagtccaattatgaaagaatctgatacttctgaatattagagtgtaggcaatagaaataacaggtcagaacggaagcaaccaccgctacattcacttgccttcattgaagaagaagaaatgtactagacatgatctggagtgtagccacctgctagtgggcataaaacttagtacaaatatttcacaaacatttgccatcaatcaacaaaacactcctacacttgaaaccaagacccagtggaaagactcccaccctgaaccacatgccatacagcagcaacgctgtttgttaattttgtatctttaaaattaaaacagcggtgatatcaaacaaatactctagaagtatctacacaaaatactctacaacttcagtattcaatagataattaaattctgccatctacaagttctaaaacatctgacaagataactgactgaatctgttttagacagcagtatggttaaatttaaaattcgatatctcccaaactactgaaccaaaaattatgaaattctgctggaagtaagaacttttatccctctacaaaaggctccatagttggaagagccaattcggccatttactagatgaaacccaccagtgaacagacccattcatttttgtcaggtaaacagaaacagccacagtaaaacaaacataactggagtttcacaaatcatatgaatgcactctttaacaatctggaaagcttatgaaattatctacaacttcttttgccaacccacagtttagttctgttgataaaatttcctaaatcttaagagaacagattctgcacagaattatgagactgaaaaactgctatagtaaaactgcaataactttctggtcggatgttcgattgaggtgttcttcgcggccacggaaagatctacaaatcatctacgactcatacatagacttttcattttttttgaggccactaagaccacggaaaactggcatgaacagaaactgtcgaatctgccattctgcagaaaactaaattcgggatcaaaacctaaccccacatcaaatccaacctctaatcctttaattcccatgatccacaacctctaaaagcctataattacagggaggaacaaggatctcatccatacctagggtttccccaagaaatcttcaagaagagatggggaagaacatctccttgatcctctcttcctcttcaattcaatgtgcccctccttttctcgatccttgctgcgtagggggagatcttgggggaggaagcaatggatgatggctgccatagggggagggggcgtccagccaaggggggagaaaagggggtggcggccaagaggggggtgaagggaaaaaaaggggtggccacctagggtttttgtgggagaaagaaacgacgcctcagatgacttctatctttgcatccaatggcccacaaccctttacctcatccacgcaccagagattaacttttggtcaacatttttttgggat

SEQ ID NO: 38189 - DNA, 599 bp, Zea Mays
gttttccctgtcttctactcgcatggttttctgctcgtcggtgcgtcctctcggctcgctcggctttaattcccaatcgcgtcgtctattccaccggttagcgtcgtctattccaccggttagcgtcgtcgcgtcgcgggtgcagctctatatacatcaccctcgtgtgtcgtcgtcgttccgcgcgtcagcaaaaaaaaacccaagaatcgggtgaagacgaagctagcagcgcgatattccctaagcgctcgacaaattgcctgaatcggaaaagcgctaccgatctcgtggttcgtgtcagctgtggaaacggtaagctgataaattatttagaatggttcgatcgttaaataaattaatgtactagtgtgatgctcattagggtgctcgataaattgcgtaagtcacgaaactctcgtcgacttcgcagttcttgcgattatcgagccatgttcagttatagcgagttatctcgctattccgatcaattagttaaattagtataccgggtagaatattagtaggcctgtggggtgatggaatatttttatcacttataaagatgtagtataatttataaagcaagggattagttc

SEQ ID NO: 38190 - DNA, 612 bp, Zea Mays
gaaaagcccactacaagccacgggagcactccatcgaaagagtcccgcattaagaggaaggagaagaagaaggactcctccaaagggaaggagaaaagatcttcttcacaccacaaagagaagaaggaaaaatcctcttcccacaagccgcatcggagtggggacaagaaaaagaagatgaggaaggtggtctactacgagaccgactcttcatcggcatccacctctagctccgacgcagcatccgtcacttcaaaacgccaagagcgtaagaagtatagtaagatccccctacgctaccctcgcattcctaaacatacacctttactttccgtcccattaggcaagccaccaacatttgatggtgaagattatgctaggtggagtgatttaatgcgatttcatctaacctcactccacaaaagtatatgggatgttgttgagtttggtgcacaggtaccatccgtaggggatgaaaactatgatgaggatgaagtagcccaaatcgagcacttcaactcccaagccacaaccatactcctcgcctctctaagtagagaggaatataacaaggtgcaaggtttgaagaatgcaaaggagatttgggatcta

SEQ ID NO: 38191 - DNA, 414 bp, Zea Mays
ctcactctctcccccctcttaaccatggttttggaagatagggttcaagagaggtctagggttttcccttctcttgcccaaggtagtaagtgcacaaaggtttgagtgatacttcttaggtcattagaaatcttggttaacacatggtctccaaggttcttatgttctccttaagttttttttaccacatgtgatcatagtccttagtaccaaggtgtgctctagccatggtaacacctgaggtgttacagccctccccccttaaaggaatctcatcccgagattttaggcagagtcctctagaggatgctacgagggcacgatggtgtgctactctttcttatgctccagtttctctagttaactgctcttcgaatgtcattctctttgcaatttcagaaggaagcccttttt

SEQ ID NO: 38192 - DNA, 539 bp, Zea Mays
aaaggtttgagtgatacttcttaggtcattagaaatcttggttaacacatggtctccaaggttcttatgttctccttaagtttttttaccacatgtgatcacagtccttagtaccaaggtgtgctctagccattgtaacacctgaggtgttacaaatcttctcggctaggttagaaataaacttccgtaaataatttaccttgccgaggaacttctgtacttcaagcttacaggtcggaggtcccacattttgaatggatttaattcggtcagggtcgatctctataccatgttcatgactgatgaatcctaagaacttacagccgacactccaaaagcacatttacgtgggttcattttcagaccataccgagacattttatcaaaggctttgcgcaaatcagctatatgagaactaaatttagcagatttgactacaatatcatcaatgtagacttccacagtgtttcccaacatctcgtgaaagatcaaattcatagccctctgataagtagcaccagcattttttcagaccaaat

SEQ ID NO: 38193 - DNA, 896 bp, Zea Mays
ctttcctctcctctcctctgcgtggactggacactgggctgccctgcgcaactccctcctggacgtaccttaaaaccctacccttttcccctgctgctcgtgttgaccactaccgcctgttcccagcaggtcactccctcactcagacactcatctttctttgcctgatccggccgttacctcttgctacttcctttccctttttttcggccccaatgcgaacgaacggctcccattcccttctttttgtagacagacagacacagagagagagagagttttcgcgccgttgcgtgacggctgacggggtgtgaggcgccgattgttctttcgcgcggtaggattacacgcgccaatcaatcatccgcgtgtgcaatactactattactactaccagtaataaacaggcaggaaaagccaacgcacctgcctgcatggcctcctggctgctgctcaaatttctgccggcgccacttcggcgtggaggatgaggagggactagggagtgttacaaaaatattacatatgcgatcaatccaaggggtgagacagttttttccaagggacacacctcttgggatacatcccttcacttgtatataagtgtaatgatctgtggaatacaaacagttctgtcatttgtttctctctcaatctcgttaacactgagtatacttcaacacgttatcagcacctttgctctccaccgagcggttctgcccgggcatccatcgagcggtttctccatcaccgtctgcacaggcgctcgtactcttcgtcgctagcgtcgcagatggccgttgttgctgatcatggcacgtcttcacgaagggcgggatgacaagtgagtttactgttcttgtactgccatggttgcgaagcccacgctcggggag

SEQ ID NO: 38194 - DNA, 160 bp, Zea Mays
ttacttcgggaaagatcgtgcagctgaagaacgtgcatcatgtcccttctatacacaagaatctcattagcggaacccttctatgtagagatgggttcaaggtagttttggagtccaataaattagttgtgtccaagtctggacaatttattggtaaagg

SEQ ID NO: 38195 - DNA, 2202 bp, Zea Mays
caaaaaattcggtactatgaacattgacaaatgactatactaatggtacatgtgaaagtggaacactagtaaaaattgtttttgattcagtcaaggctgatagcgtactaatgcagattttaagtcagatatatcatatatgtaaactactgaccaggctttgttgtagtttccgtaacactcatacatgtttattttttgtgtattaaattggtagctgattctttcaaggaccttgttggggcgaaggcgaagacgccacccttcgctcgatgccttcgccgacttcgctacaccaacggaggcaagacgacaggcagactcacccttcgtcccacacgtcgccagacgaagacctgtgacgaggtcgtctcatcttgcgacctcgtccaacttggaggcccacgtgtgatccggcccattgtaacaggccctgcgtggccgctgcgcattacgggcctaatttgtaaaggtctccctgtaattacggtctgtaaccctgctttatgggaatattccgggggataacctaggtgcctgagggcacatgcgtcattaacactggacgctgggcactcagatacctataaataccctcgcacagtgcccttgagaggctagattaacagagctattgccatctcgtgcaaaaaccctgtttgcattgctacactcccccgttggatcaacttgcacccggagagcaagttccaacatttggcgcccaccgttcgtgctacaaaaaaaccacccgcgatggcactcaagaaagctagctcgaaggctgacgaggctgcgaaggcagcactgctggccgcaaaaaagggcaaggccctcgccctcacccacaccacccaccaagaggccactgaagacgacgctctccgcacctgcggctctgaaggacagccgcaacctcccctaggcttcgctccaccggagggcgcggacgtcaccgaggacggcgaagtcatcggtgtctcagcggaagaacagctacagctgcgcgccttgcgtatcaagaaccgcaatctccagaagcaaaaagagatacttgaggccaagcgccaacgtgtgtttgcacaagccaaggtgcggcaaatgatacgcgacgaagagcagaaggcccaggagctcgagcaggagatcgctctaatgcagcgcgaaggccacctcggcctgcaacacggtccacccctgcaacagcgcgcacaagtcgaagacctacacttcccctagcgcgaccacgccatcccacacgccgcggcattctaaggtgtcaactacctcgatgagcgaagtcccctggcgccacacctgcaagtgacaccttggcctgccaacttccgggcagggacctatcccaagtacaacggcagcactgacctagcacagtacatcatgagttatcaggtcgccgttgcatcttccggaggggacgacaccacgatggccaagtccttcatcatcgccctcgaatgcccagctctcatctggtactctaggttgcccccgttgtccatcgactcctggagaagcctccgggacaaattcctgctcaacttccaagggtaccgcccagacaccgacgccttggctgagctttcactctgcaggcagctggaaaaagagactctgcgggagtactaccgcaagtttctgaccctcaagtcacagctgccttcggtcgatgaccaaatcgccatccactacgccatcagtggccttcgggccggcgtcctttacagccactgcatcagggatccgcctaagaacctccaggagttgtatcagctatttgaaaaatatgccagatccgaagagctccaccagcgcaaactcgagtctcagaggaaacccaaagacactccacagtccagccgcacgtggacgcggccttcgcagctagactcctgtcgggacggccgcaatcagcagcaagtgcacaacatcgccaaccagcaccccgctggcgaggcccctcgccgctaggaatatcccccccagggccgcgggaacggaactcgcggtcggggccggggacgtgcgcagcagccgcgccgattttactgcctgttccacggcgaagactacgcccaccaaaccagagactgcccagagacgaaggccatcagagacaggaaggcacgggcacaaccagccgacaaccctagagttgtcgcgcacacatatcagcaaccc

SEQ ID NO: 38196 - DNA, 825 bp, Zea Mays
gactagcacaacaagtgcgaaaaatcgaagtcttcctcaaaaagactatccgtgcaaaagtcgcctaagggtgcagccggactaagcacaacaagtgcgaaaaatcgaagtcttcctcaaaaagactagccgtgctaaaccctacaccaaactgtccgcgcaaagaccgactacaggcgcgccgggctgacgtaataaacacactagaccaagtgcgcaacgcctttatgagcatagccgaatgcgcgaaggcgcacaacctcatcatacaagctatagttacatatgtacaacgagggcatcacaccttacatcggttcaaccttcggaatgattcccatctccctatagttaaatagcattatcctcagctcctcaccttcaaaaagacttcgcagctccccctcacctacactcgcaacagccggcgaggacaacaattcctgcttgccagccctgcccacacgaagccgaccaccgttcgcctcactcactctacgcttcgcaaccgcccttcgccgcctacgcccagcactcggaccaggcacaacttcagcatccgcagcacgcggcgaagcctccgccgctgccacatccaaggccgcaaagtaatccaagtcctcatccgacgactcttccgtccactcaaccgaactcccagagtcaccaaaatcagaaaacttagaagcagactcatccgattcattcccagcatccacggtcgaagccgccacaaaattagcagtagcggttgcgtgtgtaggcccaaaatcttgaacctgcgcagcaaccaaggttcagcaacatagacaaaatcctctaact

SEQ ID NO: 38197 - DNA, 697 bp, Zea Mays
ctcagcaccggccgccaccgggttcgcctcggcttcgggccgcgcgttgttcaaagatccgaagtcctacacgggctcggcacgcgccgcctaaaacacagcacaccgattcagcaagcccacgtataacccacatccaacaacactaaacaaaagacgaacattacctgaccccttgcccggtcggaccgctccctaaccacctcccgaccgtgagggccccacatccggtcaaagagggcccccgcggactccttcaccaccgggtcctcgaccttataaatctcacgctcaaaatcttcatcagatcggtcaaagacctcatagtggcggcacccttcgcgggacagcgcgttcatcgccccttcgcaggtgacgagggaggcaaaagacataaaaccctccacaatggtcgggagcgccagcaactcatcttgcagccacttgaggcagcgaaggcccgactcttggtcgggcacttcgaagtcagcggtccgcgcgcccagctcgtggtatgagtccataagctgcttgcgcgtccgctcaacttccgagcgcgtagaagcctcggccctctccatgcgggcctgcagagcgttgaaccgcccctcccattcctcggcgcgctggctggcgaggctaccctccacccgcgccaaattagcctccgcctgcgcagactgcgccttggcgaggg

SEQ ID NO: 38198 - DNA, 249 bp, Zea Mays
cggcaacgcgcttccccggcgaaggcaattctcgggccttcgcggatccggccaaggcggacttggttccgccggctccggttgccttcgcaacctccggcaccttgctggacccaggggcggccgatttcgccgccagcgtcgactggctaccgccgggagcggcagacttcgcagtcccccgcgccctcttcggcctagcctcgggcagcctgatgaccgcccgacgcttctgcgcagcctcctgac

SEQ ID NO: 38199 - DNA, 76 bp, Zea Mays
tgagctcgaaacgtagcacagtgagttcacaactcaaacgaagctcaaatcactaacacaattgatcaaatgcgtg

SEQ ID NO: 38200 - DNA, 213 bp, Zea Mays
ggatcctccaccacatgaacaggtccgcgccacccgagagcgcaccaccccttttaggcggtcctttgccaggagggtacgtgccactctcgccatctctccactcccagtgcgcgattgtcttttcatgtatggaatagccgggttcaggcttgctcatgacgaggtatgtggccagataaaaggtcctagatcattaggccaacaatcggt

SEQ ID NO: 38201 - DNA, 771 bp, Zea Mays
attatcccaagcccattttctttttgtaaaaacatgagtcacagatcaaaaaatattttcttagtctatcagcatgactaagcatctctagtttttataaaacaggtgacaaggtgtggtaatcaacctttcaaggatggtaatgcatcaagagtttaatcaatcaactcctataacctaatgcagcatataagtgataaaaattttgtaagcacaagaaggtggcaaatgcaccagggcttgctatttattgtaggagaagatcccaaaattattctactctggtaagtagttatatgaaactccaccactggatcaacaggcactgaagtgaactccttcttcaaacattacttcttctaggtgttctacaagtcaattacatgtagatgaatgcttgctatggtatgaaaatgcatttcaaaaagaaggtaacaaacaacacattatgagtacacttttctacaaagtgcacgaaactagccaaaacacaagaggatttccaagggcacttcaagacatcttcacttacaaatctccagggaactaatccatttagacttaatccaaaacttaaaccttcttaagcaactttattgcttaattacccaagggtaaaatccttttcctttttggcaacaatctgtttactgagcaaatcacttctaaacaaattcaaacttgaaccaagtgctcaactggtcaatacaaggttgcccaaaaattttcataatttttggaacacaacttttatttctaaaaatcaaatag

SEQ ID NO: 38202 - DNA, 439 bp, Zea Mays
ggaggagagaagagagagggtgagcttggaggatggcaggggcggcgaccacagggaaaatggcggctgccagggaaggagaggaggatagggcgcggccggctgcttagggttaggaatattgggcccctagtgggccggttagggttaggttagttagttttttttttctttttttcttttttttctatttccttttcaaattttgaaatacatatttaaataatcataaaattcataagaatcaaaccaaaattatttataaataacatattaattcttggactaatatttattatattatttatgtgaattttcatttaagaagaaatgatattccatattcaaaatcaatcatgagcattcaaaaatcatcccaaagacaaataaataacgaattcttaagagaaaattaattaccataaatatcattattaac

SEQ ID NO: 38203 - DNA, 544 bp, Zea Mays
ctctgctatggggagacttactcctctacttagtggttatgttggggatgcttgtttgcatcaaaggtgtgcatgtcatattctgaatttgattgttaagtctggtttaaaaaggattcaaccttatctagaatcatttagaactgctatatcttttctgaacttttctaatcaacgcattgctttataaaaatcatattgcattgctatgaatacacgtcctcgtaagtttggattggatatggaggtaaggtggaactccacttaccttatgcttaagcatctactgccttacaggaacacatttgatgtgttcattcaaactcactaccctagagctataggtgaacctttgcttttgtctgatgatcactggtatgttgctgaaaaaatcctggtattccttgaaccattttatgactcaacctgtgttctatctggtgtctactatccaacatcttcattgatgatgcatcatataattcagattgctaaacatctaaattcatatgaacatgatagattgcttggaactgttgttttt

SEQ ID NO: 38204 - DNA, 320 bp, Zea Mays
cttacaagaaccatagcccatctgcccattagggttgaaaatatttcctgctaacacgatccaaagaaaaactagacgataggtgctgaaaatcttatgagcatctgatcggacatttggacagttttgttctgtctacagatgcttggaatgctattagctacagtagttacatatgcaagctcaccaagacccccagcaagccgccgactccgagcccaggtccccaggaaccaggcccaccgagcggcgggccccagcctgcacggcctcctccaggtgggcctcaacttgggcctcccggtccatgaggacccaat

SEQ ID NO: 38205 - DNA, 3050 bp, Zea Mays
gttggagctctgactggtggggcctctgggctgtccggtggtgcaccggacaggtcctgtagactgtctggtgccccttctgtgcgcgctctgactctggcgcgcactgtcgcgcatttaatgcggttgcagtcgaccattggcgcgaagtagccgttgctccgctggcacaccagacagtccggtgtgacaccggacagtccggtgaattatagcggagcggcctcccattttcccgaaggtaccgagttcagcgtcaagtaccctggtgcaccggacactgtccggtgcgccagaccagggtgcctttgggatgtctttagctctctttgtttgaacccatctttcgtctttttattggcttgttgtgtacctttggcacctgtaatacttatagactagagcaaactagttagtccaattatttgtgttgggcaattcaaccaccaaaaccaatttaggaaaaggtgtaagcctatttccctttcaatctccccctttttggtgattgatgccaacacaaaccaaagcaaatatagaagtgcataattgaactagtttgcataattgtaagtgcaaaggtttcttagaattgaaccaatatattttcataagatatgcatggattgtttctttatttttaacattttggaccacgcttgcaccacatgttttgtttttgcaaattcttttataaattcttttcaaagtctttttgcaaatagtcaaaggtaaatgaataagattttgagaagcaatttcaagatttgaaattttctccccctgtttcaaatgcttttcctttgactaaacaaaactccccctcaataaaatcctcctcttagtgttcaagagggttttagatattagttttgaaagggttgtaccaatttgaaattctatcaaaaataagataccgattgaaaaatcatcaattgaaaaatcttttcttaactcaaaatttttgaaaattggtggtggtgcggtccttttgctttgggctaatactttctccccctttggcatgaatcgccaaaaacggatacttgagtgaaatataagcccttataactactttctccccctttggcgaacaaaagatgagtgaagattataccaaagttggagagcggcgcggagtgacggcgaaggatgagtaatttcgatggagtggagtggaagcctttgtcttcaccgaagactccaattccctttcaatctatgacttggtttgaaatatgcttgaaaacacattagtcatagcatataaaagagatatgatcaaaggtatattaatgagctatgtgtgcaaaacatcaaaagaaattccgagaatcaagaatatttagctcatgcgtaagtttgttaaatgtttgttcatctagtggcttggtaaagatatcggctaattgttctttggtgttaatatatgcaatctcgatatcccccttttgttggtgatcccttagaaaatgatatcgaatggctatgtgtttagtgcggctatgctcaacgggattatctgccatgcggattgcactgtcattatcacatagaagaggaactttggttaatttgtaaccatagtccctaaagggtttgcctcatccaaagcaattgcgcgcaacaatggcctgggacaatatatttcggcttcggcggtagaaagagctacagaattttgcttctttgaagcccaggacactagagaccttcctaagaactgacaagtcccagatgtgctctttctatttaatttttacaccccgcccaatcggcatcagaataaccaattaaatcaaaatgtggatcccttagggtaccaaagcccaaacttaggagtataaactaaatatctcaagattcgttttacggccgtaaggtgagcttccttagggtcggcttggaatcttgcacacatgcatacggaaagcataatgtctggtcgagatgcacataaatagagtaaagaacctatcatcgaccggtataccttttgatctacggatttacctcccgtgtcgaggtcgagatgcccattggttcccatgggtgtcttatgggcttggcatccttcatcccaaacttgtttagaatgtcttgaatatacttcgtttggctaatgaaggtgccctcttggagttgcttcacttgaaatcctaagaagtacttcaactcccccatcatagacatctcaaatttctgtgtcatgatcctactaaattcttcacaagtagatttgttagtagacccaaatatgatatcatcaacataaatttggcatacaaacaaatcatttgcaagagttttagtaaataaagtaggatcggcctttccgactttgaagccattagtgataacaaaatctcttaggcattcataccatgctcttggggcttgcttgagcccataaagcgccttagagagtttatatacgtaattaggatattcactatcttcaaagccgggaggttgctcaacatagacctcctccttgattggtgagagcacctagagggggggtgaataggtgatcctgtaaaaacttgaaacttaaagccacaaacttgattaagtgttagcacaatgaaatcaagtggctaaggagagctcttgaaccacaattaacacattgagaacaagcacaagagacacaaggatttatcccgtggttcggccaagtacaatacttgcctagtccacgttgtggcgtcccaatggacgagagttgcactcaattcctttcaagtgatccaatgatcaacttgaataccacggtgttcttctttctttactctttcccatttgcgagtgtaacaccccgggatccacaaacaccccagaatgctactaaactacacatctaatattcatatataaaatttcgacagcatctcctttgaaaattgcataaacgggggaagcaacaaagtataaatagatatcatgataagaaaacatataagacattaataatctgctagcaatgggaagacaaccataacaacatgaactgaattaatcagtgcgcacgactagttaaaaacaac

SEQ ID NO: 38206 - DNA, 452 bp, Zea Mays
gtctttcgaaggtccttaaaaatatgattaacaatgtttctcaagtataatatatgtacaggaaccttcggactcgggatgaagctgtacacaatatggagagcagggtcgaaacgaagattgaatcagcgccgaagctgtgcgcaaggaagcttcggctcaataacagaaaaaggaaccgacttaaggaggaaaaggctatttagtccttgacagattgttcttaagtcaatactgaatatgaagggcatgaatgtaattttacacaggctacgtcttgtgcctataaatagatgaacagtacccccatactgttcacgctgacttgtactcgctcgtgtgtcacgcttgtactttcgccttctatcgagccgaaggtacaaatgtaattcgatattgttcttattcatccaggattatataataaagatatgtaaataatgttatgtgat

SEQ ID NO: 38207 - DNA, 530 bp, Zea Mays
aattaaaatcccttagaaaaatgggattgtcaaataaggccttgttcgattgcttctatctcatattgattggatgttattgtaaaaaattacgaaaggttttgacttgtttggaccaaaactcacttaattccacatagattgagagcaaaaacgaacaagttctaaagtagtgcgccggaaaattttccgcattccaaaggagacccagtagaaacaagctagtagtatggcgagactggacgagccaaaaatagaaaatagaagaacaaacaaaacagggggggggggtgattgcagacaagcggtgctgcatgcttccgttgagtggagtagcagctgatggtaccactcagtctaagaggaacctaactcctaataatacagcagtagttcactagccagcctgcagggaggtactgcagtgctggagaaacgacgcagctagcacacaagattactaaagaacctgtcccgaaggcacgcacaatgcaagatgatcagatgagtgatcataatgtggtgtggag

SEQ ID NO: 38208 - DNA, 495 bp, Zea Mays
atcgaatgtcacatctttactatataacaggagttctgtacaaaaataattaaataattacatcataggaggaaacgatccagcaacccaaagttgactgggagacgacggcctagaccactcacgaactcatcacggcatcctccacgcgcctcatcatgtggtacctgctcttgacctgtggggggtgtgtgagacagcaagagtgagctcacatacgttcatcgctcaacaagttgtggggaataatgtgaatgaactcgccaaaggtgggagttcatgtgaagtgtaaggcttaccaaaaaggatggttagagctgagcattgcttttaaagttggtcaaaattttattagcagttactaagtataagtaaataccaacccaattaaatagtagaacagaagtaacaacatcacctgcgatgcaatgcatatgacaaattgagtttaagttccataatttaatcatcagagagtcctgagctgctcatgac

SEQ ID NO: 38209 - DNA, 281 bp, Zea Mays
caagatcaccttgagttccacctttttcatccttccttcctcccaccaattctccaattgaaacttgcacccacacgaagaagatccaacgaggaagaacgacacttggagaagaggagatgggggggtggcggctagggttgaggagatggctgctgcaaaaaacttgagaatggagagggggcggctgcagcacttggggaagagggaagagagaagaggggggaaagggtgacggccaaaggagggaaaggggggggcggctgcccacaaggggcctt

SEQ ID NO: 38210 - DNA, 237 bp, Zea Mays
ttcgattattagttttgattgttgctcctaggatatatagttcatatgatgactacagtttattagatacttgtgttaatagataatcatttcttcgatgaaagacctcgtattttcccaactcctcatcaaagcattgtacctcatgtctattggcccgttcctttgcattattaagatgtgttgttggtttaggtgcccatctctgacctcgcgtctgcattgccttggcttgtg

SEQ ID NO: 38211 - DNA, 136 bp, Zea Mays
acgggagtttaccgcccgatttgggctgcattcccaaacaacccgactcgttgacggcgcctcgtggtgcgacagggtccgggccggacggggctctcaccctcccaggcgtccctttccagagaacttggagccc

SEQ ID NO: 38212 - DNA, 2437 bp, Zea Mays
ttttttttctcctctcgacgttatctctctctctccctctgatttttcctgcgcacgtcgtgttctccaacagctctttaccttcctgcgcattcctccagcgcgcccatggacgtgtgctccatcttccccaaccgcgcatccctctgttggccggagttccttggtccgaccccgtgctgcgctcgcctcggccggccatggtggccgcgcagacctcctggccgcgggcggctctggcctaggccgccgtcgcgcccgggattttggtgcgtgtcctgcttccctatagcgctgaccgtcgtcgttctctgcctgtgacctccggtcgtgttggtcgtggttgctatcttcagctcaccgacatgctgccaggactcgcgtgcgccatggctctggttgccacgctctcgcgcctccctgggctccttttgtcgcgtccagttctggtcacggttatctgctgaaccatcgtcgcgccgggttgcccctgattcgtgaagttcaccggctttcccgtgcgcagtcgcggatgtcgtcgctcggcccttgtgtcttgctgagcttatcaccgtcgcttatccctgacgctcgtcatggacctcgtcgtcggcccacattgtatccacgacgtgctcatcgactctgatgatctgttttccaattgtgtgctgcctacatcgattttcggaactccttgtcgtgctcggccctgctcccttggccgtgctcatctccagttccgtgttttgtctctggctgcgcgtgcgtgcttccctgttggttgtcattgtccaagctcctcttttaggctctccaaccaccgttgtcctatccgcgtcagcacgcgaccggggtcgtgttcatcgagttcgccaacgctctgttgccgattcgaccgtcgtcactgctacgtgccttgttgcgtgttcgccgagtgtcgtttgttgtaccccagcgctcgtgcctactgctggctcgcgttggcgctcgcgtgcctgctcgtcgtctctgcggtgcacccgctctcatccatcgggtttcacgcgtgctcgcgtttgccgtcaagccattgaacctgtttttcccctgctcgacctcatcttcgcccttctggtggccgtcgtcattatggtgctgaactacgctccatcatctagtcgcactggctgttgactttgttggtcctttccatgttaaactagccagctccgccatcgtcactcagctgctcaccccgcgtgtgctcgtcaattttcttggtcgtgtctgccgagctgaccaacgctttagctcgccgttatcgccaagttccacgcagccgtgatgttctctcatcgtcgtccattcctatttctttcttttcccccgccatatgccgcctcgtcatggcacgtgtcatcgtctttagtttcagtagctcttccgatacgcgcctcgccgtgcttcgcctcctcgtgatcagccccatccaggtcatggggggcggaagatctcaacacctgtcagatgttcgatgacaagcccgagccagaatttatcatcattctcacaagtattgagtcacatttgatgctggtaagctgaatttatttacttagtaattttagtgctttgccggtaggcgctatcgacattttatgcgaggaattttagttgtgcagtgaagtcagtgctatcattcatgtgcattatgcaaatcatttaggtacgtttattgaccacgtgatgcggagaaccaaagatgagtcaaccacaagatgtcgctgcgagtgagcttctccagaaggtgatgctgatggacgaacctgaagatggacagacgaagcaagtatccgaacaaaggctgatcatcaagtgatcaacgtctaacaaacactaacgtagtgtttattccaggcaagccccggtgcatttcccacctccttgttacttttaaaatctttctcacttacttgatgcattaggtgataggagttgtgtgctaaaccaattcgtgcatttcctcccttggattacttctcctgaaatccctgttttacaaaaggtttttcttatgcttcgctttgctttagaaaaacaaaatgttttgttttctcaaaagatgatgttgcaaagtggatgggttgttttcgaaaataaaactggatggtggatccatcatggccatgatgggttcaacatcggaaaagatgtacctctgccaggtaccaaactttgggttcgaaatgattaaattgagaccaggcgggtgacttgcacgagaagagagtctcggtgtagtgtctccgtctgagtcgattaaggaccgtgttgatgtaggcttgctgaccgaggaccctttaactggtcacatgcctcgtcatgggtaagctttgcctcgggcagactaataccagaataagataccacgcaatgggagtggagagatggcgag

SEQ ID NO: 38213 - DNA, 616 bp, Zea Mays
gtgccatgctgcctcgtcccagctgacatggtcatgtttcacagaccacagccagagcgcaccacggcatcatccaatattgctccatgcactcccaaaagcgcgtgtcatgagatgcatgagcttatatgcccacatccacggtagatagagcctttcttttctagggcgtctcctccttctttttttttttttttgctgtgctattcttgggtcctgaggtctgaacatctgagcatgtatttttctttcccttttgtcactgtcacactcacgtagagcttgatatgatagacaatctacgtagtccgtagagcctttctttcctagcacttctccttcctttgctgtgctacccttagtagattctaaggtttaaacattttagcatgtgtttttcattttcttccttgatcagactaaagctatctgtttggaccgttacagctacaatccacaaagacaagacactataaatacagtagaagtcggtatagattgaagcatataatagaattgttaaaaacggcgtcaagagtgcgagaagcattggtaccacgcatcgcgaatacgatagtatttccgagattcgcctcgacatgtactgaacatccat

SEQ ID NO: 38214 - DNA, 239 bp, Zea Mays
tatagaactaaaaaaggaaattacatgtgatggccccattaaaaacctttctcccccttcagaaaggaaaagggtgccatgaaagaaaaaaaaataaaaaaaaatatgaaaaattacatcgagctatacataatatcgccgaagctcatccgcattccaagatctaggaatgtcgttgccgtccatatccttcaatctgtatgaaccgggtcttgacgaagatgctaccaagaaaggtc

SEQ ID NO: 38215 - DNA, 289 bp, Zea Mays
aatggaataaagctgaaaagaaagaagctatatgcgtgctgcgcaaaaggaaatatggaaatgccgctggtgctcatccggtccggggccccttttcctcccctccgatctccttttttttttttttttgcccccgctgcttcaagagactttagatcagaatgaatgcccgctggatgctgggggctttgggaaagccgagtcgcatttggtgccgccgtggcggggctctgaggtcgggtcgggacgagcacgagccggccgggggacgaagaaggggccatgcatg

SEQ ID NO: 38216 - DNA, 3820 bp, Zea Mays
aaacaagaagaactcttgcaaattttttttgtgaactgtaaaaaacataataagcaataagtaacgcatctttagagttctaaattatttttgatacgtaaatactacataataggctacaattcttcagtcagaatcacaatctatgagtaactcatcttcggagtcatccgtcgcgcaatcctcaacaacaacctcattccacttgctgcattgtcctacatcacacttgtcaccagttcttttgtaataattggcttctgcttcatctgcagcttgggagaatagctcatcctcagcctcagcctcatcagacttcttcttgtaataagctgcctctacctctgcggcggcctgagacataaactcattctcttcctcttgagcacgtaatcctgcctcagctaatgcgatgagctcactcaaccttgacgtgtcgtcctcctcttcttcatgtaatcctgcctctgcgagggcgataagctcactcaatctagatgtgtcgtcgtcctcctcctccatcagctcaaccgttgccattttatcctgaacatatctcgcatgcgcctcatcggccaaatagtttacgtcgcttccaatctctgcaaatataatgagaaaattaagttaacaaagtcaggataaataaattgtactaacataattataatatcatttatctcacttacttcccttgaggcgatcaacaagattatccaacatctgtttctcggcttgagccgcttcccattcccttgcatcctgtgctctcttctcatctgccgccttcaacctcctatactctgcacgcttcgggctatcataaaaggcagattttgcttccctacgcatgtcgcgtatgcgatcgttaatgtacgaatcgaccagccgagatccacaacgcatcttctgtcccattattctcttggactctattgtgcgcatcacctctcctttgtcgtcgtaactctcccaactgcatttcctcgtctcctacaaaaaaatagtaagtaccgctataacattacatctggtgcaaaaaaaataccaacctcatcgtaatcgaccatatgtccacaaaaatatccaacaccaagctccgaaggaactaatccatacttagcttcaataccacatttgcagagtactggatcaaatttgacctcttctgccgcccaccccatgtatctcttttcctttacctctggctctggccaatgggacaaaggaccatacaaccactctctgaaacgacacttacgccacccgtatggctgcaggagaaaaaattagttatttcttgtaaataaaaactagttcatacatttagcgtatcaatgggctcacataatcaatgttcggacaacagaactgcttgtcatagtctttgtcgatgacagcacggtctccacaatcgcatcgaggcggtgagtccatccgtctttctgttgctacctccttctccgcatccgtcattggtggaggattcgggggaggaggtacccaacgcttaaaacgctcatgactggtctttccactcaaccaattaacaaaaagaagatatcgagggtcaaatttatcaggaccatcgatccactggaaaaagaaacacctctcatgtccctaaaataatggaaagatgcactattacatatctacaaaataatgaatgcgaaaaaaattaagtgacaagtcataagctacgtatgtccaaagtgtcacaaaggtagtagcagcgagcagccgtgtctggatgttgtgattgatgtacccaagccagtctgccacagtcacagttaggcacggggagttcaggaggaacaggagcatccttgctagatacgtccggatataactcccgaggacgacctctcttctgccacaacgcctctcggtacatgtctttcatctaataaacgattataattatcacttgtacctattatgctttataataagtttacacaaactaataatcgaaatgataatataataggtgtatacaaattattaaactaacaacccaatatccaaaacgaatcagttggaaatcataccttggtctacgaagtgaaccaactcaaatctttgaatccagcaaattttgacgaagtttggaaatgggatgaaatgagctgctctcggccagccgcgcgggcgtttttataggaatttgtagctcggcgccaagatctgtggcgccgagctacgaggccgggccacaactagccgttggtgcctcgtcacagctcggcgccataggctgtggcgccgagctacggcaccacgtcagcgccaggtcagccctgcacgcaactagccgttgctgccacgtcatagctcggcgccataggctgtggcgccgagctgtgttagctcggcgccatggcctatggcgccgagctaagggtccaaaactgagtttaaaatttttttaggtctaaacgtgattttacttctgtttaagggctaaaatacaaaaaattcggtactgctggctactacaacttgtcccaatcccttccacctgatgctaccaagtgcgagcatcaagtacgcagtaaattaaatgcccctcatccatacgacagttggaaggtagccagaagcccaaatacaaccctcctttgttttccatggcaactcagctagcagcggctcaggcgcccagcaaatgcgttgatcctctcataattccttcttcagacgcacgctctggaaaatactactgcaggaggtatttctagatgcgaatcttcatgatgccaagcgttgacgagagccccatctgtgctccttggagacatggactggacatctgtttggtagagcctttcgtttccagacagcgcgcgcagtactaaagacgggaggactgacgttgggagcacatgtctagcctgcgccatgatgtatgacgccgggctagatcacgtcagctaccaacatgtatcgagagacgccagatcatcagctgactaagtatctcagcgtcataatccatggcgccgagccgtgttacctcagcgccatgatttatgacgctgaataaagggtccaaaaacactattaagttgtttaaggcttcaaacgtgaattttgtttaaaatatggactaaattgtaaaaaattcggttacttcgaaggttaacaaccagatgttgtacgaagtaaacaaatgaaataacaaacaaacagcacagtaaggtgaactacatgcaagagcccatgcatatcactattcaactctactattaaaaaccattatctagtgaaattaaagatgcgcattttggcattgaaattaacaaattgtatgatcaacagtcgatgccctttgggtcaacatagagtcaatcgccaagaaacagtaccgagaatcgatgatcacgacaagggacctacgcagagagatatgtattacgaatatcgcaaatcgcgggcaccctagcgatccgataatataccacgcatcaacgactgtagcgatcgctacgagggggcgggtgtagcagctctaatctatctcggtgtagcggggaaggggaagaagatgaggaagggggtaaccgtcggcgtgctgacttgtcccttgatcttgaggttgatgtgggcgtcgccctccgcgggcttcttgtcctcctctccgctctagagattctcgtcgacggctccgaacgcagctgtaggggttggtttcccggcgatcgatcggtggaggaggcgcgacgggcgacgcggggttgtggaagggttgcgatgcgcccacggactcgaggcctcttgtaggacggttgcccatgagcagattagatacgag

SEQ ID NO: 38217 - DNA, 353 bp, Zea Mays
gtctgcaacttctacttgaggattatgaagcccttggcttgtaggatgatttccaatccgatggtgatgttgatggcgactataatgagcagtgggtttcggacgaagacaactctttggacttggatgagatcaatgatcgtcgtctatcacatatgaacgagcctatctgagatttgtgtatgtgagatgtatctgagacttgtgtatcaatgtatgcttggttgaactagccatttgtattatccctttgtgacatggccaatgtaattcatccaagcagagaacaagatgtgtcatgaacatgtgtcttacaaagaaggttcacacatgcattacaaaatatgttcacc

SEQ ID NO: 38218 - DNA, 332 bp, Zea Mays
cggctcttggcggcggctgggagcagggagagggagcagggcgcggctggctagggtaggagaggaggcggcggccggctgttgagccttggtgggccgattcggccagctaggttagattaggttttgttttgttttttttttctttttttttatttccttttcaaatttcgaaatacatatttaaataatcataaaatttgtaagaatcaaactaaaattatttataaataacaaattaattcttggactaatatttattatattatttatgtgaatttttatttaagaagaaatgatattccatattcaaaatcaatcatgagcattca

SEQ ID NO: 38219 - DNA, 433 bp, Zea Mays
gagatccacaaacaccccagaatgctactaaactacacatctaacattcatatataaaattttgacagtgtcttctttaaaaattgcataaacggggaagcaacgaagtataaatagatatcatgataagaaaacataatagacattaataatctgctagcaatgggaagacgaccataacgacatgaacttaattaaccagtgcgcacgactagttaaaaacaaacatcctttgacaagaagtttctaattaaatcataactgcgcctgggcagcgttattatgagagtgaaagtgtatgtgctgctacttcccactccccttgatgagcaataagcacctgcattgagtaatgcaagagtgagatgaaacatctcagcaagctaatcgttttgacgagatatttaaaccacattgaattaatcaacatttt

SEQ ID NO: 38220 - DNA, 372 bp, Zea Mays
attaactctgccgccatatgagtccctaataaacccgtagctcgatgtcattgaaggatttcggctaccattctcccctggtgagaccccgagcacgcgcagagcttcctagggaatcccacatgacccgcccgaggttagcgtgttgccgcaggcgcaaatcaccgagggcaaccacccctgccctattcttgcaactgcggcggccctcgacttcctctctctctccgtgttctcggcggcggtgattagatgcagcagagaaacagaggacggggtcgggttttatagggtctacgccacagattccaagtagaggagggccgcggatctcgcgcgaagttcgtcgtccgctctggcacgagcgtcggg

SEQ ID NO: 38221 - DNA, 178 bp, Zea Mays
gcaccagatctgggattcagacggaggcggccgtgctggaaccacttggcggccactgcttgggcggcctggcggccgcaagatttgtatatacatcgctgtcgaccgaaggcgtgtgcagaaagatgccgcgagacaggtgttcgaacggggggcgatcgacatccgaatacaaaaa

SEQ ID NO: 38222 - DNA, 1807 bp, Zea Mays
cagaaccaggggaggcagcctaccccttacagccttaataggtagtatagattagcattctcatttctaaggttggtaataacatcatggcaagtgcttagctcactagatagtttttcacatttttctacctctagagcgtaagcatttttaaccttaacatgcttcttgttttctttaataaggaagtcctcttgggtgtccaagagatcatccttctcatgaatagcactaatcaattcatttaatttttcttttttgttgcatgtttaggttggcaaaaaggatccgcaagttatcctcctcattactagcattgtcctcatcactagatgttttcatatttagtggaggatcttgattttaccttcttccttttgccgtcctttgccatgaggcacttgtggccgacgttggggaggagaagacccttggtgacggcgatgtttgcggcgtcctcgtcggaggaggagtctgaggagctctcgtcggagtcccattcccggcaaacatgggcatcgccgcccttcttcttgtagtacttcttcttctcctttcttctccccctcttgtcgtctcccctgtcactatcactagatagtgggacattttacaataaaatgaccgggcttaccacacttgtagcaaacttttcttggagcgggatttgtagtccttccccctcctttgcttgaggatttgacggaagctcttgatgatgagcgccatctcctcattgttgagctttgaggcgtcgattggttgtctacatgatgtagactccttcttctcttccgtcgccttgaatgccaccggttgtgcttcgggcgtggaggggccatctagctcgttgattttctttgagcctttgaccatcaattcaaagctcacaaaattccctatcacttcctcgggagtcattagcgtatatctaggattaccacgaattaattgaacttgagtagggttaaggaaaacaagggatcttagaataaccttaaccatctcatggtcatcccatttcttactcccgaggttgcgcacttggttcaccaaggtcttgagtcggttgtacatatcttgtggctcctccccttggcgaagtcgaaagcgaccgagctcccccttgatcgtctcccgcttggtgatcttggtcacctcgtctccttcgtgcgcggtctttagcacgtcccaaatctcctttgcacttttcaacccttgcaccttattatactcctctcgacttagagaggcgaggagtatagttgtggcttgggagttgaagtgcatgatttgggctacttcgtcctcatcataatcttcatcccctacggatggtacctgtacaccaaactcaataacatcccatatacttttgtggagtgaggttaggtgatatcgcatcaaatcactccacctagcataatcttcaccatcaaacgttggtggtttgcctaatgggacggaaagtaaaggtgtatgtttaggaatgcgaggatagcgtagggagatcttactaaacttcttccgctcatggcgcttagaagttacggacagagtgtcggaaccggaagtggatggcgacgaggtgtcggtctcgtagtagaccactttcctcatcttctttttcttgtcaccgctccgacgcgacttgtgtgaagaggattccttttccttccccttccctttgttgtaggactctcccgatggagccttcccgtggcttgtagcgggcttctcgccggtcatcatctccttcttggtgtgatctcctgacatcacttcgagcggttaggctctaatgaag

SEQ ID NO: 38223 - DNA, 457 bp, Zea Mays
attgggtttagctgacactaatgaacccattaactaaattaaatatcccaggaaataaactaaactatacgagtgtaggaccatatacttcatgctggagacctggctggatagtccgatgaagctttgagtttgtctcctctcgtttccatcgcttcggttgcttggttcgtcctcatcgctttcttatgtgctgccaccagttcaggtgtgatcctcttccccagtttaattccttaaatcatcttctcaattttcatatacccattctagattaggtcattggaacactatttctagaaaagaattcggtcattggatttagacaataatacaacaaatactttaagactgatccttagattgaagcaagcaaatgttggaattgctaacatttcaaagcctggtacccaaaatcaaagattatatttacatacttcaattaattgtacttgtt

SEQ ID NO: 38224 - DNA, 347 bp, Zea Mays
cccagttattatctgcaaccgcaaattttcccattgctcatatggtttgttttgtcgctaatcatattgatgagctcgttgcagtagaattgaacgcaaaattatgtttccagtattttctctccagtccacagcacagccacacactacaattaacatatcagcatcggaccgaatacacaagatttgtcaacttgtcttaaataaatccacatgccatactacaaaactaaacagttggcatgtattaattcaggaaacacaagcacggtccatcatcagagattaaatttgctgtgcatcgggacacagctataaataatccaggaaacaagcatggttcttct

SEQ ID NO: 38225 - DNA, 373 bp, Zea Mays
gggcattcagtttgggccgaattgttggtctgcagcccaggtgagtttttcttcctcttttctttttattttctattttcttttctttttttcttttccttttaattttcaaatttctaatttaaataccaattcaaattcaaacttcatggcaatttcttttctcaataaattctcacctttggcatggtatggatgaattcatctaattttaatatttattttatgataactagtgctctctttttctaaatctaaaattccaatttaagtcttaaattacacttgggacactaatatatttctatttttattatctttatatagtcaccaaatgcacacactaataaaacccatcatgatgcaagttttg

SEQ ID NO: 38226 - DNA, 524 bp, Zea Mays
gtgatcattagcatggtaacttgcaataggttgtctttcacctggatcatgtggaagatgactgacatcataaagtgttggcgatggcggtgcagatggtattggattcacaatttcttcatttatcctctcttcctcttgttcttgaggtgtcgacgcttgagtaacatccggagataatgaagtagaaataaacttctgttttttggcagcatgattgcgaaaaagagaggcaatatctccctgcttcttcatattttagtcactacaaaaataatggtagtgaatcaacaatcaataagacaaagtcacagcagcggctgcgggtagagtctgactactataaagcaccgcagactaaaataaaaaaagtcacaacagctgtggctaaaacgatcgccgaccagtagtgaaaatatgcattcagagattacatggcgccccatatatctgctgatgccgaaacattcagattgttcttcacggtaatggtctgatttttcgcaatccaaaccgaatgtaac

SEQ ID NO: 38227 - DNA, 193 bp, Zea Mays
gtttcttttcttttttttgttgcctatacagctagaggaatgagtgatgatagcctgggaatgtaatggtatcctgtgtgctggatttgctttcatttgtcgatggttttggtgaattgacctggaagcaaatggaattggccttgatctggtggtcaaactagggaagaattgtgggtcagtgcatgtttta

SEQ ID NO: 38228 - DNA, 482 bp, Zea Mays
cttttgcatgagtctgtgtcaagaagtacattagttttttcttgttgttatccctccattgctttatgagtattgcaaattttatctcttttgagaggggaaaagatattatatgacaagagccccatttgcttcacgtcaacagaatagttttggggatttctagtagttggattctagtgtaataacaaccatgttttatagagctggagacgggtatgtcaggtgtttgatacattgtcggtacatggatgtttgaccttagtggcattaacaaacgaggttgttgaattcattgattgttgtgcttagtgttctaacctatttggtagagtgttacttaaagactttgtggagttgcatcctagtttggtagtggaaaatcctagtgttgatggcacctgccaatgacttgggtttcattttatattgtttttttattgttgataatgtgttgtttggtttcaggaggcattttaaat

SEQ ID NO: 38229 - DNA, 175 bp, Zea Mays
cccatctcctcctctctcaattcttgcagccaccaaaccctagccaccccctctcaatcccctcctcccaaggtgccaattcttgccgctcggatcatcgtcgtcgtggtgcgagtcttcaatcgttttggtggagggaagaagggaggaaggaaagggggagaatccaaggtga

SEQ ID NO: 38230 - DNA, 804 bp, Zea Mays
cgttacttctcggacatgaagacttggtcactgacttacacgtagcattccagtaagctaaaaggggtgataaaagatggctagtgcaggtcaagtgcttgaactagggtagaaagaactctagttacaggtaatgacttaacttgctaataaaactggatttttaaggatccactattagtaagcatttttgcaaacagagtctttattcttgaataaccttatcttgactcccttaagccagcatatccttgagagtcttttcttttgatgggtaagacttgcgaaagtacattccgtactcagggttttcgaaccccatgttgttgtaggtgaggaaacaacagacttttgttgtttttgctctaaggtggtgcccaaggacgaacctcaatagtgaagtggttgcgggaggatgctgacctcccttttgaaaaacaatatactattatgcgggaggggtttttgcctcccaagtttgtaataataatacttatgcactcatataccctggtgatgtaataataacactctttctatattttaataaatgtaaattaagttattataattcgcttccgcttattcgttcctctgatgtgttgtaatatctgtgtgacgggtgaaatgctcttgggcgaggaatttaaggataccaaacttgtcaagtaattatatgaatctacaaggttgtctaaagtctactggacaaggacaactgtaggagggcctagtaacttgggatgttctgtaacatataggtacaacacctcgtcgccgatgcctcatatcgcccccctcgag

SEQ ID NO: 38231 - DNA, 281 bp, Zea Mays
cttagcttatataaatgaataaaacttgacaaagtaaaagcaatcagatttgagcctaactccacataaagctagtccatatcaggcagatgggacttttgctgagtactttgatgtatattcacccttgctttcacaaaacaccaggttgcctttggtgcaacctatgctcaggtaaagaagaagaagaagaaagcatcgaggaggatctccaagagtttcagtacttcgacgagttcgaggattaggctagtgacctcccccagtcagctacctatggt

SEQ ID NO: 38232 - DNA, 240 bp, Zea Mays
cttttccctccaccccctctcttggccgccaccctccccctttttcccttggttggccaccccctctcctcccatggcagccgcccaccatttcttcctcctccctagatctccccctcccctacgcagcaaggatcgagaagaggaggagcaagatggattgaagaggaagagaggatcaaggagatgttctaccccccccatctattgcagattttcttggggaaaccctaggtaagg

SEQ ID NO: 38233 - DNA, 1164 bp, Zea Mays
tgtatatctttctgtgtccgcgaagaacacttcaatcggacatcagatcagaaagttattgcagtttgattatagcagtttttcagtctcataattctgtgcagaatctgttctcttaagagttaggcaattttatcaacagaattaaactatgggttggtaaaagaagttgtagattatttcataaactttccagattgttaaagagtgcattcatatgatttgtgaaactccagttatgtttgttttactgtggctgttcctgtttgcctgacaaaaatgagcgggtctgttcactggtaggtttcatcaggtaaatggccgaattggctcttccaactatggagacttatgtagagggataaaagttcttactgccagtagaattccatgatttttggttgagtagtttgtgagatatcgaattttgaagttaactacgctgctgtctaaaacagattcagtcagttatcttgttagaggttttagaacttgtagatggcagaatttaattatccattgaataccgaagttgtagagtattttgtatagatactcctagattatttgtttgctatcacaactgttataattttaaagatacaaaattaacaaacagcgctgctgctgtatgtcatgtggttcagggtgggagtctttccaccatgtcttggtttcaagtgtagagcgatttgttgattgttgtcaaatgtttgtaaaatatttgtactaagttttatgcccgctagcaggtggctacactccagatcatgcatagtacatttcttcttcttcgatgaaggcaagtgaatgtagcagtggttgcttccgttctgacctgttatttctattgcctacactctaatattcagaagtcttagattctttcataattggactctatggtgatgctttacttgcttgcattatgctgatgctcaatcatatattgatgatgataatgattcgagtatgactcttgagattaattcacacccctgaaggtaaatgaagtattatttgacgatggtattgtatctgaaggtaaatgaagtattatttgaggttgtattgtatgtgaaggaagtgaagtatattgataaatgcagcatgccatatacattgcatgattcacttgcatctgaagttttgtcgtgacctatg

SEQ ID NO: 38234 - DNA, 311 bp, Zea Mays
ctcaacccaaggtttggaaccctaatctcctaaaccccccttattttattttctccctaaactccgccctttggtcatctcatcatatgcatacacttgaaatgttaggagcacctcacatagactatttcatcactcaagatttttttagcaaattgttgattcaaaagaaaaggaaataaaaagaaacaaaaatagaaaaagggaaaaaggaaatagaaaacagaaaaagaaaaaaagagaaaacccttccccccctcggctgggcccattctggcccaacccgcgccgcgcccgcgccgcgctcgcgc

SEQ ID NO: 38235 - DNA, 316 bp, Zea Mays
ttttattttctctctaaactccacccttaggtcatctcatcatgtgcatacacttgaaatgttaggagcacctcacatagactatttcatcactcaagatttttttagcaaattgttgattcaaaagaaaaggaaataaaaagaaacaaaaatagaaaaagggaaaaaggaaatagaaaacagaaaaagaaaaaaaaagagaaaacccttccccccctcggctgggcccattctggcccaacccgcgccacgcccgcgcttccccctctcccacagcccaagcagcccagccgcgcacgcccgcaccacccctgac

SEQ ID NO: 38236 - DNA, 1876 bp, Zea Mays
atttaattaaaattaattgttgaagttggtaaggattgtgcttggtgcatattaccccttcataaaagagtgttgtcttaagacattgatgttgatgtatagctgcatccaaatttgatggtgtgaaattgtagtgttgattgcaactatgaattgctttgagcttcattgcatgttgtttcatgcttgatgtcaggtcgtgtagtttccttagacaattagtccaaggtagaagttcttctgttaattaagaccaataatggacccatgttttgaatggtggtgctatatggggtaccttgggtgttttgcttggagtggccgaattcgaggtcgaattctttttaaggggggtagagtgtaatatcccaaaaaaaatattgaccaaaagttaatctttggtgcgtggatgaggtaaagggttgtgggccattggatgcaaagatagaagtcatctgaggcgtcgtttctttctcccacaaaaaccctaggtggccaccctttttttcccttcaccccccctcttggccgccaccccctttctcccccttggctggccgccccctccccctatggcagccatcctccattgcttcctcccccaagatctccccctacgcagcaaggatcgagaagaggaggagcacgttgaattgaagagcaagagaggatcaaggaggtgttcttccccatctcttcttgcatattttcttggggaaaccctaggtatggatggaatccttgttcctccctgtaattatgtgcttttggaggtgctggatcatggggattaaaggattagaggttgtattagatgtggggttaggttttgatctcgaatttagttttctgcagcatgacagattcgacagtttctgttcataccagttttccgtgatcttagtggcctcaaaaaaataaaaagtctatatatgagtcgtagataatttgtagatctttccgtggccgtgaagaacacctcaatcggacatcagaacagaaagttatgacagtttgattatagtagtttttcagtctcataattctgtgcagaatctgttctcttaagagttaggcaattttatcaacagaattaaactgtgggttggtaaaagaagttgtagataatttcataagctttccagattgttaaagagtgcattcatatgatttgtgaaactccagttatgtttgtcttactgtggctgttcctgtttgcctgacaaaaatgagtgggtctgttcactggtgggtttcatctagtaaatggccgaattggctcttctaattatggagacttttgtagagggataaaagttcttacttccagcagaatttcataatttttggttcagtagtttgggagatatcgaattttaaagtgaaccatactgctgtctaaaacagattcagtcagttatcttgtgagatgttttagaaattgtagatggcagaatttaattatccattgaatactgaagttgtagagtatttttgtgtagatactcctagagtatttgtttgatatcaccgctgttttaattttaaagatacaaaattaacaaacagcgctgctgctgtatggcatgtggttcagggtgggagtctttccactgggtcttggtttcaagtgtaggagagttttgttgattgatggcaaatgtttgtgaaatatttgtactaagttttatgcccgctagcaggtggctacactccagatcatgtctagtacatttcttcttcttcgatgaaggcaagtgaatgtagcggtggttgcttccgttctgacctgttatttctattgcctacactctaatattcagaagtattggattctttcataattggactctatggtgatgctttacttgcttgc

SEQ ID NO: 38237 - DNA, 456 bp, Zea Mays
aacataatgtgaaaaggaatatattaaattatctaaagggagttcaagaatttgagaaagagaagaaagaatactaaacaaagataaagaaaataaatatagataaattagttaaaccttcctaattgggttcaacttgtacaattaaaatgaatataaattcacagttaaagttgaattcaaatttgaattctagaaaataaaagtaaaggaaaagaaaacaagaaaaaagaaaaaaagaaaaaaaagaaaaggagaaaacagtgaatgggcttgaacctcgactctcgacccatttagccaaccttcaccgcgcgacccaactcatcactgcggcgccgacaaccagacccatcttgtcagcctcctaccctcgcgcacatctcctcttccattcgatgatagatggaccagctcggccagttcccccgtgagtcacgcacacgctactccgtc

SEQ ID NO: 38238 - DNA, 1131 bp, Zea Mays
tagatgtcaattaattcataacagcggaagcactagtccatatgatgcaacacatataatactgcaagaagcatatgaataacacactagcaaagctcaaactaacacatcaccccttaggatagcaaagctcaaactaacacatcaccccttaggataagctttcctctcaggttgagataagctttaatgcacaaattctccccctttgacatcaaacaccaaaaccatattcaagcaagaacatagaatgatgtcaagggacagcagggtattgagtaggtaaacacacactaacaatactcccccttactcattcaacaaatgcaccacaagcatttggaggaaagttaaggtacatatacgcaaaagatcaatacttcctttgtacctttgcccggatgtggtgtacttaccaaggtgtggtgtacttcctctcttgaaagtattagtctcttgggagcttctccacacttgtgcctgatccttttatcctaaccttttcttgttgctaagacaccaagcttagagcaagttatagtgttgtggcacaagatgaagcttctattctagtgattaccaaaagatgtcaattgaagcaaactatcacggctaccaattgaaagataccaaatgcaagatcatttattatcatagctccatgatgttttaaggataagcatctagtatcaccaaattttatagagcatgagcaatctaaaaatatgtaattactcacgactagataccaattccttgacttacagaggtaccccagtcctgattgctccatttcttgctcattttctcttctccaccttgagactacacaagatcgctcaagatacaattagtctcaaaagacgcaagttatgtgtgctccccctacacttgtgcatcaagtatttgaataactttgcactttgcacattctagctttctcagaactagaggggatcacaacatatcttggtcaaggcatactctcaatttcatcacaaagagataccaatttgaatatcaaatgaaagattgacttaatacaacaatgcatgcctcaagaagtataacattttacaagcaacctaggcatgataatcattgcaccacatataccaattgaaaagcaac

SEQ ID NO: 38239 - DNA, 769 bp, Zea Mays
ctcttctagcctgagaagcgtctcgccttgttccttgttccttctcaacagcttaaccatgagagctttgtccgctttgttgagatggatgtagaaacggcgaatctcctcttcttccacatcatcggtctcattttccctgtcattaatgtcagtggaagcactataggaaaatgtaccttgtgatgatgaagattcatccttgctattatcctcatattcctcctcatcatggctctcgtctccaccgtcattgttagcaataaaacatttattactagtggagaacaaacctgtgtttggtgcccaacacttttcttcttcctttgaatggttagtatcacaagtaatatagggagtaggagcatcacaatttaccacataatattttcctttaattctattccataaatcatgagcatcaacaaatagaacactatcactactcatgatggcaaaataagcacctctagaaagagaatcaactaagatgttgcaagcatggtgatttagagatagacatcttagttcatcatttgaaggatttttactaacattagagggaaaaatacttctactaaagatctgtctcaaatcaggatcaacactcatgaaagcattataaatagagacagaccaagacttgtaattagaaccatcgcctaaaagaagttctacagtcacctcttgtgacgacatcgtcatctccggacggctaagcccacactggagaggcctagctctgataccaattgaaagttccctttgg

SEQ ID NO: 38240 - DNA, 1598 bp, Zea Mays
ttttcttttcccttctatttctcaagtgacttgtaattgaagcaagagacacctaagtgtgtggtggtccttgtggggtctaagtgacccatgagattaaggaaaaaggctcactcggtctaattgaccatttgagagaggggaagggttgaaatagacccagcctttgtgttctcaacggggactaggttctttggaaccgaacctcgataaaacaaatcatcgtgttcactcgcctagattcttgtttgatttgttttcccctctctaacatttccttgctagtgtgaatttgagttggctcccattcgtcatccgcaattcttgagcaactcctagcaagggagatattcttttggacttgaatttaattctaatgctaatccccgaccttagtgtgtgtttaagtttataaatttcaggtttcgcctattcaccccctctaggcgactttcaaaaggtcatcgagaaagtaactcccggtcttcaagagccaattaactaactgtaacttccaccactaatgtaccttgggaattatttgattaattagtcaatgggttttaacccaattaatctcagggtgagtttctgttttacccttatttgtgcttgatgagtccattgctcaacaagggggggggggtgagattttgagttcttgtcagacttctttcaagggggagaaacttttagattttgggctttcctctcaaggggggagaaatttctgaatttttgaggattctagttatttggagatgcttggggagagttttgacagggggagttttgagcctcttagagtttttgctagttgtgttgagccgcttgcctctttctggagggactagctttgttttcagctttggtgctgattttgtgctctgatttggtttttgtgttccgatgagtttttggctgctggctagtggtgatgagccctatttttcctcttattggggattagcctttcttgcttggtcatgttgagtcattgcccattttttgggaaccaagttttgcttactcaaaaatgacttgtttcgacttttacctggcttttgatcatttgagtgagttcctcttcttcttccttctttctactatatatgctcacatggtggtgttgacaatgcactcctcaagggggagattggaaacacaaggttaaattatcccttgtggtttgggttgatgatgagtgattgtcaacggatagcactctaggttagacattggactgaccagagtgtgagattatgttgtagcgtgagattatgttatgcaaccatatcggtcagcgtggtgtgcaggtgtggagcacatagagggtggtcgacggtttaggtgaatgtcatgtggtctcgcgctgatggaccgggagcagtgaaggacgagtgttggttcatgactgatggactgaagcaattgggtgactagccatggtggctgacacctaggacacactcgcgcgagcacgtggtagagcgagccgtgttgccggcgccgccgaggactggtaggacacatgtccaagatgtgggggacacacacgtgatactcacgacagtttggtggttgtgcctcacaaccac

SEQ ID NO: 38241 - DNA, 159 bp, Zea Mays
tttcgtaaccgaaggagaaaatcaaggaaacggccgttgactcggtttgtttttttttctattttttttacgtaaccgaaggagaaaaacaaggaaacaatgttgactcggtttgtggcgtgatcaaacgggagatggtggcggcgctagggtttgaat

SEQ ID NO: 38242 - DNA, 1363 bp, Zea Mays
tatgaaggcagaagtcatccttgcatttgcagacatttgcactcatgaggtatatatgaagtgtgacattactatgttactattgtggtttctacctgcgaggtgtggtgactaggtgtgttgtacgttgtatacgtgctgcaccttcgtaataagaaggttgtggaatcaagtggtggtaaaacaatgttcttaggtggttaaacagtttgatattattttacttgctgagatgtgtcatctcactcttgcattactcaatgcaggtacttgatacatgttgggaatgaggggagtagcagcatgtccactttcactctcacaataacgctgcccaggcgcagccatgatttaattagaaacttattgtcaaaggaagtttgttttttaactagtcgtgcgcactagttaattcacttcatgtcgtatgtttaacttctctttgctagccgattaataatacttagtatgtttttgtcatgatatatgtttatacactgttgccccctcatttatgcaattttgcaagggggatgctgccgaaattttatatatagatgtcagaagtgttgtttagtagcattccggggtgttggtggaccccggggtgttacatttaagctgttccaaatggacgtgaagagcgccttccttaatggaccaatcaaggaggaagtgtacgtggaacaacccatggctttgaggatgacaggtatcccgaccacgtctacaaactctctaaggcgctctatggacttaagcaagccccaagagcatggtatgaatgccttagagattttctcatttctaatgctttcaaggttgggaaagctgatcctactctctttactaagacttgcaatggtgatctttttgtatgccaaatatatgtcgatgacattatatttggttctactaaacaaaagtcttgtgaggagtttagcagggtgatgatgcaaaagttcgagatgtcgatgatgggcgagttgaactacttccttggatttcaagtgaagcaacccaaggaagacacattcatctcccaaacgaagtacactcaagatctactcaagaggtttgggtgaaggatgcaaagcccgcaaagacacctatgggaacggacgtacatttggacctcaacaaaggaggtaagtccgttgatcaaaagatatatcggtcaatgataggatctttactttatctttgcgctagtagaccgttgtaacacccaaaatctagcaaaaacaaacaaccctatttggattgttaaattttagtagaaaggaaaaatatttatgttttcaaataaggagaaccttgatatatatgatttgaagaatttcttgaatagataaaattacca

SEQ ID NO: 38243 - DNA, 379 bp, Zea Mays
ggaattcgtgcacgcggaggtggtcgaccacagcacttggcggacagacggcggcgctagctccacggcgagaaattgcagcgtcgctggtccgcaatcacccacggaaagagcacgcgcaccacccgaaacacccaggcccaaacccgagaccccgccggtgctggtaacccgagtcaacggcggcggcgatgaacctgtttcgcggcgcggccaggtggtaacgcggatggcacagaccaaggctaggtaggtgggggaggtgaagaagggcgtagaggttccgatttaattcccagggactcggcacgggtgggaggaagccatccacgcccaccggcaatggcggcgagtccagcgcgaggtaggcgaggtccgc

SEQ ID NO: 38244 - DNA, 1440 bp, Zea Mays
tgaatggcaatatgacctgcatcacatactaatcttttgcatctattagataacatatgatgtctcatcaacatcaacatagccttttagtcccaatcaagttaggctaggctagagttgaaacccaacaagaagtcaccaaaaagagagaaaggggagaggaaaaagcttttgggagcactaaaagggaaaatgcctaatcacggttcgggtacatggatagcttctttcccagcacttctatccaaacacaactttattgggatattctattccttcaagtcccttttgattgtctgctcccatgccaagtttgaccgtcctctacctctcttcacattattgtcccgtcttatgatgcctctgtgctccggtgcctctaggggtctccggtggacatgcccaaaccatctcaaccggggttgattaagggtctgtttggttgggttatgactgtgaaaaaagttgttgtaagctgtgagctatgaaaaaaaactgttgtgggctattaaaaaacaaaaaaccgtttggtagaaaccactaaaactcgctaaaaattcttccatatatatattttcacagttccacctgaaagccactaaaagcagatccagaggtgctttcagctttaaactgcgagaaagtcggcttttagaaaaagctgcttcctggatccagccctttggtttggcttttagggtttagggtgcccacatatccaacgcaacatacacatatctgtgacatttagttgttggatatgtcgtctcttagtaggccaacactcagccccatataacctagcaggcctaatcgtcgtcctgtagaacttgcctttcaacttctgtgacactcttgtcacataggactcctaatgcttgacgtcatttcgtccaccccactttgatcctatagataacatcttcatcaatatcaccatctctctatagcatctatcccaaataacaaaaggtgtccttctttggtactacctggcctcccaagcttacatctccatcctcactaattatagtaccaaagtcacatctcatatactcggttttggtcctgctaattctaattccttttgactcttgggtctgacgccataactctagtttctatttactccttcccgactttcatctactagaactacatcgtcagcaaaaaacatacaccaagggatatctccttgtatatccctcgtgacctcatctatcactaaggcaaatagataagggctcaaaattgaaccttgatttagtcttatgttaatcgggaaaacatttgtatcactatcagttgttcggacgctagtcacaaccttgtcatacatgtccttcagccaaatcaagcctcttctcaagaacagattggtattggaaatgcagtccaagcttttgttgacaaagtaaccaggaaggtggatggtctgct

SEQ ID NO: 38245 - DNA, 6024 bp, Zea Mays
ctacatgatctcgtccaaggaaaaagaagatttcattttgaaagtttctggatcagattagaggggttcatggaagaggtggaaaactcttggtcacaacctctggaagtctgctgccccttgcagttgcagcggttccatgacaagctaaaaaggcttgcaaggcaccttcaagcctggagtcagaaaaaaatgggcaacattaagcagcagattctgatggcaaatgagatccttcacaggctggaaatcactcgtgatgtaaggaatttgtctgcctctgaggaatggctacgtcgctcccttaagcaccactctttggctttagcctccttggaaagaactgttgcccgagtaagatgtggactgcactggctgaaaggagatgccaacactgcctattttcatcaccacgccagacacaggaaaaagaaaaacttcattggaaaactgatggtcgataacagagtaatttctgagcagcaggaaaagaaagaggtaatctgggatttctataacaagttacttgggacagcagcccccagggagtcaactttaaatctggaagaatttcatcgtcctgccctggacctttctgctcttgatcaaaatttctctatggaggaggtctgggcagcaattaaaactctccctgctgacaaagctccagggccggatggatacaccggaaaattttataaaatatcttggccaatcatcaaagaggatgttatggaggcgttaaatagggtgctacaaggtgatgtatccaaacttcatctccttaactcagcttatgtgactctactgcccaagaaagctgaagcattggaagtcaaagatttcaggcccatcagtttaattcacagctttgcaaaaattgttacaaagattctggctaacagattggcctccagacttcctgagataatgtcagcaaatcaaagcgcttttataaaaggaagatgcatccatgacaatttcattttggtccagcagacggccaaggctgttcagaagcagcgggttcctagaattcttctgaaattggatattggtaaagcctttgattcggtttcgtggcctttccttcttgaggtgttaacgcaccttggttttggttctgtatggtgtaatatcatttccaagatgctcctttcttcctcaactagggtgctggttaatggagagccaggggaaatcattcatcaccatagggggctaaggcagggggatcctctatccccaatgttatttattattgttatggatgtgctgaattctcttgttttaagagcccaagaattgagtcttttacaaccagtgttaagaagaggaaatgggcaacgtatctctctatatgttgacgatgtggtgatgttcttgcagccaagtagagaagaactcagtgtggtcaaagaaattctgagaatctttggagatgcttcaggacttgttacaaatgtgagcaaatgcagtatgacgcccattcactgtgaggaacaagacatggtggctgcgcaggagttttttccttgtactgaggtggcttttccattcaaatacctgggtttacccctttcagtcaagaaactccccaaaaatatttttctagaactcattgacaagatagctgataaactaaccggatggaaatctgccctcatccacacagcaggccggctgaccttggttaaatcagtgctcacagccattcctatccatcacttatagtgcttcaatgccctaaatgggtgatcaaggctattgacaaaattcggaggggcttcttgtggaaaggcagaaaagatatcagaggtggtcactgctctgttggttgggcaagagtttgcagaccacttagcatgggtggcctgggtatccataaccttgaagttcttggatgggctttaaatctaagatgactttggctcaaaaaaactcaaccagaaaggccctgggcagatttcttgttcaaggttcattccaatgtcaaagctcttttctctgcctcggtccacactacagtaggtgatggctctcgaaccctgttctggactgatcgctggattcatgggcaatcaatatctgcccttgcccccactttggtcagccatattacagtgagaatcaagaaaagcagatctgtgcaagaagccttggtaaacaatagatgggttaatgacatatctggcagcctgtcagcccagattatcatcgacttcttagtaatttgggatctagtgcaaggttttcagttacatccggggattcctgatgtgcatagatggtccccgtctgcatctggagattattccactaaattggcatatgatcgttttatggctggttcagtctcttttgagccggctactagaatttggaaaagttgggcccccccaaggtgtaaattcttcatttggttggcttctctaaatcgttgctggacagcggatagattaagcagacgaggtcttgagcatcctgtaaggtgccccctttgtgaccagcaggaggaaacagttcagcatatcttagtggcttgtgtgtttgccagagacacttggtggcagactttgcacaaggtagggctgcatcgcttgactccaggattggcaacaacgaccttccaagactggtggagagaagctgagtgccaggtgccaaaaaaccagaaaagaggatttaattccttagtgattctggtggcttggtggctatggaagcatagaaatgaatgtgtgtttgatggtgcatcccccaacatcagcatcatcatgcagcatattcatgaggatgttgttcggtggggcttggcaggggcaagagatcttaggagattgtggccttaggtgctggtggggctgggggttgtttggatacccaccccttttcttcttcttttttctgtcttgatctatttttttggcagcttgtactgggtctattttagacctctatctccttttttcttaatatataagatgcgcagttctcctgcacgttcgataaaaagtgtaacatactttgttgggactttatgattatctaatacccaccacatgagattcctaggtattctatcataggccttttccaagtcgataaaaacccatgtgcaagtcctacttctccttataccgcttcatgacttgtcttattaagaaaattgcttccatggttgaccttccaggcatgaatccaaattggttcatggtgatatgcatcattcctctcaggcgatgctcaataactccctcccataacttcacaatgtggctcatgagcttaatccatcgatagttggtacaacttttaatatctaccttgttcttaaagattcaactaatgtactccactcatcgggcatcttgtttgatcgaaaaatatggttgaacaacttggttagccaaacggtagccatatccccaaggcagttccacacctctattgggataccatccggcccatcgtcttgctccctttcatcctctttaaagcttctttgacctctgattcttggatcctgcgtacaaagcatccaattgggtgtccataatctcattcccaccattgaaaagattgtcaaaatatctttgccacctctgtttgatgtcttgtcctttcaccaagagttgatcatctcatccttaatgcatttaacttggttgaggtcactcgtcttcctttcccgaatcctagccatcttataaacgtccttttccccttcctttgtacttagtcttcagtaaagatcatcataggctcgaccctttgcatcactcacagctcgctttgcagtcttctttgccaccttatacctctctatgttgaccgcgctcctgtcatggaacaagcttatgtaacattgtttcttctcctttattgcctattgaatgtcctcggtccaccaccaagtatctttaggttcatcttttctccctttggtcactccaaacacctctgacgccaccttcctgatacaagttgccatcttcacccacatgttgtttgcatcttcttcttcggatcaagcgtcctccacaaaaactatttccctaaaaatttcggatgtctccctttgagtttccaccactttgtcctcacaattttggcttgtttatccctatggttacggattcgaaaacagaagtcaatcaccacaagattatgttggggcacaacactctctccaggtatcaccttacaatccaaacatgcttgtttatcttctctccttgtgagaacgaagtcgatttgactcgaacgatagccaatgctaaaagtcaccaaatgagaatctctctttctgaagaaagtgttgtctatcactaggttgtaggctatgagatggttgtggcttcaaaagacaatcccttccaaaccgtgggctggtatagatctcaatatttcctcaaatgctaaatccttttttcagactgttgtgtttacataggttggtaatggagccacaaccctattttggaaaggtaagtggattcatgggtgttctatggttgaggtagctccttcagtggttgttgcagttcttaaaaagtttcagagcatacagactgtccaacaagccctcccttcctccaactgggtccaggtaatcaaggggaatctatttcttgttggcttagaggaattcttgcaactttgggacttattacaagattttcaattgcatgagaggcccgacaggcatgtgtggaggttctctaactccggggtgttttcctcaaagtcggcttacagagctttcttcactggtgttttttctttgagccgtggaaaaggatctggagaagctaggttgagcctaagtgcaagactttcatttggctcactatcaacaagtgttggacagctgacagactaaagaagagagggcttgtctcccgtgagagctgcgtcctttgtgatcaagatgatgaaacaatgcaacatattctctccaattgtgtttttgcaagacaattctggcactccatcctctcccccattggccttgctactattgttcccactaatagtgatgtttgctttgaagactggtggagagaggcctcatccaaaatcactaaagggaaatggaagagatttaacagtgttgttatccttggtgcttggagtctacggaaacatagaaacagatgtgtctttgatggagctcgcccttccctgaacactttagtggacgggttcaaagaggaattgcacctttggtccctggcaggtgcaaaaaacttgagaaccctttttgatcccggttgaaggaggggctcctgtggggccggtgtgtctggtgcctgttaaagggtgtgtcaggtgtttgggtgcgttagagggtgtgtgttttgggtgtgtttcttgtttttctgctcgggctctagcccttctttcttctatcaatatgatgatacgcagctctcctgtgttttcgagaaaaaaaagtccaaaatatcctctccttgattcatactaccatacccaaaacatccatggaccagctcataacctgtatttgttgaacctacatgaccattgggatctcctcctatgaaaagcttctcattggtgggtactgctctgaccatgccatctaagtcttcccagaacttcctcttctcgctctcgctgagaccaaactgaggggcatatgcacttataatgttcaagactacatcccccaaaattagtttgattaggataatcctgtctccctaccttttgacatccaccactccatccttgagggtcttatcaatcagaatacttgctccatttttgtttgccattgttcctgagtaccaaagcttgaaaccagtgttttccacctccttcactttttgccccttccattttgtgtcctggacacataggatattaacatgcctcctgctcgctgcatcgattaactctcttagatagcatttgatgtctgaaagcaaaattttaaattgttatgctagattcagctcttcattggtcctactattatagtgatgtatcttttct

SEQ ID NO: 38246 - DNA, 908 bp, Zea Mays
gccaattcggccatttactagatgaaacccaccagtgaacagactcactcatttttgtcaggtaaacaggaacagccacagtaaaacaaacataactggagtttcacaaatcatatgaatgcactctttaacaatctggaaagcttatgaaattatctacaacttcttttaccaacccacagtttaattctgttgataaaatttcctaaatcttaagagaacagattctgcacagaattatgagactgaaaaactgctatagtaaaactgcaataactttctggtcggatgtccgattgaggtgttcttcgcggccacggaaagatctacaaatcatctacgactcatacatagacttttcattttttgaggccactaagaccatggaaaactggcatgaacagaaactgtcgaatctgtcattctgcagaaaactaaattcgggatcaaaacctaaccccacatcaaatccaacctctaatccttcaattcccatgatccacaacctccaaaagcctataattacagggaggaacaaggatctcatccatacctaggggtttccccaagaaatcttcaagaagagttggggaagaacatctccttgatcctctcttcctcttcaattcaacgtgcccctccttttcttgatccttgctgcgtaggggaagatcttgggggaggaagcaatggatgatggctgccatagggggagggggcgtccagccaagggggagaaaagggggtggcggccaagaggggggtgaagggaaaaaaaggggtggccacctagggtttttgtgggagaaagaaacgacgcctcagatgacttctatctttgcatccaatggcccacaaccctttacctcatccacgcaccagagattaacttttggtcaacatttttt

SEQ ID NO: 38247 - DNA, 291 bp, Zea Mays
ttaggttgcagcccctgctggtgatggacgcccccaagttcctccatagaagacgacgaaaggccgctcccctcccgctttcagatgcaacaatgcaaaaggggattcaccctttaattttctgctcctctccccaaacccaacccgcctaccccactatccagttgcagtccaacttccctgtcttttctttgctatgcttgcgaccacatctccttgatgtattcctttctctaggcggaattcatggcacctttcctttttttattgagccggtggattggagctgag

SEQ ID NO: 38248 - DNA, 60 bp, Zea Mays
caaagtgcggcaaatgatacgcgacgaagagcagaaggcctaggaactcgagcgggagat

SEQ ID NO: 38249 - DNA, 482 bp, Zea Mays
gtcaggtgcgctggcgtgtgggcccccaccgtcagccagtccgtcctcaactgcacatgcgggcgctggatgtgagcctggcaaacgggacctgcttggtcagcgactgcccctcaacaccgctcgtccgtgccataattccgttgtctatcttcttcgttgcaatggccgacgccagaatccgcgtgcgagattctcgccgtgagctgctcggcgccaactggcgtgggttcgttccgcaacccgtcttcggactacaaataccctgggcaccgcaccctccgttcctctgttgcgctgcgcccaagccgtcgccaccatcgaatgggagagaaaagtgtgcgccgcgtgccctggggattccctagacttggaggagggatgctgaagccgcttcgccgggaattcgtgaccagcgctgtcggaattcctcgctgtcgggagttaccctgccacggaccatgggtccccgtgaccaagat

SEQ ID NO: 38250 - DNA, 285 bp, Zea Mays
caaaatttgaattaaatactcattttgtacgtaaggaaataaaaaaaagagaaattttgttatggggtaaattgaatcaactcaaaggagcggagggtaaaatgaatcaaaaaaattattttagggcattatgtgaatattattcataagtgaggggagtaacaatcaagagatagtaataaaaaacaagagacaataaatacgacaatagctccttaggacatgtatagtggagagatatcaaaatggttctttaaatcataagagacaactaagagacctatt

SEQ ID NO: 38251 - DNA, 1070 bp, Zea Mays
ataaagagtctatatattaagaggacatatccggtgcacatgaaagctttgtgcacatggtgcacatattaaatcatcactatctattttagatctaacgtctctgattgatcattgtaatttacaaataacaccttccaccactacagcccaccacgtcagagggtgtctttagcaaatataccaaacaactacagacgttagatctaagatgagtgatgatgatttaatatgtgcatcatgtgccctaaaattccatgtgcactagatatattctcatatattaaacatcattgtacatgtcttaataagtcatgaccaaactttagccaatagctagagtaaaggcgcatcgggagaagatagttattactaatcagacaaaatgaaaatatttgaaaaaagattgaataagaaaatataaatactataattaataaactagttatccgtgttatttgcttggactagtttgctagttttttcaagatagcagcgaggtttattttatttattctttagagggtttgataggacatattatttcataatttttgaagcgaaacatgttatttcataattgtcatataaacacaaaagattagtgaagttacactgttgttaacacacattgaatgaataatcaatatttatgacccccgaataatatttctcctatttctacaagtttttgtgggtacatttaacggcacagctaaattttggacctagttagggtctgtttgaatccatgtgacaaacaatttatctgtttatattagcaccttgacctccaaacaagttgattaataaattggctaattgttagctagagggttggcaaactgtttgcccattaactatttaatcttgctaacatgtgctaatagaccgtatagagagaaaaaaagacatttatttagctaagacttcaaacatactataacttgtggctagctaattatctgctggctaattattagccaccgacgaacaattagccattaaaatccaaacatggccttaataattatgaacgatagatatggcctaattgtcttaagtttcct

SEQ ID NO: 38252 - DNA, 3255 bp, Zea Mays
gcaccaccgaacagtccggtgaattatagccgtacaccgccgaagttttcccgagagcgaccagttcgccggaagccagtctggcaccctgaacactgtccggtgcaccaccggacagtccggtgtacccatacctagcagcagttggttgtacagagccaactcttttccaatcctttttcttctgtttctatcacttagatacaatacattagtacccaaatcaatgtactaagccttagaaacatatcttcttgttgatttgcacttcattcatcatttggcatataataacccacttaatatgtgttggacacttaatcaccaaaatatactagaaatggcccaagggcatatttccctttcaatctccccctttttggtgatttatgccaacacatcaaaaagcaacaaatagaagtgcaacatcaatgcaattgagaacacaaatagtctttgacaagatttgacatatttggatcattctttgccaccacttggtttgtttttgcaaatcaaattcattttcctatctctaagtcaaactcacttgtttgggcattaagagagataatccaagagtgaaaatgatcaagatccaaaaactcccccttttcccataatcacacattctccccacaagagaccaaattttgacaataagagtattttgacaaatcaaaaattctaactctactattttcaaaattctcaagtggtagctgatccatttgctttggccttaatttctccccctttagcattaagcaccaaaacgagatgattcttggccctttaaccccattgcctcaccaaaattgtcaattaagagcaaaaaggcaataggagcatagatatgaacttggagttaataccggagtgcagtggaagtctttgcatggtccaagttcacatatccctttcaattcacctttgaggctaccttaagtaaactcaacacaattgttagtctcaaaggatcaagttgtatcacttctccccctaaatatgtgcattactcacacatggacttgtgaggtccggggatcccttgcacaacttgagcaccatcaataaacaataaatctcataaatgcataatgtaacttgatcaaatgcataaaacacatgtatgctataaatcaatccaagttatgcgaatataagacatttagctcactatgcagcctgcaaaaggtcttctcatctaaaggcttggtaaagatatcggctagctggttctcggtgctaacatagaatacctcgatatctcccttttgctggtggtctctcagaaagtgatgccggatgtctatgtgcttagtgcggctgtgttcaacaggattatccgccatgcggattgcactcttattgtcacataggagtgggactttgctcagattatagccaaagtctcggagggtttgcctcatccatagtatttacgcgcaacactgtcctgcggcaacatactcggcctcagcggtggatagggcaacagaggtttgtttcttagaactccaagacaccagggaccttcctaggaattggcacgtccctgatgtactcttcctatcaaccttgcatccagcataatcagagtctgagtatccaatcaagtcaaaggtagacctctttggataccagatcccgaagcaaggcatagcaactaaatatctaagaatccgcttaacggccacaaggtgacattcccttggatcggattgaaatctagcacacatgcatacgctaagcataatatccggttgtcggggaccataattagggatacccccaagactcctaaactcggctggtaaccaccatcagcacaaagctgcaaaggcctgatgggcgcaatacatgtcaaagctccacccacttaagggacacgatctcgcctcgcccgagcccagcctcgagcaggaacagtagacccaggcagattcacgcctcgcccgagggcctcctcaagtaacgggtgcaccttcgactcgcccgaggcccagctcgggtaggcttcgccgtgaagcaaccttggccagatcgccacgccaaccgaccgtatagcaggagcattcaaatgaaggatcgactgacaccttatcctgacgcgcgttcctcagtcgacagggctgaagtgaccgcagtcatttcgcccctcccctgactgacctgacaggaaaacagcgcctcctgccctgctccgactgctgtgccacccaccagggtgaggctgacagcagccaagtccagcctcgggcgccataggaagctccgcctcgcccgaccccagggctcggacttaacctcgacctcggaagacggtctccgcctcgcccgaccctagggctcagactctgcctcgacctcggaagacggtctccgcctcgcccgaccctagggctcggactccgcctcgacctcggaagacggtctccgcctcacccgaccccagggctcggactcaacctcgatctcggaagatggtctccgcctcgcccgaccccagggctcgaactcagccttgacctcggaggagtcaccgcctcgcccgacctcaggctcggaccaaccacgccgcaggggggtacatcattaccctacccctagctagctcaggctacggggaacatgaccggcgtcccatctggctcgccccggtaaacaagtaatgatggcccccgcgtgctccatgacgacggtggctctcagccccctacggaagcaaggagacgtcagcaaggatctgatagccccgacagctatacttctacagggtttaagcgctcctccgatggccacgacatcacgtgaacagggctgcaacacctctccgacagccacgtcggcatgtacatagggctctggctcctctctgctagacacgttagcacattgctataccccccattatacacctgggccctctccttacatctataaaaggaaggtccagggccctcgtacgagaaggtggccgtgcgggagaacgggctgacggataggctctcactctctctccctcgcgaacgcttgtaaccccctactacaagcgcatccaccctgggcgcaggataacacgagccgcggttccccttattgttcccccttgtgttccgtctcgcgccgacgcatctgggctgggacacgcagcgacaatttactcgtcggtccagggacccctcggggtcgaaactccgacagttggcacgccaggtaggggcctgctgcgtgttgacgaacagcttcccg

SEQ ID NO: 38253 - DNA, 333 bp, Zea Mays
tgttttactgtggctgttcctgtttgcctgacaaaaatgagtgggtctgttcactggtgggtttcatctagtaaatggccgaattggctcttccaactgtggagacttttgtagaaggataaaagttcttactgccagcagaattttataatttgtggttcagtagtttgggagatatcgaattttgaagttaactaggctgctgcctaaaacaaattcagtcagttatcttgtcagatgttttagaatatattgatggcagaatttaattatccattgaataccgaagttgtagattgttttgtgtagatactcttagagtatttgtttgat

SEQ ID NO: 38254 - DNA, 1258 bp, Zea Mays
tacattgcatgactcatttgcatctgaagttttgtcgtgacctatggtccgaccgtaccggtacaacttagcatcgtacgttgcccgagaaggggtacgatgcagcttcatacccttagaggtatgaaggcagaggacatatgcattgcattcatatgcatacattgaagtgatatttgcagatgatgtggttttataccctcagaggtatgaagatagatgacctacacattgcattcctatgcatacattgaagtgatatttgcaggtattgttgatgcagggaagtgttatacaacatattgtggttgttcgaggaaatgagatggtattggttatattgtgactactgagttctatatctacaagtatttctgatcttgattgtgattcttttaaaatgttgattaattcaatgtggtttaaatatctcgtcaaaacaattagcttgctgagatgtttcatctcactcttgcattactcaatgcaggtgcttgttgcccatcaaggggagtgggaagtagcagcacatacaccttcactctcataataatgctgctcaggcgcagtcatgatttaattagaaacttcttgtcaaaggatgtttgtttttaactagtcgtgcgcactggttaattcagttcatgtcgttatggtcgtcttcccattgctagcagattattaatgtctattatgttttcttatcatgatatctatttatactttgttgctttaaatatctcgtcaaaacatatagcttgctgagatgtttcatctcactcttgcattactcaatgcaggtgcttgttgctcatcaaggggagtgggaagtagcagcacatacaccttcactctcataataatgctgcccaggcgcagtcatgatttaattagaaacttcttgtcaaaggatgtttgtttttaactagtcgtgcgcactggttaattcagttcatgtcgttatggccgtcttcccattgctagcagattattaatgtctattatgttttcttatcatgatatctatttatactttgttgcttccccgtttatgcaattttcaaaggagacactgtcgaaattttatatatgaatgttagatgtgtagtttagtagcattctggggtgtttgtggatcccggggtgttacagttggtatcaaagcttaggctttagattcttggcaatttgaagataaatttgacacactggcacatataggaagggtatgggttcaagtatctttgatatatattag

SEQ ID NO: 38255 - DNA, 547 bp, Zea Mays
gttatattgtgactactgagttctatatctacaagtatttctgatcttgattgtgattcttttaaaatgttgattaattcaatgtggtttaaatatctcgtcaaaacaattagcttgctgagatgtttcatctcactcttgcattactcaatgcaggtgcttgttgcccatcaaggggagtggtaagtagcagcacatacaccttcactctcataataatgctgcccaggcgcagtcatgatttaattagaaaattcttgtcaaaggatgtttgtttttaactagtcgtgcgcactggttaattcagttcatgtcgttatggtcgtcttcccattgctagcagattattaatgtctattatgttttcttatcatgatatctatttatactttgttgcttccccgtttatgcaattttcaaaggagacactgtcgaaattttatatatgaatgttagatgtgtagtttagtagcattctggggtgtttgcggatcccgaggtgtttgtggatcccggggtgttacacatccttccccctgggggagat

SEQ ID NO: 38256 - DNA, 434 bp, Zea Mays
cgaagatggaagcctactgcgacgaggttcgacgccgggaagacaagttctacgggctcgagctcaaccacgtcgcccgacggtacaacgagactgcggacgagctggctaaaatagcctcggggcggacaacggttcccctggacgttttctcccgagacctacatcaaccctccgtcaagaccgacgacacgcccgagcccaagaaggcctcggctctgcccgaggcgccctcggctcagcccgaggcacccttggccgccgagggtgaggcactgcgcatcgaggaagagcggaatggggtcccgcctaatcgaaactggtagaccccgtacctgcaatatctccaccgaggagagctacccctcgacagagccgaagctcggcgactggcgcggcgcgccaagtcgttcgtcttgctgggtgacggaaag

SEQ ID NO: 38257 - DNA, 1591 bp, Zea Mays
agaagactcactggaccagctggaagaggctcgggacatggccttactacactcggcgcggtatcagcagtccctgcgacgctaccacgcccgatgggttcggtcccgagacctccaggtaggcgacttggtgcttcggctacgacaggacgctcgagggcgccacaagctcactcctccctgggaggggccattcatcatcgccaagattttgaagcccggaacatacaagctggccaacagtcaaggcaaggtctacagcaacgcttggaacatccgacagctacgtcgcttttacccttaagatgttttcaagtcgttcatatacctcgtttacatacacaaataaagtctaaccatcaaggaagggtcagcctagcctcggcaaagcccgaccctccctcgggggctagaaggggggaaccccctctgcgtcaaaattttcctcggaaaaagtctttctgccagaacatctttcgcgctcttcgactacttcgatggcgggatcctgaaaacgacggagtacacataagcggcaaggctgaccgagccgaggaactcctacgcctccgggatacggatacctcactcatcaccttctgcgataagtaactcacgctcggataagtgattccgctgatcgaacaggtcttaacgctcaaaaacttttctgccgaaacgatttttcgtgccttctcaactatatcgataacagaatcctgcagacgagtaagagcacacataagcggcaaggtcgaccgagccgaggaactcctacgcctccgagatacggatacctcactcatcgccttccgtaaaaagtaactctcgctcggataaacgattctgctaccgacgaacaagtcctgatactcgaaacaaggggaaaagaaacgcagctctataacacgacgatggtatgtttgggcctcggcggccgcaaaaaacatacgcatactacagacaaactaatcctgcaggttcagacatcaataggcggggcagcagcaccctcggcgtcgactccaccttcggcggaatccggcccggcctcggacggcgacacggttggaggatctccacctcgaaggaagatgtcagcaccgcgcctaggccatcaccgccagggtctcctccaggaacccggcccaagctgacggcttgatcagccgctccgtagcctcggccaactgacccccgaggacatcagcccggctcatggcctcggcagcccgactccagggttggtcccgccagtggatgacctggccaggttccagccgccactgctacgcctcctcggcctgggaagtcccctgctcctgggccaacgaagttttcttctccagccgactccgcctctgtccacgctcacaccactgcctccggctccagctcatcgcagagcggccgagggttttctttaactgagcaagagaagccttgggcggcaaggccgaccgagccgagggactcctatgcctccgggatacgggtacctcactcgtcaccttccgcacagggcaactcacacttggttaaagcggtccagctagccgacaggcgagtcctggtgctcgaaataaggaag

SEQ ID NO: 38258 - DNA, 1224 bp, Zea Mays
atcccatcagagggaggcatcgagccctcggaccctatcaaacgggaccaggtccggcaaatcacctgtaggtacttttggagcgcgcctctgggccactagccgacccttatcgaacggggcacgagcgtccactcggatcacccgttagcaactcactggagacaccatgttcggcgccctctgagggcaacatggcgcttttccccctcctccttgcggaaaggcgacaaaggggcgtatgataaaagccgagtcagtccttgaccgtcctcttgctctgtgcagaggctcgggggctgctctcgcaaacccggctccggccaaaccgttgacagcgtcaacataccagcccgagaactcggaacctgaccatgcacccgtattacgattagatcgcctgagggaacaaccagaccggcctaggcatcatgaaagacactaagacctcggaggagtcaaaccactcctccgaggcctcgggggctacacccggcgggtgcgctcgcgcgcacccaccggaacgaaatgcaaccgagaaaggccggtccccttgcaaaaaagtgcgacaaagcctccaagcgagtaccaacactccctttgaggctcagggctactgtcggggaccataattaggggtacccccaagactcctaaactcggctggtaaccaccatcagcacaaagctgcaaaggcctgatgggcgcaatacaggtcaaagctccgcccactcaagggacacgatctcgcctcgcccgagcccaccctcgggcaggaacagtagacccaagcagattcacgcctcgcccgagggcctcctcaagtaaagagcgcaccttcgactcgctcgaggcccagctcgggcaggcttcgccgagaagcaaccttggccagatcgccacaccaaccgaccatatagcaggagcattcaatgcaaggatcgactgacaccttatcctgacgtgcgttcctcagtcgacagggccgaagtgaccgcagtcatttcgcccctcccctgactgacctgacaggaaaacagtgctacctgccctgctccgactgctatgccacccgccagggtgaggttaacagcagccaagtccagcctcgagcgccataggaagctccgcctcgcccgaccccagggctcggactcaacctcgacctcggaagacggtctccgcctcgcccaaccccagggctcgaactccgcctcgaccttg

SEQ ID NO: 38259 - DNA, 1414 bp, Zea Mays
ttcactcgccagaaactttccacttgatggtgtcacaaagaaaaatttcagatttgcaagcttttgaaattgagacagccgatgattcaggaataggtccaaaagcatcacatgaattagcatgtcgccaagtgggtggaccacttaatttgagttataccctccatgatcataaaaactatttgcgaggcaagcgacaacgagagatggcatatggtcacgctggaagcatgcttaaatattttcagaacaaaatggtagagaaccccttatttcaatatgcaacacaaatggatatcgaagagaagatcgcgaacataatttgggctgatgctaaaatggttgttgattacacacattttggtgatgttgtttcctttgacaccacatttgggacaaatagagagagtcgaccttttggtgtttttgttggattcaatcagtttagagaaacagtaatcttcggtgctgctctaatgtacgacgagacatttgagtctttcaagtggatatttgagacctttctaaaagcacataatggaaagcaacctaaaacattctacacggaccaagattttgctatgggaaaggctgttgagcaagtgtttcatgaggcatggcatgggttatgcacctttcacataatgcaaagttcttgatttgatgaatatcaagtcattggctgcccaatatatattaaaaagatggacacgacaagcacggagtggcacagtacaggacatgaatgggaaaaaggtaattgaaaatccaaagtttgatgcaatgcttcgctatagatacttttctcggaagcttctgaatttagcgcatcgagcagcctactttccaaagtgcaccctattgatggatagcacaattgacatccttggtcaacagattgaagacagaattaccacatgcacaaatgacgatcaaagtgtttctcagagtgatcttgctccaccaaatgacacattgagtaatgtataattgaagaaaaaagaggttcgcataaaaacttcaaagagaaaaaagcttggctaggaagaaaaacacaaggggaggaaaaatggacaaaacagaactcagttgcaagtacaagtatcaatggtatgttaatttttaacatgtgaattatagcattattataaagttccatgtacatctgagtcttttgtatttcgttttttcaaggcacaagaaatagagaaagaagtaagcagcaacgaaaagaggaaagagcctgaagaatatagtactatcagctccttcacccaactattgaatggagcaagcagtgatgatctaaaaattgagggattcttttagtgaattcttctttttagttctggagcaattgaggagggctattttgttgttagcaattgctactagtattttgtttaggagcaag

SEQ ID NO: 38260 - DNA, 268 bp, Zea Mays
ctttaatttatcaaagtcacttttgcaagtcttaagttgagcattaagacttgctacttcatcatttaatttagaaatagaaattaaatgttcatcacaagcataaacattaaaatccttacatctattgcaaattacaacatgttcaacacatgaactggatttatttgctacttctagcttagcatttaattcatcattaacactctttaagctagaaatagactcatggcaggcagatatttcagaagatataatttcatttctt

SEQ ID NO: 38261 - DNA, 223 bp, Zea Mays
gtttcaatcaacccctctcaagcggtccaaagacccacttgaataccacggtgttttgcttgcttttcttaatcccgtttgcgaggaatctccgcaacttggagcctctcgcccttacacttgaagttcacaaagaagcacggagcaagggagggattagcaacgcacacaagacacaaaaatcagagtgtcaccacgcacacaagtcgcaacaagagctcgc

SEQ ID NO: 38262 - DNA, 426 bp, Zea Mays
attcaaatgttcaactcaaacacttaagctgatataaagaggtggtcaattcacttatattccaacatatagaatagactcttaaatgcattgcttgcttgtttgatagcttttctatgatatttgttgaaattattttttcttgtatcaaaaatcatatcccaatgcatcatgctaatttttctagtatgaaaaatcaaattgttaggctgtgtattagactcttagtgtgtggctgtgagtgttattatgggcctacatcaccttctggaccttcgtacatgggatctcttcgtcaccaattactgtctccagatgaaggggatggcacgagcctcagttgtctaggaactgctcaatggcaactcgagcctaccaagcagtgccaccgcgttggcacatgacattctgtagctcgacggtaac

SEQ ID NO: 38263 - DNA, 369 bp, Zea Mays
catgcttcacaggatcattcacaatatgtttgctcaagtgttttcgcacagaagtggtggagtatcacaagaggcacccaagtcagctaataaccatcgcaaccatataaacttggcagtagtagtagcaagagctcgaagtcctgcttcttagatttccatgcaataggagaggaaccaagaaaaatgcaataacctgtaatcgagcggcgatcagtgcgatcactcgtccaagtggcatctgagtaggcgtgaagccgaagaggactatcacaatcataaaataagcctcgggatgtggtttcccttaagtgtctcaatacacgaagcaagttgccataatgtactgaagtaggcacgacttagaat

SEQ ID NO: 38264 - DNA, 332 bp, Zea Mays
caggtacatataggcaaggatatccctaagaataggaaagatctaatctaggagatccttgccaaacataaccaactaaccaaaaccagaggggggaggcagccgccgcaccctgtagggttgcagccgaaccacctgggcccattacccaacatcacgctaacagaaatatccaagaggcccaaatcagacatcttaaattgctcactaaaatgttgttttacttgagaaatatgttctggatcatcacccgtaatcagcatgtcatcaacatataagaggagcaaagtgcgcccctcgtgaagagaaatgaaaaataaaacaggttcatg

SEQ ID NO: 38265 - DNA, 117 bp, Zea Mays
caccaccacatacctgagttcttgtgaagtttatctgagttacctgacgaattagggttcctcttccccatatttggtggggaagaaccctacctcatgtcccggatcccatccggc

SEQ ID NO: 38266 - DNA, 1856 bp, Zea Mays
cccatgcccaggtactatgctccagtgcactcaccgcttcctctcgtcgatcgcccttgtcatgttctgactctccagccgtccgccgtggagttcgccgagtgccgccgtcctacagctcgtcttctccggtcgccgtctctagctgatgcagccccgacgtctccgcgtctcgcttcgctggatctacgcacgcagtccttgttcgtcatcgtcttctggtctcagtccgaccgatctgtgcgctcgctctttgtccatcgggtttcgtgcgtgcttgcgtttaccgtcgaatcgtcgaacccgtcatcctctgctcaaaccccacctcaccagctcgcttcaaacacgatctcgtcgtcaaactttgcctcagccttagctcgtcggtcacgctcgccagatgttcgatcggagattttattcggagactgttgacactcttgtaagctttaagtcggaattaatggacggtaagtgattcgttattccagtagactaaatgtgatatttattagactacctaaatcgtttacggtggtttgatcgatagtcgtacatgttgctgctcccttgcgttataatagttattacgtttaaggtagtttgcttgggttattagtttcgagtaatttaatattagtacggtattcaacatgtaatcgacgaaaaacccggattcatattcgttagtcaaagttgtgaatctaagctaaatttattactggcgcgcaagttgttagccgaattgttagatagattaaataaatatgtatgatgcaaaataaaataaaattagttcttggtaagcaaagtgatataatttataaagcgagagataaatttaacatttaattaagtagctgatgagttgtgtttaggctaattatgtttaaagtgtatgatttgttgtttgtgatatttgtgttaggttcgtttaatttagagcagcgtaattatagcgcatagtcgtatattaataactagtgtttccgtgtaagattgtacaacgcctcgccactaggtatttaatacgctatcgtatagcactatttagattttgcgctatttctgtttatatgcattcatgtgcataatgcatttcgttcagatacgttaattaatcgcgcgatgcggaagaagaaccaagtcgactccaagcgcgggctaatccgcaagctgaagctgatgaatcaacctgaagatggttaaatcaagcaagtgctcggtcaaagaatactcgtcaagcggacgtcacctaacaacactaacctagtgttactcaggcaagccccggtgcatgcaaccccttccatgtgtttttaaataattttttgcacactttaagtccagtgaaatgtgcattaggtttataggagttgcttgaaaccctttgatttattgcctttcttgatatccatacctttatagatacttctgatgaagtatcaaaaatatggtttacaaaaatgcttagccctgcttagatcttgtggatagaggttgtcttttgcaatactgcctaactcaggggttatcctgaggaaggatggcttctacctgcaagaatatattttctttgggagcatggtgggatcttactgcaaagttccctgtgatgctcttttcatcctaaggaacacaaacaatcctaaggatggaagtacttaaatcagaacttgggctaggaacaggtgatgttctacccaggttgattaaggattggatgcgtatgtaggcttgatgatcgaggaccctttaactggtcacatgcctcgtcatgggtaagccttgcctcgggcagactaaggccagaataagataacacggaatgggcgtggaacggtggcgagagt

SEQ ID NO: 38267 - DNA, 1008 bp, Zea Mays
cccatgcccaggtactatgctccagtgcactcaccgcttcctctcgtcgatcgcccttgtcatgttctgactctccagccgtccgccgtggagttcgccgagtgccgccgtcctacagctcgtcttctccggtcgccgtctctagctgatgcagccccgacgtctccgtgtctcgcttcgctggatctacgcacgcagtccttgttcgtcattgtcttctggtcccagtccgaccaatctgtgcgctcgctctttgtccatcgggtttcatacgtgctcgcatttaccgtcgagtcatcgaacccgtcatcctctgctcaaaccccacatcatcggctcgtttcaaacacgatctcatcgtcaagctttgcctcagccttagctcgtcggtcacgctcgccagatattcgatcggagattttattcggagactgttgacactctcgtaagctttaagtcggaattaatggacggtaagtgattcgttattccagtagactaaatgtgatacttattagactacctaaatcgtttacggtggtttgatcgatagtcgtacatgttgctgctcccttgcgttataatagttattacgttctaggtagtttgcttgggttattagtttcgagtaatttaatattagtacggtattcaacatgtaatcgacgaaaaacccggattcatattcgttaatcaaagttgtgaatctaagctaaatttattactagcgcgcaagttgttagccgaattgttagatagattaaataaatatgtatgatgcaaaataaaataaaattagttcttggtaagcaaagtgatataatttataaagcgagagataaatttaacatttaattaagtagctgatgagttgtgtttaggctaattatgtttaaagtgtatgatttgttgtttgtgatatttgtgttaggttcgtttaatttagagcggcgtaattatagcgcatagtcgtatattaataactagtgtttccgtgtaagattgtac

SEQ ID NO: 38268 - DNA, 225 bp, Zea Mays
ggcaagtgtcccttgacctatctctgtcctatacattctttaattcacctcccgcattacacgtttatacttaaggattgactagcttttgttatccatatccttgtttacctatttgggttggattattattgtttagctctatgctattgctcaaactctaatcaatgaacatgatgagattatctatgatacgctgttttcccttctcttattatgatgttg

SEQ ID NO: 38269 - DNA, 900 bp, Zea Mays
ggtatcattttcttagggatcaccaacaaaagggggatatcgagatttcatacattaacactaaagatcaattggccgatatctttaccaagccacttgatgaacaatcttttaccaaacttaggcatgagctcaatattcttgattctagaaatttcttttgctaatttgcacacatagctcataagtatacctttgatcatgatatatgctatgactaatgtattttcaagtgtatttcaaaccaagtcataggtatattgaaagggaataggagtcttcggcgaagacaaaggcttccactccactctactactcatccttcgtcgtcgctccgcatcactctccatctttggtataatcttcactcatatgttttatttgccaaaggggagatagtaaataggaaagggcctatatttcatttcaagtatccgtttttggcgattcatgccaaagggggagaaagtatgagcccaaagcaaaaggaccgcaccaccaccctaattttaaaattaatggttttcaattggaaaatttcaaattggtatctctttgtgttctaaagggggagcaagtagtattttcaaaacgtgatatcttaaaaccctcttgaacactaagaggagaatttatttgagtgggagatttgtttagtcaaaggaaaagcatttgaatcatctacctttgactatttgcaaaagaactttgaaaaggatttacaaaaatattttgcaaaaaacaaaacatgtggtgcaagcgtggtccaatatgttaaaaataaagaaacaatccatgcatatcttgtaagtatttatattggctcaattccaagcaacctttgcacttacattatgcaaactagttcaattatgcacttttatatttgctttggtttgt

SEQ ID NO: 38270 - DNA, 984 bp, Zea Mays
taaatgcgcgcgttgcgcgcgcagaggtcaggcacgcccatactggcgcaccggacaatctacagtgcatgtccggtgcgccaccggacatccaggcgggcccagaagtcagagctccaacggtcggaacccaacggctttggtgacgtggctgtcgcaccggacatgtccggtgtgcaccggactgtccggtgcgccatcgaacagacagcctcaccaaacggctagtttggtggttggggctataaataccccaaccaccccacattcaagtcatccaagttttccacttctcaactacttacaagagctctagcattcaattctatacacaccaaagagatcaaatcctctccaaattccacacaacaccctagtgattagagagagagatttgcttgtgttctttcgagctcttgcgcttggattgctttcttctttcttgattctttcagagggcacaggcgccaacagtgcccaatgaaattgtcattgaggccattattaagggacttcggccgggaccttcagcgcaatactttgccaggaagccaccacagactttggagaagctgctccagaagatggacgagtatattcgagctgataatgactttcgccaaagaagggaggaagcattcaggttctctgaaatgactaggggcttcggaggaagatttcacccgaggcacgtcaggtcaattcataactctactcaaaatgacgatagagggagtcagcagcaaaggccacaatattcttcacaagcttcaggcagcagcaaagctcttttcggccgccagcgccaaggggcagaggtgccaggggcttcgggggaagatttggagatcagccaagaaagatttactgcctattctgtggtgaagacaagggccacactaccaggatgtgtcacgttaccatccagaagcaaaaggagatagcagaagctgcagcacaacaaagtcagccgaagcaagtcat

SEQ ID NO: 38271 - DNA, 359 bp, Zea Mays
cttgctttaaagcagacgctggtacacagagctcaatgttcactagcatgggcttgcagtgactctacagcccgagacattttactggcaacgtcaaaccaaattctttcttctcaaaagtttgcgccgtcgtcctctctgaaaatttggctgttttggtgtgcaaggtgtgtagagagttgacatgacaggttaatcatatatggatctgtttggttttggaacatgtactactcctgattactaattaagctagtgatccgatcgagtgaacgtacgggttgtgaggtgtcgggatttttctgtgaggtttactaagggtttgttcggttattcctattatacatggattgaatggg

SEQ ID NO: 38272 - DNA, 63 bp, Zea Mays
actgtatttaccccatctttgatgttcgccagcctcgcgaagacagtcaccctcgcagacgtc

SEQ ID NO: 38273 - DNA, 360 bp, Zea Mays
cagaaggtcatctaccgaaaacaaaaaaaaaatgacataagagggatgcagattgactggataagctaccagagatcaagcaagcacaaaagacctcaattacgttcaagaaatagagagctttatagtctctagaaccatctacactgatttctcaaaattttgattagagaatcagaaaatacagcagtcaaggcagatttccaggatagatcatgttcgtgacatgccagggttaacccaaaagagaatgcaggatatcaaaatagtatggctcagttaatttaagtgtcaagacatagtatggctcagttaatttaagtgtcaagacataggaagtctgaatatacatgtcttcca

SEQ ID NO: 38274 - DNA, 418 bp, Zea Mays
cgacgatccaagcgagccgcccgcgccccccgtcgacacgccgggcagcaggtgggtacggcatggacgggataagcagggaagagaattcggcgccaagcatgttaagtgaatgaaggcggggagctttttgggagccgtctaatccacggcctgggaccggaggatggataaccaatggactcgatcgtcaggttccggctggcccaggaatatagcaggatgttgttcgctcagttcgggctagccaggaaggcagcaagctgcgctgcgcagcgcatagatttgtcgggggcaatggaccattggagtgctgtcgggagaagggtggtttgcaggaattgccacattcgtggttgtttttttgccactaccaccaccatatcgagtcgcctgagagtttctgaggccagcattc

SEQ ID NO: 38275 - DNA, 568 bp, Zea Mays
tgtcgattcattttttattttgaaactgcccctgcccttcgatccggtctatctccgtccctacttggcagagcctgacttccattccatctcgatctcggcgatgccgcgcatggcgcgacgcacagcaatgacttcgcgaagtcgcgaagctgcacgcgtctagcgagcgcgtgtagctcgcccccccctggcggaagccgccaccacaggcatggcatctggctggcggagcattcgtctggccggcgtcagacatgacgcggccgagatcaagccggagacggttcgtggcctcttctcaccaccacagccgcagcctcccagtcgccaggatactaggatgcgctcgtgaagactttccattacgttgaatcaaaggtgagatcacatagaccatgccctgcacctgttggttgttttgctcaagtgaatcttcagtgcatctttttctatattttgctttgttgtccgtacgattatacgaacgtcagggttgggttatcttaacaatccacgttcacaattttctactaaataatctatgcttattcatcttagtattgtg

SEQ ID NO: 38276 - DNA, 369 bp, Zea Mays
tgggcacgcatctgaattttagttcagcttatcacccgcagacagatggccagaccgaaagaaccaatcaaattctcgaagatatgttgagagcctgtgcgttgcaagatcagtccggatgggataagagattgccttatgcagagttttcctataacaacagttatcaggccagtttgaagatgtcaccgtttcaagcgctttatggaaggagttgtagaactccgttgcaatgggatcagcctggagagaagcaagtatttggaccagacattctgcttgaagccgaagagaacatcaagatggttcgagagaatctgaagatagcgcaatcgaggcagcgaagctatgtagacacaagaagaagag

SEQ ID NO: 38277 - DNA, 242 bp, Zea Mays
  misc_feature (242)..(242): n is a, c, g, or t
gagcttcaaaacaggcctaaatcaggcctttatttacaccctaagtcaggttcgctataagggggtgtttggtttctatggactaatttttagtatctctattttagtcctttttagtcactaaattgtcaaacatagtactaaaagaggaatttctctattttagtcctgcatttagcaatttagagactaaaagagactaaaatgaaggaactaaaaattagtccatagaaaccaaacan

SEQ ID NO: 38278 - DNA, 222 bp, Zea Mays
ataaaatccaccccgagccggccgaaacggaaacccccacgcacgaatccaacccaagaacccatcaccaccctcgcgtcacatgcgcgcataggcccccggccgcaccgcagggtcgccatcacatcaccaccatgcccgcctccgctgcttgtttgtctcctcatcttttctcgcccccttgtcgcggccgtggtctgtcgccgccgaggccgagccgct

SEQ ID NO: 38279 - DNA, 609 bp, Zea Mays
agaattaaccctctctaaagtaaattatcataataaaataatattagttaaatcatatcataataaagattaggcatttgaaaaatgttttctatcaaaacaaaggaatatgaactttgggatatacctttaaattgatgacacacccaaaataatattctatgtaataaatgtggtgtgtatttcattacctaaataatataataaataaataatattattgcaggaagtaggagtattattcatgttagagtttgtttgttatttgaaatctggagttcaaaacaagaatttaaattaagttcgaatacttgaacttagaaataggaaaaatggaataagaaaaaggaaaaggaaaaaaaaagaaaagaaaagaaaagaaaaaagagagctctacctgcgcatgggccgaaaacatctgatcggcccatctcccttttccccctcaagcgcgcaccggcccacttcacatctgcaccggtctcaccactccactgaaacgtggggccaaccggtctgtcgcaccggtgtcatttccacacgggacctagcgagtcagtcattgccttttccccactctcccactggcacgtggacctcctcctttca

SEQ ID NO: 38280 - DNA, 369 bp, Zea Mays
aaaagtttaaagatgaaagaaagggggttagtaaaagcatcaaccaaaatcgatgagcattcaagtacccgacaacaattagtcaatcaagaataggtggcactaccttcctcagcctagtgtacgtacagagtgacccaagaaggctatagattggagctggcaccacggccaccaatcaaatgtaactacaaattgtaaaacacgatcacaatttcaaactaccgcacaccacttttcttcttgtttcatgcaaaacctcatcatcagcacgtatgcacaaccaacctaacagaacctatgcacaaatgtgttgtcgggaccctaacattagaggtgttatttctttgccaatctggaaacatgaaa

SEQ ID NO: 38281 - DNA, 1604 bp, Zea Mays
gtcacaggctcgatttgtgtttgcttcaaaggtgagacaaagatgtttgtgatcgttatgaagcaacatcatggagaaatcacacttgagacaccaatgactcaagtagtttacttaattatattttatttgacttgagtataggaatcgtcgtactatcaaggggatccataaagaaggttggtgttggtactaaagctcaaaatccttgatctaaaacttccattttaccctggtttcacttcgtttttctcaaaatctgtgcaacagttcaaaaaccggttcaaccggtttctgcactgttcccctctatcactgccagtctgccagtcagtcctgttagaaaaagtcatgtgcagatttttggaaaaccggttcaaccgaattttgaatccggttcaaccgaatttgaaaccggttgaaccgaattttgaatctggttcaaccgaatttgaaaccggttgaaccgaatttgaaaccggtacaaccgaatttgagtccggtccagtctccggctgcgtccgccactaaatcgaaaaccgactggtggaatccggttcgaccgaatttgaaaccggttcaaccgaatttcagtcagatttccccaacggccaccaacttttgggagcacctttatatacacctcccacactcttccccacagtagagcacgcacaaaacttcattcccagcctgagaaacacctcccactctctcacacacacctcttgcctctcccatttcaaatctttggagagaaatctttgagtgagtttgagagctgcggtttttgtgcttcatctccaaatctctcttgctcttcttaattcgagctttggtactacatcgagttctttgtggattcattactcttggagcttctagctcctagacgactaggtgtctcttgtgagtctccaaatcttgtggaagaccacaagaaagtttgtattactcgctcgattgagcaaagattattgtgtgggcttgacctttgtggtcggcaaagggaggattagggttgaaagagacccggctctttgtgggtgcctcaacgaggaagtagggcaccttggtggtgtgaccgaacctcgggataaatcttgtgtctcttgtgttcttgctcattgtgtttgtttgtgttcttcgttctctcaccattgcgtggaagatttgtttatatcttcttggtgtgtggattttgagaagtgcccttctcagatctactactttgaaccttgtggatcaactagaacatatcatttccaaagttaactgggtgaatttcgagatcaattcagttttacccagtttgcttctagtttttgttgaaaaagttttaacttgcctattcacccccccctctaggcaactttcaattggtatcagagcctaatccttgttctaacgcttaaccgcgtgaggaaagatcatgtcggggggaccaagaaacaaaagtgcttctaagcttgaaaaagttgaggttgcctcgacttcatcttttggtgcagatgttgatcctagggcaaaagatcttgccatgagaatcgccgaaaggatgctcctcaaaatgaaggaagatgaggcgaagaacaaaattgaag

SEQ ID NO: 38282 - DNA, 215 bp, Zea Mays
ggatgatcttcaaaaattcttctctcaactaagcaagaagaacaggatgagcttgctcaaactcatgaaaagagcagaagaataaaaggaaatgcttcataagcaagaaagatatcatcatcaaaaaaatcaaagacttggataagttgaccaaagagcatgagaagctaaagtgctctcatgattatttggtccaaaggtatgaagacatttca

SEQ ID NO: 38283 - DNA, 269 bp, Zea Mays
aagggattaagggaaatttagtccatattatgaggtttctttatttttagcaactcacctgccttccacataaaaaagggttgctaaataagaaactagtgcttgtgctactaatgccatctcttgtgttgagtttgtccatagaaaatctatgttaagagatggtgcttgttttaaattgtataaatcacaagcttaaaggatactattcaactaaagtaagatgaagttgataagagaccaaggtatgaaaacttcctatccttcag

SEQ ID NO: 38284 - DNA, 556 bp, Zea Mays
aagaggataagtttctctttgaaatgtcaagtctatcaaaagctaagatggaaattcatgattataatgaagaccatgtggcgttgaacaaaggtgtgtcactccatgaactattgtattacatttgtatatctaggctcttacatgctagtgtgtgcatgtatatgcaatatcttaagtcacatcataaggttgcacttgtggtgacgattaatgaatctctagatatttgattaatacctcttgtggtgatgtcataagtgagtcttaagtcatcttagtgaggtatgagtcaaacatggtaacttctcaagaatcttggcttaaatattgcatatcatatatatttgtataccttttgattatgagtaattccttcaattggtacaatttcacattttcatactttatttgtaccaaggttcaaattgtagaacttaatcccctggcctcacaagtccaagtgcataagctaaacaagtattcatcacttgtatacacacatttagggggagaatggtctataatttgaatctttgagactaacttcattttc

SEQ ID NO: 38285 - DNA, 351 bp, Zea Mays
catctaaggatcattttcatgatagtgtgtttaaatcttgcttaatcaaaatttcttccctttatatcctttgtatcctttttggagatttatgacaaagggggagaaattgtgcatttaaagcttacctttagtcctatgtaactaagtgttagaagacttttgaaaaggggagtataattaacaaagggggaatcataagaaaaacataagatgtagaaagtttattagtgcattctatgtcatgagcatcacgtttatttatgacacaaagcgccatatgaatagtatgatataagttgtcatcactctttgacccaaatatgtggttttcgcatttgagtacaaaat

SEQ ID NO: 38286 - DNA, 1080 bp, Zea Mays
ctcccttaaaaatatcctctagtcaagtcaatgttgctggttccctttctgaacaatccgaaagcatgaaaatgggaaaaggttctgaagatcctaaaggctaccttgatagtcagggaaatgaagatgaagaattcaatgatagtgaggatgatttgttggattctcaggagttggatgaattcattaaggatgatgattttattccttcccctgcccaagataaaaaaaaattacatatgagtattgttgaggatgctagcaagattgctggtggtaaaaaaagtggtcctatggaaatggaaacttctgaaggtgtgagaaggagtagcagactggaatcttctgaggaagtaaaaattgcggataaggctgctgcaagagctatggcgaaagatgctttcatcaataaaggtatgtcctataatcctttctcggtcttgaatactgataatgatgttctctttgatgtggctaacagattaggtgttgaattaggttcttcatttgatgatgctgttgaaaatttaaacctgattaaatctttagaattgtctaggaaaaacttagtggttcaatctgttaaaattaatgttgataattctaatgctgattgtatggtttctgatgatgataatatcatacataaagataatcttgaagataatttttctgaactcaaagatgttatgattcttagaaaaggtcgtaaaattcaacacaggaaaaaaactgtgagaaaaaaaaacaatagtagtttgactggcaaatctcccaataataggaaaaaccctattaagaggaaaggccaactagttggtcagccccccatttgttcagaatgattggtgtgatttggaattgtcaggggcttggtaaaagtgtaaaaagtgagttccttcgtgatattatcatgaaagagaaggttgacttcattggtcttcaagaaaccaataagaaagattttgaggagtcttggctgaattttattagtggtaatagaaattttatttgggtttggtctcctcctaatggtaggtcaggtggtttgttggttggttttgattcggaaatgtttga

SEQ ID NO: 38287 - DNA, 323 bp, Zea Mays
gtgatatctaatatcaatatggctcagtgtaacatggaacaattatctgacgatgatagatctttcctgacggctcctttctcagtggaagagatcaagaaagttatctttgagttgaagcataacagtgctcctggtcccgatggcttccctgctgaattttttcaaactttctgggagattattcatttggatattatccaattattcaatgatttttacaatgacagtctcaaaattgagagactgaattttggggtggtaacattattaccaaaagtagacaaagcggctgacatgaaaaacttcagacctatttgctt

SEQ ID NO: 38288 - DNA, 483 bp, Zea Mays
cattaacattgacttgatatgtcaatttgcaacatatttagagagagaacaataaacatcatacacaaaaataatgaggtatgaaacataattggatagaaagagtaaaaattacacattcaagctcattattgtatagcatatgatatgaaaaattctacagctattacaacaatgagaactcatctcatcacatcataaaagtgtttatgacattcgagccatgcatgcatcaaatagttattacagaccgattgttcatcacaaaaataaaggggtactgcataaagggtactgcataataaactttctccccctttttggcaacaagaaccaaaaagagagagaagcgccaatccaatgatcaccagtggggaggaggatgatgaagagtgaagaggtggtgcgccaggtcagaggcaaagtgttcctctccagactgggccggaggaggagcactgccagacaggtcctggggcggag

SEQ ID NO: 38289 - DNA, 365 bp, Zea Mays
caccagtttaacgaatgtcattcctctacagttaggcccaagtcgatcccacacatcagtgacccggctacaactacgtccgcggacgaactgcagaggatccggctacagttcaacgcatccttcaggatttacatttatcaggtactagaatacccactgtgtacttttaaccattcctcgcattcgtccagttccagtccatgagctccattagcctcactaacttcattaattcccacaaatcccaaaaaccgtgatgcgtatctaactggtacatttttttttgcgaatctaactggtacagctgagcgatttgacttcacgtccattttacagccacagcgcatccgctccacaaagag

SEQ ID NO: 38290 - DNA, 718 bp, Zea Mays
cttggtttcaagtgtaggagtgttttgttgattgatggcaaatgtttgtgaaatatttgtactaagttttatgcccgctagcaggtggctacactccagatcatgtctagtacatttcttcttcttcgatgaaggcaagtgaatgtagcggtggttgcttccgttctgacctgttatttctattgcctacactctaatattcagaagtattggattctttcgtaattggactctatggtgatgctttacttgcttgcattatactgatgctcaatcatatattgatgattgttgggggccttcggcttccgaaggtcctcaaaaacatgatttgacaatgttttccaagtgaaatatgtgaataggtatcttcagaatcgggttatgagtatacaagagtacggtcaggacgaagcttgagtgagacggaaggcgattatgacaaaggataagatgatcacgaagctatacgcagaaaagcttcagcatgacagcagaaaaggggaaccgacttaaagatgaaaaggcaaattagaccccgaagaattactatagagttattgataaatgtaaagggcattaatgtaattctacacgggctgcgtcccttgcctataaatagatgaacagtactcccgtactgttcacgctgacttggcattcgcttttcgcatcacgcctgtacctttattttccgtcaatccgaaggtacttttat

SEQ ID NO: 38291 - DNA, 188 bp, Zea Mays
gatggaccccacatctaaggctatctccagcaacttacccatccacatactcatattcaaactccactctatgaacagtgcactctacagtgcaaaactatgcagaacagtgttttgggtgaccatatgggtgaactgttggacacggtctaagcgactaggataagtgaaagggaaatgtgcccttg

SEQ ID NO: 38292 - DNA, 326 bp, Zea Mays
cttttctcgagccctgtctgaatctcgagggcgagattcctttaagtggggtaggtttgtaacatcccaaaattctaacccaggtttgaaaccctaatctacccccccttcttatcttctatcccaaaactcccttagatttttttcccatcatatgcatacactttgtttgatcacaagcacctcacttagattttattttccaacacctagattatccactaaatgatttgttcaaaaagaaaagaaacaaaaatggaaatgagttattaaaaataaaaagaaaaagaaaaaaagctcttcttccccctgctgggccaaatctg

SEQ ID NO: 38293 - DNA, 541 bp, Zea Mays
aaaatatagtggcagctcggtgaccgataaatgtggagtgttgatgttcatccgctatccgtccgcacggagttgttgcctagttctcgtcgtcttggtcgttggcgtgccacagcacgacagctccgctgcgccgccagctccactaccgcgccaacttgttgagcaccacgccatggccgtcggggcggaggttccacgacgcgatgccctacgtggcctcggccacgacattcgtgtccagcgcatgttgatttggttcggcacgtggaaggagcatcatggccatggagtctacggtagcctccggcggcgcgacgcagttgtaggcagccaatccgtcgggtatgatctgagcgacctgcatgctcaaagtcatagccatgcaagtgggtggaggacgcgcaccaggtgctcgatgatatgctttaccgactgcctagaaacctgctttcgctgttaagccaaaaagacgatgcttattgtaatacccaacttgtaatttttggaggataacctacaaggagaaattgtattcttg

SEQ ID NO: 38294 - DNA, 375 bp, Zea Mays
caccattctcgcgtatgcgtatcagtagcagagacagctaagtggacgatgcagagagagagctaatgccttctagaagacgcaaatgcgtgccggatctttattccatgttcctttttttttttttttttcagcagtagtacatgctaataaagtattgagtagacaaaagactcgtcatcacgtcgtcgtccacgtcggtagaattgcacatatagtatacctctgtatgtgtcttgagagaccagggagagagataccagcttgtacagatcgccagcgccaacactgctgatcctgtgctttcgttggtttgtgccggtgtacgtacgtgacttcacggatcatgatagattgatagctagctagggggag

SEQ ID NO: 38295 - DNA, 360 bp, Zea Mays
gcgtaactgtccgtggcaccattcttcgtcgtcttcatcggtatgaaggagctgacagcctccgtcgtcttcgaaatgacccattgggctagcggctagccccaacttcttcccacccaccaacagcgccgccttgaacaacggcggcttaacatggcaggctgcgccagccgccagcccgccacggagatgaggtccgcctcgcactcgactggctcacagctcctgcgtctgtcgcccagcttcataaactgcaccaccgcagctgggtgggccgtgggcgcggcaccggtggcggcgtcatccttggcagcaccaacgaggccaagctcgtcacgctcgtcgccgtgcgtgacgttg

SEQ ID NO: 38296 - DNA, 270 bp, Zea Mays
tggcgatcgagtggctctcacatggccgctgcctagctccataaatcgccggccggtccgtcgccctgctgcccagcaatcctgcagcactggcgcggatgcatggggtcgcagatccaagcctggaaaatgaaggagggcagcatccctggtccctgcatgcctgcatctgcctacgctcgcactctgcaggtaggatcgtccctaatcgggcgctgcaaagttatctcagccatcaccgctacctctcctatcatatcttttatttcg

SEQ ID NO: 38297 - DNA, 1439 bp, Zea Mays
ctgcaatatgcatcagtcacacgtagttagttactccatcaacagttgccagttacctgtgaaacagcgatgtcatcctttcttatttgcaattttaataatgcatgaatggctcattagctccagattgcaaggttcttcatgctatctttgacacttaaccatattcgacactagtgcactgacatcgtaagtttactttatatgtctcagtccaagcagatctcttatgtgatactgattagtttcagagtttgtaccttcctgaacctgtttacagagtctgttcaatgctgaacttgtctgggaaatggctttgaagttgtatacttgcgagttaaaatcaatcacatctcttatgtgagtcttgaaacttttttaccttgccaatcgataaattgcagaatcgaaatcactactgtcattatatctggttcctgggttagtgtgctaacctgacctacttctattatagatgtgtgctccatgatccgatacatatgtgcttgtaatttgtaaattgtcaagtctgcggcagtgatatatgataatgtcactgggaggtgtggggaaacagttttggttcccactccgtaggtcaggtcagcactgcccactggtccacacatttcttttccctttttctttatgtctccttgcctttaacatgatgcctgcccctgctgtcttccttttgggcaatatagttttcataatcctggatctgtgttcctggtcattgattcattgggtcatactaaagtttcttggactaacgaatggatttataacagaattttgaaatggcatgtgccattcaccattaaaaatgataaaataaataaaaaactagacagttggattaagatacatgatttcttcttcttctagggtttcaatttccaacatccaaccaatttatcaatttctcactatccggtgcaaattttaatgttaaaaactattgctatttgattctgttttgtatgtctgctgttctttagaacttcctagatctgcattttctagcatcagaccctttcggtacacaattgttgcgcgcctttcatggtgtttggccttttgtagatcaatatgagctgtctgcaacaataattctctgagcatcacttgccccacgatctcctagccatatctatctcgcttagcattttcatatcatttctgctacagcatttcaccaacaactaccgggatatttttaagaatatgagataagatttggtgaagagcatggatttatctgatattctatatagtaggtagtcttcttgtgactagcatgttctttgtataagaatgggatgtacagttagcacggggattattctacatggccaatcattctttgtctgctagttcactagcaggggtggatctacaccccgggccacccagcccgtggcctggggcttgat

SEQ ID NO: 38298 - DNA, 591 bp, Zea Mays
attacatattacacctcacctaaccttccacatacgcctgatgcagcagtcatgccgttgcgctctgaagaagcaccaaaagtgatggcacagcacagacaaggctagcacataaaagctaaagctctctgatgcaatgcaagaaaccaaaggggagatgagaaaagacgagcgctttggacctttggtggggctgaggtgaattaatgcctttgttctcatgggctggatgggctataggctggcacggtcctactcgaatccatcacaccgcgcaaccgattgtgcacccagtaaagtgaagatatgactgtcccaaccacacaaacaacgttaatataataatagcataattaattttccatatgaaaaaaaggaattgccaacacatccacaaacgacaaagcaacaaggattccagagagaagtaccaagtactggtccagaggttttttttagatcggaccaagcggttctttgatgagtggaagtataggtgtacatttgggccgggcctggtgggccggcccgaagcacggaaaaaaagcacggcccaggcacggcacgacccgaaataatttagtgccgggc

SEQ ID NO: 38299 - DNA, 560 bp, Zea Mays
tatgcttttatgattcctgaaagaaataggataagtgagatgaaaatgaaagaatacagtccaaaactttattaacttacttctttatcctctaacatttctttagaacaatttctagtaccactatcgagtcatacaaaaattctaaagcccaatgttttcctgtttaccccatgaaaaggaagaacacgatgccaaataagtagtgttattgaacatcttttttgccatggtttgtaattggttgcaaattacaggactacatacgattgaaacccgagctaagctttgacagataaaataccagcaactaacagggtagaggtaaaaagaacttttggagtatcaaaaatactacaagctagctgcaacaaaaaatgggttactaacatctctgtaacacttgctacataggtgttagttagccatacaaatttctaaaattataaaaataaatgtaaaacctagcaattaaaatcagaggaactctacatctgctaacaaaggaaacaataatgcccattcgcaccaccaactgtaacacaaacatgattacccat

SEQ ID NO: 38300 - DNA, 142 bp, Zea Mays
ctgccaccaccgccacctcctcgtcggaaaccgctgtccccatcgccaccgtgctctccactaaacgacaaaccaactcccagatccagcaccgacaccatcgaaacaaacccattcctctcccagccaccatccctaccga

SEQ ID NO: 38301 - DNA, 493 bp, Zea Mays
gtaaaactggtatactagccgtgctcacggtcatgagcagctcggatcctcacatgattaaattatggaactaaattcaatttgtcatatgcattgcatcgtaggtgaagttgttacttttgttctactatttaattgggttggtatttacttgtacttagtaactgctaataaaaatttgaccaactttaaaagcaatgctcagctctaaccatcctctttggtaagccttacactccacgtgagctcccatctttggcgagttcatgcacattattccccacaacttgttgagcgatgaacgtatgtgagctcactcttgctgtctcacccccccacacaggtcaagaacaggtaccgcaggatgaggtgcatgaaggatgctgtgatgtgttcgtgagaggtctaggccgtcgtcttccagtcaactgtgggttgctggatcgtttcctcatatgatgtaattatttatttattttgtatagaactcctg

SEQ ID NO: 38302 - DNA, 998 bp, Zea Mays
gtcaaccttcgtcttgttcgtgcttttcacactgtgtggttctgatccaagttcgaaggcacctgttcatatattacactcgggaaacattgttaaatcatgtttttgaggacctttggaagacgaaggcccccaacaacattcctatgctagaatccaccaaagcttcactaaaaagattttttctataaaggacttaggggaagcaacatatattttaggcataaggatctatagagataggtcgaagaggattataggattaagtcaagatacatacattgacaaggtggtcaaacggttcaacatggaacagtccaagaaagggttcttgctgaaggattatggggaggctacactagcgcacaacaaaattttcgaccccataaaaccaagaactactgcagctataggtcatggaattaccactagacgtgtcgagcaacaaaagacgtctcgatgtagatgaacgtgttgagcaaatgagcagtgttgtgcaatcgctggcgtccttcacgtcctcgtgcggttcttcctagtgctcaaggtgcagcaccttcgagatatccacacatacagggaggaagtgccgcgttctgaactgctaagttcgcgatggtgtctagacgagggtgaggggcgggcggctgctcgtttactagtggcaaattagggttctcttaatcgcgcccctatccctcattatataggcgttctggtgtgcttctgactccaagacccatcagtaactctaaagtcctatctaatttcagatctaatccgatttaggcttcctttcccttaagtgtgtgaccctataggttcacgtacatatagacatggcccaagtactcttacttgacccaataattgatagaggcctctagcaatacatgtcaactcatatgcgcaggtaaagatcatatcagacgaaccattacaacattacatatatgatgttccctttgtctcacaatatttggtctggctctaagttg

SEQ ID NO: 38303 - DNA, 336 bp, Zea Mays
ccaaccttttggggccaaatagcaactacatacaactccaccaacgaacctcctcaccactgcaccactaaatagttgaagggatcggcggtccgcgagcaaccgcaaggtcatcccgagacacctagcccaggtggggttggccgaggcctaaggccgactccagcagttcacccaaagtttacccataagcattgttttgcactgtagactgtattgtttgcatagtggagtttgaatatgggtatgggtataggtaagctgctggagatagtctaacaaattagggttgcccggagcccaacagttcattaagcacacctaactcagggaaag

SEQ ID NO: 38304 - DNA, 1677 bp, Zea Mays
tgaaacccatcgatgatgtatacatttctaccgaatgaataaacatcgaagtaactgtattggtcagcaaaagaaaccttaacaatcaaaatcactgattttaatctgtgaaaaaattaatactgccagcattattatgagaacttaacccaaagcacctcgatgtttatttataaattatatactattcccaatatctaagaaaacctaaaataccccgtagctatctaactattgtagattagccacgaccaccactattgtaccgaccagaggcatagccaaaattttccttgaggaaggaccaaccttatatataataccagtaaatagaatatatcatcgctagtcataacaattagcacatgtatgcaatgagtacataataaattttaacttattataaactagccctcttattttaactgtagatatacaagcaaaaaattcttttttttggtggtggtggtgtggggggtgctagccgccttgtctacgccactggtactaactgtactatgaaatgaaatattaattcttagccaacaatagaagcacccaaaatcagattaaccacaaccaccattgcactcataaaaaactaacctgaaacaaccccttttgtatcatgtatttaaaataacccaccactatcactaaaaaactaatctaaaaatacctgtacatacctactactgcaattagaaaaaaacaccccatatcatcaaccttacagttattaaaagagccaaatatggagcaaataaaggaatgcaattatgcaaaacaatttattcaacatatatgttcattgcagatggtatacattcgagaggttagagttacaattcacacgtcttgtttgatccatggtaagtcttttttcagagctaaggcattccttgtttcgattaatcagataacggaatactgtgggggacagatatcccccgggtccactggaatgataaaagacctcacgaaaggcccaagggtccaataagtcgtaaggtcatcacttcgtgggcctggggaggaacgaccagtgaagcagatcgacataaggctgggtcggaacaagctcagacgacccaatgatctcgagcgagtaatcacaacagagacccgatcttccagcgctgaaggcccgtacaacgaaccgagcgaagatgggtcggcgaaactataggaagatagactcaatcggtttactattttcttaggtgcacgtgattatcatatctgcatgtattgccccacggtcgagtatataaggcctagggggcaccccttcagaaagaatcgaactcaccacttagccgtccaccccagcttcctacgcattagagaatcaccttgtaactcaccatatacaacattctcgccaggacgtagggtgttacgcacttcaaagcggcccgaacctgtaaatcattgtccgctgtctctcgtgcaactagcacgaaccattgaactacagttgacaacaccgtcctactcctaaaagcaccttgaggggcaaccccgggtgtgcggtcggacccaaaacaccgacagctggcgcgccaggtagggggtgtgtcgtcgatccaagctagctcaatggccgtcactttcctgcacaagatcgtcttccgccccgggtccaaattctgcttcggaaccatctcagctgta

SEQ ID NO: 38305 - DNA, 1402 bp, Zea Mays
ctgacttccaaggcgccgcagaatgtttccgggtagccatccaagcggccctcaccaccaaaccatcggcgacttcatctatgcaggcaaactctaagcctgaggaagacctcgcggtacctgcgaacgaggctcaagctgcaacctctatgcggccgactgaagaaactaaaaggatcaacctcgggttcgctgatgaacacaagactgccatcatcagctccagcctggatgacaaataggaaaacgcgctcgtccagttcctgcaagataaccgagatgtattcgcatggcaacctgcggatataccgggagtcccgagagaactggccgagcacaaactgaaggtctacccccaggcgaggccgattcggcaaaaattacgtcgtttcacgcccgacaagagagaggccattcgcgctgagctggctcgcttggtcgcagctgggtttattagagaagtattacatcctgagtggctggctaaccctgttcttgtactcaaaaagaataaggtggattggtgcatgtgcgtcgactatacggatctcaacaaacattgtccaaaggatccctttgggctccctaggatagatcaggtggtagattccaccgctgggtgttctatgctgtccttcttggattgctactctggatatcaccagattagcctggcaaaagaaaacgaggaaaaacggcgttcatcactccattcggtgctttctgctatacctccatgtcgttcggcctaaaaaacgctggagcgacttatcagagagctattcaaacatgcttagccgatcactggggcaagcgtgtggaagcttatgtggacgacgtggtaatcaaaacagaaaattcggaaaatttcatcgaagatttacaactggttttcaacagtctacggcgatatcgatggaagcttaatcccgaaaaatgtgtcttcggggtaccagcaggaaagttacttgggttcattgtcagccaccgaggaatcgaggccaacccagaaaagatcgaggctattatgaggatggaggcaccacggtcgcagaagaaagtgcaaagactcacaggatgcatggccgctttgagcagattcatatcgaggctgggagaaaaaggcttgctattttataagttgctcaagaaggtggacaaatttcaatggacttcagaggcacaggaggctctagaggcactgaaaaaattcttgacaacaccaccagtgctgaaaccgccgcgtcgagccacgccgactcaactagctgaagatttgctgctgtatatctcttgcacgactcacatggtgagctccgcgttagtagtcgagcgagcggaagaaggacatgcttatccagtgcaacatcctgtttatttcatcagcgaagttctgggtccc

SEQ ID NO: 38306 - DNA, 2276 bp, Zea Mays
aaagaagccatcgggagaatagccaaatgggcctgcgagctaggatctcacgacattgaatttcgatctcgcactgccattaaaactcaagcactggttgactttgtatcggagtggaccgaacaacaagtaccagataacccagaatttgcagaagtatggcgaatgtattttgatggctcattgaagctgcagggagcaggcgcagggatcctctttactgcacctggaggcgaacacctcaaatatgccctacagttgttatttctagcctctaacaatgcagcagaatatgaagctctgattcacggactgaatattgctatatcattgggcatcaagagattgatggtatacgaggattctatggtagtcataagtcagataaacaaagaatgggattgctcgaacgattccatgggaaaatactgcactgccgtccgaaaattagaagataaatttgaaggtatggaatttcaccatgtggagagagatcgaaacacggcggctgacatgttgtccaagctagggtccagtcggactcaggtcccgcctggagtctttgtccaagagatatcacacccaagcatctcaccgggtcaggcagaagaatgtaatactttgagccaaccagagtcagattctgatgactggagaaggccgatcatcaggtatataaaaaatgaggaggagccagacgacaagaatgcagccgagcgcatcgcaaggcaatcggctcactatacactcattggggaaacactatacagaaggggtgcatcaggagtcctcatgaaatgcattctctcagctactggaaagcaacttctggacgaggtccatgctaggcagtgtggagtgcacgcagcatccagaaccctggttgggaaggtcttcaggtcaggtttctattagccaacaatgaagagtgacacagccgagttagtccagaggtgcgaagcctgccagtacctgtcaaaacagcagcatctattagcacagcaactgcaaacgatacccataacttggccgttcgcgtgttggggactggacatgattggacctttcaagaaagctcagggaggatacactcatgtgctggtggctatcgacaaattcactaaatggatagagttcaaacccattgcttccttaacttcagccaaggcggtggagttcatacaagacatagtattcagattcggaataccgaatagtatcataactgacttggggtccaacttcacaagttcagagttctttgatttctgcgagcagaaaagcattcagatcaaatacgcttcggtggcacacccaaagagccaacgggcaggttgaaagagctaacaggatgatattggaggccctcaggaaaaaagtctttgataaaaatgaaaagtttgcagggaaatggataagggagtttccctacgtcgtttggagcttaagaactcaacccaatcgagctctgcatggaaatacccctttcttcatggtctatggtttagaggctgcgctacctgctgatctcaagtttggggcaccaaggttgatctttgaaaacatagcagaagctgaggctactaggctagaggatgttgatacactcgaagaagaacgtctgaacacggtaattcaatcagcacggtaccagcaaaccctgaggcgctaccacaataagaccatgagacatcgatccttcgcagtaggagatctcgtcctccgccgaattctagcgggggaggagcggcacaagttgtcacctctatgggaaggaccattcatagtagcagaagtcacttggccgggatcatatcgtctcactcagatggatggcacggaaatcgagaactcatggaacatagaacacctcaggaagttttacccctagctgtatttcaaaagctattgggacgacaatgtactctgtaaactggggaatagatcatcaataagaagacttctagagcgctcaaattgttcattgtcgacctgcattcttacttaactcagggtgaccactatgccctgctaacggagcaatcgacttaagtcgacgacgacttaagacggtgcaacatgctcacgcttacttaactcagggtgaccactatgccctactaatggagcaatcggcttaagtcggcaacgacttaaggcggtgcaacatgctcacgcttacttaactcagggtgaccactatgccctgctaacggagcaatcagcttaagtcggcaacgacttaagacggtgcaacatgctcacgcttacttaac

SEQ ID NO: 38307 - DNA, 4484 bp, Zea Mays
gtcgtcaacgacttaaggcggtgcaacatgctcacgcttacttaactcagggtgaccactatgctctgctaacggagcaatcggcttaagtcggcgatgacttaaaacggtgcaacatgctcacgcttgcttaactcggggtggccactaaaccacactaacggagcgattggtttgagttaatactaacttgaattggcgcagcgcactcagcgcgtatacggttactcatccaggggcggcctctatgtcccatgaagaagtctcgaaaccattacgctacattttacctctacaaatgtagatactgttgaattctaaaacaataggagaacaatagtagcattcagcactgaaaggtgtcctctaacaaaacatccgagcacattaaccatgcgctcgaagcatgcaatgtttttctattttgcgacattcttctcaggagcaactgacgaagaagggcgactcgaggaatcgggagcagcgttcacatctgccactatgtcgtcagggacaaccacaccaggtctcttcatcagaatccgccccgcgcgaatagctttatccatggctttatcgcgttgggccctcaaagtagcggaagtctcttcagcaaccttgacagccaactgagcagtctctagctcctcggcgacagatttcttggaagcacgcagattcttgatgacaacatctttggccgatatcaactccctgaggcgaatcacatcatccaaggattcctgcagcttataacgaagattgtctaactcctccctggtgaagcgatgactcctctccaagatggtcagcgagttgctagagtcacgatatagcctatcaagattgtcacgagaagtaacaagggcacgtttttcttcctgcaaccaagaattagctttttcaaacgtcaagcaagcaataaaagcacagcaaaacaaaacctggattcacaggtcaccttctcagagtcaagctgagcgcggagagtagagttcagcgtgttggcatcattcagagaagcagagacctgggccagttctgtctgactttgggaatacttttcctcaagatcaaaacaccgccagaccagttcagcttggtcttgagagcgtttttcctcaagagcagaatactgctgaatcatatctggtgagaaacagtcaagcaaaggtgttgaaataagaagcagtttgataaggtagccagaaggaagcaaaagagcactgaccagcattcgccgcctctaagtcagaaacacgccgccgaagcagcaccggattccaacgcgccagagacaaagctccttccgggacggaagcaccctacaacctcagccggctagacatctcatcgaccaacgcctggcattaaaaagcacacgagcctgagaataattacctgcttgggtaaaagtcggaccagaagaaaccaaaatacctggaagttggaaaagaaggaagcgactcccaaatcatgagagatcaactgatggctcggcaaaggatcaccactcggagcaacttgcaatgattcagcagggaccaattcagtgacatcggcagaacccaaaaccttgtcatcaggtacgctggcctctaaagcgaccccctgaccaaaggcttgggctgttaccacacaaccagagtgtggaggagtggaccctacgtgaacatccatggaagtgcaagagggagaacccgctcccacaccctcgggggctggatcatagcttgcactacccatccgagtcggatcatctccggcagcaccctcgggggctggatcatagcttgcactacccatccgagccggatcatctccggcagcaccctcgggggctgggtagtagctggcactatccatttgagctggatcatctccggcagcaccctcgggggctgggtaaaggctagcaccgtcatcgtgggccgagttctctgcagcagccgcttctaaggctgaaggtccctcgatcacttccatgggagcaggggaatccaaaccagcctcctgaccctcaagaccacgctccaaggtcgatgaggcgcgggacgctgcacgggaggaccccaacccggcgtcgatcacatcaacacaaacatccatggcgccaccatctgccggttctgatagcagatcttctggaatcatgtcctcaagagtctgatcaaagttagctagagataattcttgcagtccaatgagggcaaacaaggctagagaaggaacaccgctactttccccactggcagtgtaatggcagctgtttttccgaatcagggggatttcatcttcttcttcaccgttatcatcagcaagacagacagtacacccattgggttcagcgttagacgggctacacccattgggatcagcttcagtgaattcaggcactggcacttcctcagcaacaggagcagaaggaccggcaccttgatccaagctggacacctgacgaaggcgtctcttcttctttttctccccctcagcaggaaaagaggcttggtcaactcggcgagaacgttttggacgaacattgataggcttctgagcgtccaaggctttgtcagcttcatggatgggcaccaccaccaatgtttcagcaggagcgacatcagaagaatctccagccaacatatccagcatggcacctatctctgcatcactaggatccaaaggcacttcaaagtggacctgccgttcatcatcaggaatttctccaagtaaagcaaccaaagcactaacttctttggcagagggtcgcactctaaggcccaaaccgccatcagcagaagaaggacttgacacgaaataagtaaaggctttggaaggaggcaggttccaggccgagtacgcaacaggggcgccaacgtttgatacgttgcctctaagtatcatttcaagccagttcaccaagtccacagcaggaattcttctgtcggtgacccgggttgagtcagctagacctcgatacagataggatgggtatgcccggtccttcagtggctgaatattcttgaagacaaagtcagcaaccacagcctcggcagtcagacccctctctttcagcaatccaacttcagctagcagagcccctgcttcagccacctcctggtctgtgggggactcggtccaactcggagtacgaacatccggttgtctccctgaccgtggtgggagggaattcccatgattttccacgataaaccactctaagcgtcatcctttggtgctgtctttgagtgggatgtcaaggtaatcggttttcctcccgcggcgcatctccaagctcgcgccccctaccagttggtgctgacctccggccatcccagggcgacagtgatacaaatatttccacaggccaaaatgcggcagaacgccaagaaaagcctcacataaatgaacaaagatggagatttgcagaatggaattgagattcaaatgggtcagattcaagcgatagaaatcaagtaaaccacggaaaaagggagaaataggaagagcaaggccgcagaggaggaatggaacataaacaacagattcatgggtgtcttctgttggaacagtgacccacagcagatccgccaggaacagagttctttcggagaaagaactccgatggacacgagatggagaaggtcagactcagaaacaacagacatatggttacctgtgaaaggcaattgactgttgggatcgatggggggaatgacagcagcggacgaactcgaagctttccgcttaggcgccatcttaacctcgccggcgagcagagtggaagcagaattgcaaatcgacagagaggatctggaagcaggaaagcaagaactagggcacggtatgtggagacgcggaacagtgcagtacatatagggttttcccgggccagatgtcatttccaaaaagtgcccagtcatcacccagcggttatttctaaaaacgctggcgtgccacgtcatcactcagctgctatttctaaaaaagccggcgtgccatgtcatcactcggccgttgattccaaaacggccaacacggcccaaattgactcagccgtggtttctaaaaacgctgacttcactcggctgttacttctaaaacgccgacgtcgccgtcagtcactcggtcgttgcctctaaaacgccgatgctgccaccagtcactcggtcgttgcctctaaaacgctgacgctgccgtcagtcactcggttgttacttctataacactggtatcaacagtaaccactcggccgttaattctaaaaacaccaacgtggccccgccatcattcggacactatttcagaagcgctaatgtcgtcgataataactcggccactgtttctaagacaccatcgtcgcaggaagcaaagaaattaacacagggagagactatatcattcttcatgaaagggaagttacagaacttacaaatcaactcgttatgagttgatacttccctaccactactactacgttacattac

SEQ ID NO: 38308 - DNA, 1245 bp, Zea Mays
ctggtctgtgggggactcggtccaactcggagtacgaacatccggttgtctccctgaccgtggtgggagggaattcccatgattttccacgataaaccactctaagcgtcatcctttggtgctgtctttgagtgggatgtcaaggtaatcggttttcctcccgcggcgcatctccaagctcgcgccccctaccagttggtgctgacctccggccatcccagggcgacagtgatacaaatatttccacaggccaaaatgcggcagaacgccaagaaaagcctcacataaatgaacaaagatggagatttgcagaatggaattgagattcaaatgggtcagattcaagcgatagaaatcaagtaaaccacggaaaaagggagaaataggaagagcaaggccgcagaggaggaatggaacataaacaacagattcatgggtgtcttctgttggaacagtgacccacagcagatccgccaggaacagagttctttcggagaaagaactccgatggacacgagatggagaaggtcagactcagaaacaacagacatatggttacctgtgaaaggcaattgactgttgggatcgatggggggaatgacagcagcggacgaactcgaagctttccgcttaggcgccatcttaacctcgccggcgagcagagtggaagcagaattgcaaatcgacagagaggatctggaagcaggaaagcaagaactagggcacggtatgtggagacgcggaacagtgcagtacatatagggttttcccgggccagatgtcatttccaaaaagtgcccagtcatcacccagcggttatttctaaaaacgctggcgtgccacgtcatcactcagctgctatttctaaaaaagccggcgtgccatgtcatcactcggccgttgattccaaaacggccaacacggcccaaattgactcagccgtggtttctaaaaacgctgacttcactcggctgttacttctaaaacgccgacgtcgccgtcagtcactcggtcgttgcctctaaaacgccgatgctgccaccagtcactcggtcgttgcctctaaaacgctgacgctgccgtcagtcactcggttgttacttctataacactggtatcaacagtaaccactcggccgttaattctaaaaacaccaacgtggccccgccatcattcggacactatttcagaagcgctaatgtcgtcgataataactcggccactgtttctaagacaccatcgtcg

SEQ ID NO: 38309 - DNA, 757 bp, Zea Mays
cggggcagatttttctatttcttatgccacactttgaaacatggctggttatggttacatatataggaccaagtggtctgttataactgaaagtagagataaaatttcaactactagattagagataaggtagaaggtaagatgtcaaagtactagataagatgctgacataggcacgggacttatcatatcatcactgaacttatcctatcattctcccactaagtgttgtgtggtgccgctagagggatttgaaccatcccaagtctatcgctaatctcctgaaacttgaccctcccaagtgatttggtgaggaaatcaatgagctagtcatgagtgctaatgtagttggccttaacactcccctcatccaagtagctcctgatgaagtggtgtttgaccagaatgtgcttgtcgtgcttacggaagacgagattcttcaccaatgcctaggcaaactcattctccaccctgagctctactgcttcagtgcctgccaaggagatcaccactagccagagagcctgcgtggacctcgatgtagttcgggttgcagtcggtgtgcccacccaactcgatgatgcatttggcgtaggcgatctgatggagtgagatggcggaggtgtcttggtgtacctcgattcccatgtaaagcggccttcagcctgcattttagccttgaacgcctccaactcttcttccttggtgtcgatgatcacccaagtcgtcaacatagacgcctatgagtaaggcatag

SEQ ID NO: 38310 - DNA, 569 bp, Zea Mays
caagaatccggcccgagcaggcgtctcggccggtcaccccgaggcctcggcaggtcaattccggcgtcggtcccgctaacagacgacccggccaggctccggccgacctggtcttcttttcgagccaactctgcctctgttcgcgctggcaccgctacccctggcctcggctcatcgaagagcggccgagggtttcctctaactaagcaagggaagcctcggacaacaaggctgaccgagccaagggactcctacgcctccgggatacagatacctcactcgtcacctttacacggggcgactcacgcttggtgaagcggttcagacaaccaacaggcgagacttagtgctcgaaaatggggaaaaacacggctccatgccgaatttacatacatgttcaggcctcgacagccacagtgaacaaaaacactggcattcgaagtgccattacaaacggaactctggttccgtccccacggatatgaacagcctccactccggggagcctgcggggcgacgagctccgggcgacccgccagcgacctctgcagcagcagccatggtcccag

SEQ ID NO: 38311 - DNA, 411 bp, Zea Mays
caaacttctcatgagacatttgttgatgccaatgcatcatgctgtgtgagtgtgacgacgtacccgttctccgggataactggataagtgataaccggaaagtgcaatggtcatgtatccgacaagccgtcttgcatttgcagtttcttcttgctgttgaacatctgatgtaaaacgagtgttccttttttttgtgtgtgtattcctatattgaacctcattatctactagtggtttctggtgtattcatgatacggactgctcatgagctggactgctggtcaagagttgtacctcgtgtgaggctgtgccgctgtggtgctgccgtgctggtgcctagatccatttcccccctttccattgagcatctttgtatgaatcgttgtgttgactcttgagtcataggtacgg

SEQ ID NO: 38312 - DNA, 295 bp, Zea Mays
ccaggatcagaattcacgtacacagtaaatgaacatcatcgcatagtgctcgaataataacataaaagagtattaacttattacatcacgatgtcagagacatccacatagtcatcaactcaacgggtaaatcaaagtgctaagcgaaacgcagtaaagatagggccttcacaggcagctgactgggggttgccgccaacccacacctagaactcgtcgtagtcttggaactcctggaagtctccttccacggcttcatttctcctgagcagtggttgcaatgtggacaacctgg

SEQ ID NO: 38313 - DNA, 473 bp, Zea Mays
cccggagtcttgccctttatgcgaccagatggaagaaactatcaaccatttgctggttcagtgcagttttgcaaaacagttttggttcagccttctgcggtcagtgggtttccaggagctctgcccttcccatgatgatgtctgttttgaaacctggtggaggaatagtgctgccagggtgggcaaacctttatccaagggattcaattctctagtcattttgggtgcatggtctttgtggaagcatagaaataggtgtgtttttgataattgtaaccctagcgctgcggtagtgttggcagctgcaagggaggagttaatgggttggcgtatggctggagccaaagcgctctctttcttccatttagaagaggtgtcttaggtgccttagttgtttggggtgtgttttggttttggtttgccaaatgtaacacctttgtatcggggttttttctccccattttcttcttctt

SEQ ID NO: 38314 - DNA, 603 bp, Zea Mays
tggtgctataattgtaaattctaggttgcacaataccatgttgagccctgatggcagggtgttgagcaacaaaaactcagacttctgcactatatgctacaaatctgaagtcatagatgatccattgttttctagtatataggatcttatagttagcgttgtggctagatttgcagcagccatactgaaatccacaatgattggcaccatagaagatcttgtctcagtcacgtgcatagtcaatgaaggcgaaccatgtgcatgcatggtctgtgcttggcgtgggttctagagatgctgtgggggcagaatgtgagcaggagacaaaaatattgtagaagcagtagaaactggtacggattaaaaccaagcgaatagacatatctcggtgctgtcagcaccagatttggtaccaaattatctttgagctttgtgcaattttcactttggacaggtgcataaggacatagcatatgatggatgatgctatgcttagggcgtgtttcgggctgctccactccaagggtgcataaggacatagcatatgatggatgacgccatgcttagggcgtgtttcggactgctccactccaagtaatctag

SEQ ID NO: 38315 - DNA, 1504 bp, Zea Mays
tgacacttgttctccttctagtgaccttgatctccttcttagagcttggtcttgagccttatgacttacaccacataactgtagctgtcacctcattggttgtaagtcacgtccttatgtagtgatccttgatgtgccatagctgttctcaactcgatcacccttgactttgcaagccttcttcttcacccttggctttgggttcctcagcctccttgaccttctcccgtgcacttggtacctcgaagcttttcttgccttcgtccttggcttgatcagttgtctccaagctacgcacccgagtctcacttttgcaatgtccatcttacttgtgatgtccattatgtatccataatccagttcttggaccatcacatttgttcacttgtgttgaaccctgtaggctttactttaagcacctgttcaacacttagtacacttgttagacctttaattaagttgtcatccaaacaccaaaacccacaggagagctttcaatctccccctttttggtgattgatggcaacacaattaaagcttacatgagaataagatttgaagcacaaattttaattctaagattatagaatgctccccctaaataagtgcttacttcaaaaacataattttggcctcagacgccaatttgcacatacttaggcaaatcgaaacatttctacaccttagcactttttagtatgcattgtggcaagaatcaaaccatgatgctataacacacaaatgcacataatcagagttaaaccaaaatagtggatatatcacaggaatatcaacctaccactattcatcattaagataccaattcaaactaataccaatttaaactaagacactaatttaagacaatcttaaagcaccattaaccacatgactatctattgcactatagaagccaaataattcatcgcagcggaaacactagtccatatgaacaacattgcaagaaacatatgaatatcacacttggcaaagctaacacatcacccattaggataagctttcctctcaggttgagataagctttaatacacaaattctccccctttgacatcaaacaccaaaaaccatacttaagcaagaacatatgatgatgtcaagggacagcagggtgttaaggaggaaaacgactatcaaaactcccccttacttattgagcatatgcccgatcattatttaggtaagatacatatatgcaaaaagattaatacttccttttgtaccgttaccatgttgtagtgtacttcccatcttgaaagtagttaatctctcgagagcttctccacacttgtgcctgattctttctcctaactttttcttagaacaagttatagtattgggcacaagaagaaacttctattctcatgtttatcaaaagatgtcaattgaagcaaactattacgactaccaattgaaagataccaacttaaagataccaattgcaaagttcatttattatcatggctccatgatatttaagaataag

SEQ ID NO: 38316 - DNA, 1024 bp, Zea Mays
caagtatttgaatgacttgcactttgcacattctagcttctatagaactagaggggatcacaacataccttggtcaaggcatactctaccactttcatcacccaaagatgccaatttgaatatcaaatgaaacgccacttaacaccaattgaaggctaaatgaaaggttgactaaatacaacaatgcatgcctcagtggcacctaagccaattgaatacttacagaaagtctaacctttacgcaacttggacatgcttcatactcaactattattgcataaattaattgaagatcaacacaatcatgtaaagcgtaatgtctaagcatgccataattaagaaggtttcttaagtgcacaaaagaaacaacactttaaaggcataaattacctaagccaagatattaccagttgaaagacgagaacatagctatgatcacaatggaatttcaagaatatttaatgaaatttcatagctctattttccatacctttgcctttgttatcaccaattcaggactccttttgctcacacacctcatagctcaaaaggggcacgacatggatttgaaattcacacaatactaaactagggtaatcatgtgaacatggactaaacaaaatatcataattgcacatagcatgacttacaaaaagttacaggtttatccatatacaccaagagagttaatcgttgtggatataacaaatgaaagagctacccatgaatggttcaaaagatatatcctatatagcaccagtcatgattaagcaatcatcattatgattcatttaacacagtcaatcataaagcataactactccaaagacaggtagcacaacaagccaacttaagagcaatgcaattatgtacttaaaatacacgggtaccatcctttggagagcacgttgtagattctcatcaaagtcctttacttgattcaccaataatgattcaggacctatacaccttatttcacttgagatgaacatgggattagtgtatcacaataattcaaccttgg

SEQ ID NO: 38317 - DNA, 324 bp, Zea Mays
gaaggaggtggtggagtcgctaagtcaggtccgctgagccggacttcgctcgcgctctctctcttttttctttttttttctttttttcttttaacggggccgtggtcttatgcgtgttgtgcaggtggctgactttgccaaccgcacggcgtcgggggccctcacggcagctgtgtctaccgaagtcgagagacttcggacacaacatgctgacgccgtccgagagaaatcggccgccgacagcaagtgtcgcaagctggcggacaaggtgaccgcactggagggagagaaggctgacctccggcgccaattagcgagggagag

SEQ ID NO: 38318 - DNA, 951 bp, Zea Mays
gatgccgtgtcgcgctcatgggagcagctcggcccgtgccgcacgtggtgggaaaatctgagggccaggccaacgcgacgccgccgacggtgtttgaccggattcgtggccgaggcgtcgttgcgtcaggctcaggcttctgtcgcctcgcctgtgcggtactagtacgctgcgtgcttgcgtgggacgttgatctctccgtctgctttagccagcccaatagacgttgccgcaatgttatactaccacggtagactcctcacagccgcacagcaaaacaattttaaacccgtcccccttacgcgtaacagcgtactacccgtcatcagccatcggcacggcgccccctgctagcgtctcttgtcttgtcctacgacggccccaccaccctactgtcgctccgtctctcccctccggccctcctccagtggccgcagcgtccctccacttctcccccagcaccgtctctctcctcctgcacaggtacgcagcgtaggtggagttggggcggatgagatctggccgcggattccaccgtcagtgggctagcgcgaccgagatccggtcgcggggctggcgcggtgctcagcctgcggttcggcgaggacggttgtggggcgaggccaccgcagcgacggcaccgaacaccacgctcgatgaacgcaggagagaagattcaggcgtattcttgtcttttcgctatcttcttggtacgtgtgtctccagctagaagtacagtggaagttctcgtgtaaaagttatgggtctatgtttaaagaatacagtatctttttacgtttagtttatgtatcttctttttacgtttagtttatgttctatgtgacaagaaattaaatacagagagagtgctgctacctatgtacatgaaacgagcatatatgttgaaaccaaggtggtacaaagataatatataattattaaaaacagcta

SEQ ID NO: 38319 - DNA, 629 bp, Zea Mays
caaaattatcactaaaacacaaacttgatctagtaaaagagttaatgcaatataaatcaagtttgagacaagaaaagagaaaaaatatcttcacttgattgctcttccaagatgtgaattatactaatagcaatatcacaagtgaatagagagaaattaggaagagagaaaatcgcaagaaagtaaaagacaagtgagatagatgatttttatcctacggttcggccaagcctacatccacgttgtggtgccctcttttggacaagggttgcactcaatccttctcaattgatcacgtagaccaaaacttgagtgccacgttcttctttatcgatatagttcctgtttgcaaggaatctccacaagttggagtctcttgcaaccttacaaaagatcaaccttacaaatcagagtagtagggagtgagtacaagcataagagatcaaaaccagcaactcaatacaaaagatagaaacacaagcacacaatacaccaaatatgaagaacaacactaagacgacgctcgaatctcgctagaattgcacaattgagttgtggaagtgtcggagtgttgagagtctcttgagatgcttgtgtactgaatggaggcgcctaggggctgcttttat

SEQ ID NO: 38320 - DNA, 59 bp, Zea Mays
tggggcctccgtgacctcaaccaccatgccgctccggcgggctccctatcagtgtcgtg

SEQ ID NO: 38321 - DNA, 229 bp, Zea Mays
gcgccggagtgggtttgcgcgatgtgttgggtcgtgatgtgggaaagggatatgtgggccggtacggggctgcggcccagccagggatttttttgtttctttttatccatcttgtttttttattttctatttcttttttcctattaaatatttgaactcaaattcgaatataatgtgaatcccaattttcaaatcaaatgcaacatagcaagaacctagcatgagatgc

SEQ ID NO: 38322 - DNA, 461 bp, Zea Mays
gtaggaagcgaagcgactgtaccaggcccgcggcgcctgcttgaggccgtagagggagcggttcagtcggcagaccagatccggacgggctttgtcgacgaagccggtgggctggctgcagtagacagtctccgtcagagtgccgtggaggaaggcattcttgacgtcgagctgatggatcgcccagtcccgagagagggcgagtgagagcacggtgcgaacagtggcgaacttgacgacggggctgaaggtctcgtcgtagtccacgccgggacgttgggtgaagccccgaaggacccaacgggccttgtagcggtcgagggagccatccgaggtaagcttgtggcgaaatagccacttgccggtgaccacgttggtgcctggtggacacggcaccaggtcccaggtgtggttggccaggagggccgcgtactcctcctccatagcgcgccgccagtgtg

SEQ ID NO: 38323 - DNA, 1081 bp, Zea Mays
tggagggaagacgattgaggaggtgagtggcggtgtgcaaggcctctgcccagtagctggcggggagagacgcctggaagagaaggcagcggatcatgttggtggtagtgcgaatcatgcgttcggcccggccgttttgggcagaggtgtaggggcacgagagacgcaactggatgccatgagtgagaaagaaagagcgagaggcgtgattgtcgaactcgcggccgttgtcacactgcagggcacggaccgggcggtgaaactgggtggagacccaggcgaagaagtgtgtgagggtggtgaacgtgtcggacttcaatctaagaggaaaagtccaaagaaaatgggaaaaatcatccaaaatcaccaaatagtatttataaccagaaagactgagtacaggagaggtccagagatcacaatgaaccaggtcaaaagcctgctcagcccgagaagaagtggtgaatgggagacgagtatgccgacctaactgacaagcatgacagaggccctcaaaatgtcccctactacatgaaggatctaggctactggtaatcttggtcatgacgtcagagccgggatgtccgagacgacgatgccaagtggtggaggaggtggtggacaccagggcaggaggcggagacgcgccggaggtggatggccggagcgtgtagaggggccccgagctgtcacagcgggcgaggggagtcctggtggccagatccttcacagagaaaccagaggggtcaaattcgatggaacaagagttgtcagtggtgaaacgacgaacagaaaggagattatgagtgatgtggggggctacgagaacgtcgttgaggtagaacggtccagggagaaccgaggcacctacagaggtgacgggcagagtggaaccgttcccaacgacgatcgatgaaggatgataggaatgaggggggtgggagcgggagagcatgcctgtagtgggagtggtgtggtaggaggcaccagagtcgatcacccagtcggaggaagggggggtcatcgccatggtgctgaaagcggcggcgagggaggcgttgtcccagcctccagacagcgg

SEQ ID NO: 38324 - DNA, 1272 bp, Zea Mays
ttgcccttcaagataatacgattgccacgagaaaccttaagaacattatcaatagcagcaaaattgaatctcattgcttctaaagtgctcaaagaaataagatttctcttcaattttggaacaaaacggacattgataagtttcttaatactgtcatcatgaacttgaatataaatagagtcgattccaataatctcacatgtggatccatctccaataacaatctcaccagcatgagactagacataatcagaaaatcaatctctatgcgaacatatatgaaaaatgcaagcgaaatcgagaacctaagaagagcccttatcaaaagaggcaataaacaaagcttctctattatccaaagtttcaacaaaactggcttcaggagaagacttatccaattttttttctttctctcctctttatttctcactttgggggcactgagaaatatgatgagtattttttctgcaataacgataataaaggttggatttataatctccagatctccgaataattaaaccttcacctttgggtttagaatgagaatcaacatcaaatttttccttggataacaaatttgacttaacattctcaaaggacagtaaagtatgatgaccataaagcataattgccttaaaattcttaaaagaatgggcaatgagacgactactaataaaattaccttatcttcatcatctatcttcacatcaagactctcatggtccacaataattgaattaaatttattaagatgtgattgcatagatgtaccttctgacatgtgaatagtgtaaaaacgctccttgagacgtagcttgtttgcaaaactcttggtcatatatagctcctccaatttcttccacaatgttgctgcggatttttcatgcattacttcacgcagaacatcaaaagataaactgagttgtatggtggacaaatttctctcatcaatatcttgccacttatcatcagtcatgtcagcaggtcgcgtctatagcgccttttgaacaaccaactgggtaagaacatccttcatttgaatctgccaaatagtaaaactaattttgccatcaaacttcggaatatcaaatttagtcgacataatgcgacaaatagcaaaacccggcggcggtagcggccacaatatggataaaaacaatatgtttaaccctagctctgataccacttgttagggaaataaaatagacacaaagatttacgtggaaaatcctctccaatatggaggagcaaacaaccacgaggaaacat

SEQ ID NO: 38325 - DNA, 1681 bp, Zea Mays
gtggttgtattgttggttgcatatgtatgagaggttggccatcaaattgatttactgtgatatcaacattagtcttcttccttcggatcctttttgtttttttctctaaaccaccaataggccttgctgaacctcgtatttctttcgccttgggtttcatgcctgttgttgtaggtctaccattcttcttcttttgtttgtcatctaaccaaatatcttcctttatctataagcttcttatcttatgttgagtctgagtggactaggggtcagatccaaaagttatggtttagggaaatgtggtttgtcctaagggcctttttagtggaaatcgtgtgtcaaccagtgtcaaccaaaattcactactccccaactctttatagggtgttccttacataaccaggcacaagttttataattggggccaagtgatttggtgagagtagctttatgaacacgatgacgtttatctctagggtaggtttatgacttaggaaaattctaaatttttcgtttggtttccattttgatttagactttggaatacttttccttcattttcatagcttgaacttattataacttttattctatacttaattactgcaacttttgttaagcttttaggttagggttcccaatgtgacttgattttcacctttttggacttaatgtggtaatttggggttagggtcaaatccttccaacttttcaacatggcttaggtgtgttatgcccttcttagtgtttctatcttagttataaggcttgattgtgtttttggttgggtttgatctccttaagccacatgtgttaacaagatcatctaatgcaaagctaaggaagacatgcttaatacctgaggtgttacaacaacatttgctcctaaatactctaaagtaagaaacattgggtttattactggttaggagttcgtatgatgttttttgaggagtcggtgaagatatagccggttgagggcgtggcaagctgtgttgactgtctttgcccaaaaccgatccgatgttttgtattcctcatgcatggtcctctccatatcaattagagttcgattcttcctttccaccacatcattttgttgttgtgaacaaggagatgatgattcatgcttgatcccttcttcctcaagaaactcttctacttgtgcgtttttgaactctgttccgttgtcgcttcttatcttcttaattatcaagttgaactcattttgagctcttctcaagaacttcttcaaagtgccttgggttttgcttttgtcccgcaaagaatacataagtgaagcttgtataatcatcaacaattataagaccatacttactctcgcagattcttatgtaagcaatggggccaaataaatccgtgtgtaggagctccaatggccttgagattgtcatgatgttcttggaggggtggcttgatccaacttgttttcccacatggcatgcgccacatggtctgtctttctcaaagtacacatttgtttgtcctaaaatgtgtgcatcctttagaagcttatgaagattcttcataccaacatgggcaagtcggcggtgctagagccaatccatattgggtttttagcaattaagcatgcatcaagtttggctttatcattccaaaagtctacgatattttttccctttaacacacccaactgaat

SEQ ID NO: 38326 - DNA, 355 bp, Zea Mays
agaaatttgactatggaagtattttacataacttagtttagatgtagtgatttaaccaattctatagaaataaattaattattaattaactatttctatcataaacatatgtctacctttagacttatcttttcttcctagagggagaatgtcatcatgataatcaagggtcaaataatttttattgataaattaaaccactgattggacttcactatttgaattgtcatgaacactagtactacttatcatctcaatgctaataaagcttctattatttatttagtggatttaaatgaacctatgattttaaacttctagattaattctaaaattcatcataaacaaagttaat

SEQ ID NO: 38327 - DNA, 623 bp, Zea Mays
aaaatttcgacagcatcccctttgaaaattgcataaacggggaagcaacaaaatataaatagatatcatgataagagaacataatagacattaataatctgctagcaatggaaagacaaccataacgacatgaactaaatcaacaagtgcgcacaactagttagaaacaacatcctttgacaagaagtttctaattaaatcctgactgcgcctaagcagcgttattatgagagtgaaggtggatgtgctgctacttcccacttcccttgatgagcaacaagcacctgcattgagtaatgcaagagtgagatgaaacatctcagcaagcgaattgttttgacaagatatttaaaccacaaattgaattaatcaacattttaaaagaatcacaattaagatcagaaattattgtagatatagaactcagtagtctcaatataaccaataccatctcatttccttaaacaaccacaatagtttgtataacacttccatgcgtcaacaatacctgcaaatatcacttcaatgtatgcataggaacacaaagtgtaggtactctgtcttcatacctttgagggtataaaaccacatcatatgcaaatataacttcaatgaatgcatat

SEQ ID NO: 38328 - DNA, 456 bp, Zea Mays
agagaacgtgagggagcagagagagaggagtgagagagagaagagagagagaagtgggaggcggcggcttggagaagccagccagggggagggcgcggcgtgagaaaaaaaatgggcccctagttgggccttagggttaggttagtttagttttttttctttttttttttcaaattgcgaaattcatttttaaagaactctaaaaatcataaaaattcaccaaaattatttataaacaaaatacttatttttagactaattattattatttttcttcattattgtttagttactaggatttctttttcaaaggaaattaataacaatcatccgagaatcaagcaagcacatagaaagaaaatgatcagaatgcaaataaataattaaacacttaaaaaaattattaccctaattaatataataactaaattcattatttttatttgatggcttttg

SEQ ID NO: 38329 - DNA, 292 bp, Zea Mays
gccaggcgcgcgtggagtagagaacgtgagggagcagagagagaggagtgagagagagaagagagagaagtgggaggcggcggcttggagaagccagccagggggagggcgcgacgtgagaaaaaaatgggcccctagttgagccttagggttaggttagtttagtttttttttcttttttttttcaaattgcgaaattcatttttaaagaactctaaaaatcataaaaattcaccaaaattatttataaacaaaatacttattttagactaataattattatttttcttca

SEQ ID NO: 38330 - DNA, 319 bp, Zea Mays
gaaactgtcgaatctgccattctgcagaaaactaaattcgagatcaaaacctaaccccacatcaaatccaacctctaatcctttaattctcatgatccacaacctccaaaagcctataattaccgggaggaacaaggatctcatccatacctagggtttccccaagaaatcttcaagaggagatgggaaagaacatctctttgatcctctcttcctcttcaattcaacgtgcccctccttttctccatccttgctgcgtagggggagatcttgggggaggaagcaatggaggatggctgccatagggggagggggcgtc

SEQ ID NO: 38331 - DNA, 1350 bp, Zea Mays
gtgaaactattgtcatctgcactccaaagacattaatatatatcaaagatatttgaacccatacccttcctatatgtgcaagtgtgtcaaatttatcttcaaattgccaagaatctaaagcctatcctctgataccaactgtaacaccccgggatccacaaacaccccagaatgctactaaactacacatctaacattcatatataaaatttcgacaacatctcctttgaaaattgcataaacgggggaagcaacaaagtagaaatagatatcatgataagaaaacatataagacattaataatctactagcaatgggaagacaaccataacaacaatgaactgaattaatcagtgcgcacgactagttaaaaacaaacatcctttgacaagaagtttctaattaaatcatggctgtgtctgggcagcattattatgagagtgaaggtggatgtgctgctacttcccactccccttgatgagcaacaagcacctgcattgagtaatgcaagagtgagatgaaacatctcagcaagctaattgttcttacgagatatttaaaccacaaattgaattcatcaacattttaaaagagacacaataaaaaatcagaaatacttgtagatatagaacacagtagtcccactataaccaataccatctcatttcctcgaacaaccacaataggttctataacacttacctgcgtcaacaatacctgcaaatatcacttcaatgtatgcataggaatgcaatgtgtaggtactctatcttcatacctctggggatataaaaccacatcatctgcaaatatcacttcaatgaatgcatatgaatgcaatgcgtaggtactctatcttcatacctctgggggtataaaaccacatcatctgcaaatatcacttcaatgaatgcatatgaatgcaatgcatatgtcctctgccttcatacctctaagggtatgaagccgcatcgtaccccttctcgggcaacgtacgatgctaagttgtaccggtacggtcggaccataggtcacgacaaaacttcatatgcaaatgagtcatgcaatgtatatggcatgctacatttatcaataaacttcacttccttcagatacaacacaaacctcaaataatacttcatttatcttcagatacaataccaacctcaaataatacttcatttaccttcagatatgtgaattaatctcgtgagtcatactcaaatcataatcatcatcaatatatgattgagcatcagtataatgcaagcaagtaaagcatcaccatagagtccaattatgaaagaatctgatacttctgaatattagagtgtaggcaatagaaataac

SEQ ID NO: 38332 - DNA, 438 bp, Zea Mays
gttatagaacctattgtggttgttcgaggaaatgagatggtattggttatagtgggactactgtgttctatatctacaagtatttctgattttttattgtgtctcttttaaaatgttgatgaattcaatttgtggtttaaatatctcgtcagaacaattagcttgctgagatgtttcatctcactcttgcattactcaatgcaggtgcttgttgctcatcaaggggagtgggaagtagcagcacatccaccttcactctcataataatgctgcccagacacagccatgatttaattagaaacttcatgtcaaaggatgtttgtttttaactagtcgtgcgcactgattaattcagttcattgttgttatggttgtcttcccattgctagtagattattaatgtcttatatgttttcttatcatgatatctatttatac

SEQ ID NO: 38333 - DNA, 209 bp, Zea Mays
ctcagactgccgccgatagcagccctgtcgacgataatcagtcccacctctctgatccagcgggtggtgctgacaagggcctccacgacgccatcctccttcacgaggctactgcgatcgtcaacctccactccaggtcgtcgatgtgcaaaacatccggagtctcgttcacgtcgtcctcgacctcgccaacaacaactacacccgct

SEQ ID NO: 38334 - DNA, 639 bp, Zea Mays
cagccctgcacgacagtgctgtgggagaccattctgggatgcatgccacatatcatcgtctgaactctgaagaaattgttttggtggaaaggtatgaaggccgatgtggaggattttgtgcaacagttaggggtgacaatgggccctaaattttacactatagaatttaaggatcggattaggaccgagcactatttttattcaattttgaactagaaataatttagggccctaacaaattatgaagaagcatttggatcgtgatccattaccacccctagcgatagtgccaggtctgccaacaggcgaagggggaaaggtccatccggcgggtttgttgcaacccttaccggtgccacaagggtcttgacatgatatcacaatggctttcatcgagaagttaccaaaatccgaagggtatgatacaatattggtggtcgtggaccgattctcgaagtacgcccattttatggctctcaagcaaccttttactgctgcccaggtcgcacaggtgctattggatcaggtggtcaagttacatggattgcctaagtctattggtagtgaccgtgacagaatttttaccagtgccttctggacccagttgttcaagctgttggggaccaagctgaatttgag

SEQ ID NO: 38335 - DNA, 303 bp, Zea Mays
ccgccgcccgcgcgctttggccggatcaactctcaaacggctttcacaaatcacaactgggatgggaccgtggacgaatccctctcgatttccagcagcagaaatatgcgcgaattctgaccatttccctgcacggcccgtaccgaaaaccgccggcccccaccccacacgcggccacgccattcgccgaagcgagacaccgttaaacaaaaaaaaaaaaaaaacacacacacacacacacacaaaccccatcaagcgaagcaaatcgctgctacttttccaagatcagaacctggacttggc

SEQ ID NO: 38336 - DNA, 763 bp, Zea Mays
gtcatcttatgatttagttaattgtcacacccggtttcagaaggcaaaccgaatgcgaactatgtacgtgccaggatcagaattcacgtacacagcgattacataaaagaacatcatcgcatagtgctcgaataataacataaaagagtattaacttattacatcacagagtcagagacatccacatagtcatcaacttaacggataaatcaaagtgctaagcgaaacgcagtaaagatagggccttcacaggcagctgactgggggtttgccgccaacccacacctagaactcgtcgtagtcttggaactcctggaagtctccttccacggcctcgtcttctcctgagcagtggttgcaatgtggacaacctggtgttttgtggtaaaacaaggatgagtacacatcaacatactcagcaaatgccccgtttggctaaagtggactagcttttatgtggggttaggctcaagtagttgcttttagttggtcaggtatttactgttagtggaagccatgtttttaccataaaacccaagttataatcccaaaaagtacctcctcggagaggaaatactagaatacataattaaagtcaccatcattaaccatcatcattaaagtcatcatccaaggtgtatccggagtatctctaatcaaagaggatcccaaggctgctcttaaccgtgagcacggctgatatatcagtttcactaccctctgcagaggtcgcacactttacccacgagtcatgattcccttt

SEQ ID NO: 38337 - DNA, 574 bp, Zea Mays
atatcaccatcgtatccagaataaaaacatcgtatcataaagtaattctcatcatgttcgttgattagagtaaagcaccagcatagagctaaccatgataatccgaaaggtaaacacggataaggtaaatagaaagctagtcaatccttaggtttcaattaaatagtgcgggacagtgaattataaatagatatgacataatgggtcagaggacactagccttcaccaagctgctgctgctcagggtcttctcctgcaattctctcagattccacgaacgacccgatatctacgcgagtgcaaacatacatccaacattcttgaatcggcagaaaacaatacaccatacaacaatatagatcaaatgaatatgcacgcgacatagaattcgcatctacggctacgcgagaaaggaactgagacgactgacgctacggtcgagggatattacgtttacactaagcggatatgaattataatatttaattcggcttaatcatattgatggacattaatcgtatgccaagtaaaattactacttagccccgattagtttgctactcgaataaccgtt

SEQ ID NO: 38338 - DNA, 580 bp, Zea Mays
cttcatcggttatccaacctctcatcaaggttaccgttaggggtgtaatcaagtcaaatacgaatggatatcattgaaaccatatttgtttcatatttttattcggattcgaattcaaatacggatagcttcggatacaaatacaaatacggatgttctcagatgcaaatatgaatagtgtgtcgaatatgaaactagtctgacacagatatcgttggtaacgaatttttgtgtcagataccgtgtaagacaacattccacaaatattacggttgttgtaatcatttagtcactccttgagtccaaaatttttttgaggattatgtgtacatatgtcgcgcctcatttcttaggctacttgtgtattattagtttatttatgcataaaatcatcaaaatgcaattagctcataaaatattctagtgccgaccgaaaattgcaaataagttcccaagactaataaacattctataagaagataacctcaagtttccacatgtaaatgaaaaggtgaagtattgattattttgaaacttggatacttagagtgatttcacgtgtaactcacgcaacaagtgg

SEQ ID NO: 38339 - DNA, 938 bp, Zea Mays
ggggggggaggggattcgcaaagccgaatatgcccctcctccctcccccgctccctgataagcagcctgccgaatcatcgaaagatctccaatccgtcgatgcgctcctgatattgccgaatcgacgcatactacttcatacatacatacaccgaccgactgaagggagatgcgggttattccttggaaaactgaaagcacagcgcgcgaggcccggcgatcgacagccgcaccggtcgacgaccagatgggaaagcgccaccgggtcggccggcactgtgctcgcgaaaaaaagctgtatggggacgtcgacgttctcggcatgggcgcgcgtacggcagcggcgcctgtgcgagagctacgtggacggcaggaccggcaaagcgattccgccggacgagatgccgttgcgacggaagagagagatagagatagagcgggttgcagccttgctagcagagccccagccagtaccttttggcgagccgcgagcccttcaaagtcgtaacggcatctctctccatattgccggcctaacaggagagagactacacaaaacatagtatgttttagctagctagcctagctgggtagcgtctccttatccgtccatcttcactttctatcccagttttcttgtccatgagcacttgtaataatccagcttctccatacaatctggctacacaaaacaatttcagcttgctatcccagttttcttgtacaacggtcacccctgtatcttataccctcacttcttccgtccgtcttcacttcacttataatgacacaacgattagtctcaacactaaaccaaatcttgatcatctcttataatgactcgtcactcatcatacatggcacatatatcaatcacgtgtttacaatatctctcttgacgagtgtattgtcaacaccaacataaagagatgggtcaa

SEQ ID NO: 38340 - DNA, 155 bp, Zea Mays
atttaaaaacacaaggaaggggttgcatgcaccggggcttgcctggaataaacactacgttagtgtttgttagacggcgtccacttgacgaccatcttcaggtttgtccatcagcatcatcctgcggattagcccgcgcttggggtcgacttggc

SEQ ID NO: 38341 - DNA, 1368 bp, Zea Mays
aacacctagaggcgaggcgttgaacaatttcatacggagacactaattatcaacgcacgactaagcgcaataatcacgtttctcgaacctaacgcaacatcacgaaccacaaactatacacatgaaagacaattagcctaatcacaacttatcaattaattaattaagttctaaacttatctcttgctttataaattatactacatctttataagtgattaaaatatttcatcaacacacatgcctactaaaattctactcggtacactaattcaactaattgaccggaatagcgaaataacccgctataactgaacctggctcaataatcgcaagaactgcgaagtcgacgagagtttcgtgacttacgcaatttatcgagcatcttaatgagcctcgcactaacacattaatttatttaacgatcgaactagtctgaataatttatcagcttaccgtttcagcagctgactcgaagccgcaagatcggtagtgattttccgatccagacaatttgtcgagcgcttggggaatatcgcgctgctaacttcgtcttcacccgattcttgggatttcttggggatgcacaaacgacgacgaccttcgattgaagtctggggtaagctagtgaggtggagatcgagccggggatgacgtgtttgacgactcgacggcaaacgacgagatcgacgacgcgattgggaattaaagccgagcgagccgagaggacacgctggcgagcaaaaaaccgcgcgagcaccggataggaaaaacgacgatgttgtcgcacacagtgcgaaggcgaacgacgcaacgacgaggacctaggatgtgcgacacacgacacgcaatcagcctgtcgcgtcgcgacaacagccgagtgcggtaaggggctggaaaacgacgacgggccaaacagaggagctcgcgtaggacaaactcggcacgacggccatggacgaggtgagcgagcttagcacgacagaggactcggcgcgcggcaggaaaagggctcgagcacgaacacggcaggcgagcagaggggctgggcagagggatcttctttgaccagagccgtgcgacgcagtccaagctgaggcaggggcgagctccatggcgagctcgagggagatgaagaaagggggcgattgggcagggagatgcgcacgcggtgatgggagcagggagcgcgctgagccgggtccaagcaccagggagctgctcgcggccggagctgagcagagggacacgcgccggagctaggagctgagcgtcggccacagagaaatatagggggcgcgcgacgaacttgagaaaggctggagaacgagctgggaaggtgggcgcgctggaagagtaggagccagg

SEQ ID NO: 38342 - DNA, 261 bp, Zea Mays
gacggcctcgttggcctccctcctctcctccgccagttggcgccggaggtcaaccttctccctctccaaggcggccaccttgtccgtcaggttacggcacttgctgtcggaggccgatttttcacggacagcgtcagcatgttgcatccgaagtctctcgacttcagcagacacagctgccgtgagggcccccgacgcagtacggctggcgaagtcagccacctgcagagcacacgtaaggccattgccctccaaaaaaaa

SEQ ID NO: 38343 - DNA, 452 bp, Zea Mays
gactaaccaatgttcattttgtgaaaggcagggtttgtagcgcatgtcaagcagggaagcaagttggtgctcatcatccacacaagaacatcatgacgactgataggccgcttgagctactccacatggatctattcggcccgatagcttacataagcatcggcgggagtaagtactgtctagttattgtggatgattattctcgcttcacttgggtgttctttttgtaggataaatctcaaacccaagagaccttaaagggattcttgagacgggctcaaaatgagttcggcttaacgatcaaaaagattagaagcgacaacgggacggagttcaagaactcacaaatagaaggcttccttgaggatgagggcatcaagcatgagttctcttctccctacacaccacaacaaaatggtgtagtggagaggaagaatagaactctacttgac

SEQ ID NO: 38344 - DNA, 1319 bp, Zea Mays
agaaactccaaatttgctcctaaggctgtagaaggctttttacttggttatgattcgaacacaagggcatatagagtctttaacaagtccactggactagttgaagtttcttgtgacattgtgtttgatgagagtaacgactctcaagtagagcaagttgatcttgatgagctagatgatgaagatgctctatgcgtcgtgctaaggaacatgtctattggggatgtatgtcctaaagaatccgaagagcctccacatgcataagatcaaccatcatcttcaaatcaagcatctccaccaactcaagatgaggatcaagctcaagatgatgaaaatgaagatcaagaggagccacctcaagaggaggacaatgatcaagggggagatgccaataatcaagacaaggaagatgacgaggatccaagaccgccacacccaagagtccatcaagtgatacaacgagatcaccccataaactccatcctcggcgatattcataagggggtaaccactcgatctcgtgtctctcatttttgtgaacattactcctttgtgtcttctattgagccatatagggtggaagacgtattaagggattcggattgggtgttggcaatgcaagaggaactcaacaacttcacgaggaatgaggtatggcatcttgttccacgtcctaaccaaaatgttgtagaaaccaaatgggtcttctgcaacaagcaagatgagcatggtgtggtgacaaggaacaaagctcgacttgtagccaagggttattcacaagtcgaaggtttggattttggtgaaacctatgcacccgtagctaggcttgagccaatccgtatattacttgcctatgctacttaccatggctttaagctctatcaaatggacgtgaaaagtgccacaatggaccaatcaaggaggaggtctatgttgagcaacctcccggctttgaagatagtgagtaccctaatcatgtctataaactctctaaggcgctttatgggctcaagaaagccccaagagtatggtatgaatgcctaagagattttcttatcgctaatggcttcaaagtcggaaaagccgatcctactctctttactaaaacaattgcaaacgatcctactatcatatttgggtctactaacaaatctacttgtgaagagtttagtaggataatggttcaaaaattcgagatgcctattatgggggagttaaagtatttcttaggatttcaagtcaagcaactccaagagggcaccttcatcagccaaacgaagtacattcaagacatactcaccaagtttgggatgaaggat

SEQ ID NO: 38345 - DNA, 1116 bp, Zea Mays
ctttactctatttatgtgcattcggccggatattatgctttccgtatgcatgtgtgcaagattccaagccgatcctaaagaagttcaccttagggccgtaaaacaaatcttgagatatttagttcatacacctaagtttggtctttggtaccccaagggatccacttttgatttaataggctattcagatgttgattgggcagggtgtaaaattgatagaaagagcacatcagggacttgtcagttcttgggaagatccctggtgtcttaggcttcaaagaaacaaaactcagtagctctttccaccgccgaagccaagtacattgccacaggccattgttgcgcgcaattgctttggatgaggcaaacccttagggactatggttacaaattaaccaaagtccctctcctatgtgataatgagagtgcaatccgcatggcggataatcccgttgagcacagccgcactaagcacatagtcattcggtatcactttttgagggatcaccaataaaggggggatatcgagatagcctatgtgagcaccaaagaacaattagccgatatcattaccaagccactagatgagaaaacttttaccaaacttaggcatgagctcaacattcttgattctaggaactttgattgattccttgcacacatagctcatttatacctttgatcatatctctttcatttgctatgactaatgtgttttcaagtatatttcatgctaagtcatagattgaaagggaaatggagtcttcagcgaagacaaggcttccactccactccatcgtattatttttccttcgccgtcactccacatcgctcttcactttggtataatccttcactcataaattatttgccaaagggagagaaagtacaaagggcttatatttcactcacaagtatccgttttttgcgattcatgccaaagggggagaaagtattagcccaaagcaaatggaccgcaccaccaccaatttcaaaaatgtagtctttcaatttgtattaaaagaagtttttcaattggtatattatttctgatataatttcaaattggtttgacctctttcaaaattaatatctaaaaccctcttgaacactaag

SEQ ID NO: 38346 - DNA, 394 bp, Zea Mays
gaagttgtgcacttcgcatgggaatccgcaagaagccagaatatgtctggaaggagtatctcgagaatggaatggaaaagtgctctatggcagtctacctgggacaaagccgaaactatctgaaccatccttctttccaagtcactttcaccggataccgcttcccagatacttgccaaaatgttgcccggaaagccctccgacaactatgccagagctacaacaaagtgatctttgaaaccccccttcgctacttcccacccagcaacaaaaatacacccgcctagagaaaaagacttcaggccctgtcaggaggagaccctatcgaggatgaccccaccatcgtctacatggctggatacctccacaccctcgataaccaatatgatgacct

SEQ ID NO: 38347 - DNA, 413 bp, Zea Mays
ctcctcccactcctgcaccgccatagattgcaagagcaagtctagcaaggtgccgcgagctcagcagcgacgttcatggacgcgctctctactgccaccgacggcaacagctcagacccaacgacggcacggcatgccaccgttgcatgaagcctcccttgccttgctgggttcaatttctcttttttgcagctacggtcccagatccaaatcgttgaatgaagcctccccttatcttgttgggttcaatttctcttttttgcagcttggatcagattagccatgaggtcatgggtttctccatgttgatatcgttagtgcacatgaggtgtttgatggaatgtccatcagccatgtcgtgcattgctgctatttttttgttcagtccatgtgagttttcggctcaatctgtt

SEQ ID NO: 38348 - DNA, 902 bp, Zea Mays
aaccttcctatagcgtacagattttctctccctccccacaacaccgccgtcgcaacggccccgcctctacatccttcctcttctcatcacatcctcatcacagcagacgtcatcgcaatccctagtatcccaatctagatcctcggccacaaccagcaacaccactccaagcctagccgagctcgcagcagaagggggaggctcactggtttaccatggcgctggtcgcgcacctcagggcttgctacccctgcgccgaggcccaggggcggatttacgaccggggctgcctgggctgcagccccggtcgcggcccagtaacgggagagcgatttcgtgcccagctctgcctcgtgcccattactcagccccgcacgactgcgcctaacctaaaccagccgccagccgtggaggataggaggagatccagccgcccaccaggccgccagccgtggaggacaggaagagacccaggtacccaccgcggcattgtaccaccatccaggcgcccacggccccacgcccggacggcctgacgtccgcagcacacagcggcgcaggcgcgcagcgctgctcgcctagtcgctggaggccagagccgccgcccgctgagccggaccgccggacgagcggagcccgcaggtcgcagcgacgctcgccccaccggcgcccggatccggagcaccgccgttgtccagccgagcaaccgtgagccgagcagagcaagggtttgtgatttgaagtttgatttgatttgattatttatttgatactaatctcatgtttaattatagaaataagatggacattatgtttaattattgcttgatgttttcaaggtggatggacagtggtggatctatgggtttaatttttttgtttgatttaaatttttttgttat

SEQ ID NO: 38349 - DNA, 1954 bp, Zea Mays
ggtccctcggaccgagtgagcctctcttctcaaatcaaagccgggaacaaaacttccccgcaagggccaccacacaattggtgcctcttgccttgattacaatggagttatgatctcaagaacaagtgagaaagaaaagaagcaatccaagcgcaagagctcaaatgaacacggcaaatcactctcactagtcactagggctttgtgtggaattggagaggatttgatctctttagtgtgtctagaattgaatactagagctcttgtagtagttgagaagtggaaaacttggatgcaatgaatggtggggtggttggggtatttatagccccaaccaccaaacttgaccgttggcggaggcttctgctcgatggcgcaccggacagtccggtgcacaccggacagtccggtgcccctgccacgtcatcactgccgttggattctgaccgttggagcttctgacttgtgggcccccctggatgtccggtgcacaccggacatgtactgtttgatgtccggtgcaccggcatgggcaagtctgacgtctgcgcgtgctgcgcgcgcattaaatgcaccgcagggagccgttggcgccgcagggagccgttgctccgctggtacaccggacagtccggtgtacaccggacagtccggtgaattttagcggagcggctgccgcgcgaacccgaggctggcgagttctggagaccgtgcttccttggagcaccggacatgtccggtgcacaccggacagtccggtgaattatagcgcgccggcttccgagaattcccgagggtgaagagtttgagtctgagtcccctggtgcaccggacaggtactgttcactgtccggtggcacaccggacagtccggtgcgccagaccaggggtgccctcggttgcccctttgctcctttattgaatccaaaacttgatctttttattggctgagtgtgaaccttgtacacctgtataatctatacacttgggcaaactagttagtccaaagatttgtgttgggcaattcaaccaccaaaattatatagtaactaggtgtaagcctaattccctttcaatctccccctttttggtgattgatgccaacacaaaccaaagcaagtatagaagtgcataattgaactagtttgcataatgtaagtgtaaaggttgcttggaattaagccaatataactacttacaagatatgcatggaatgtttctttcttatttagcattttggaccacgtttgcaccacatgttttgtttttgcaaatccttttgtaaatccatttcaaagatcttttgcaaatagtcaaaggtaaatgaataagagtttgcaaagcattttcaagatttgaaattttctccccctgaatcaaatgcttttcttttgacttaacaaaacttcccctaaaagagatccacctcttagtgttcaagagggttttgatataccaatttttgaaaaactactttctccccttttgaacacaataggataccaaatgataaatacttttggaaaacactaagtttttgaatttggtggtggtgcggtccttttgctttgggctcatttctccccctttttggcatgaatcgccaaaaacggaatcattagagccctcgaagtaatttcttcccctttggtcataagtaaatgagttaagattataccaaagacaaaattcggtccttttgcttttgagcttttgctctctctcccccaaggatgaagtccttttctttgatgctcatttctccccaaggaatagagagttgctcggagtgatggcgaagcatgagttacggagtggaagcctttgtcttcgccgaagactccaattccctttcaatatacctatgacttggtttgaaatagacttgaaaacacattagtcatagcatataaaagagatgtgatcaaaggtattcaaatgaactatgtgtgca

SEQ ID NO: 38350 - DNA, 867 bp, Zea Mays
ttcaaagccgggaggttgctcaacatagacctcttccttgatcggtccgttgaggaaggcacttttcacgtccatttgataaagcttaaagccatggtaagtagcataggctaataatatgcgaattgactcaagcctagctacgggtgcataggtttcaccaaaatccaaaccttcgacttgtgaataccccttggccacgagtcgagctttgttccttgtcaccacaccatgctcatcttgcttgttgcggaagacccatttggttcctacaacattttggttaggacgtggaactaaatgccatacctcgttcctcgtgaaattgttgagctcctcttgcatcgccaccacccaatccgaatcttgaagtgcttcctctaccctgtgtggctcaatagaggaaacaaacgagtaatgttcacaaaaatgagcaacacgagatctagtggttacccccttatgaatatcgccgaggatggtgtcgacggggtgatctcgttgtattgcttggtggactcttgggtgtggcggtcttggttcttcctcatcctccttttcttgatcaattgcatctcccccttgatcattgccatcatcttgaggtggctcatcttcttgattttgcccttcatcaacttgagcttcatcctcattttgagttggtggggatgcttgcatggaggaggacggttgatcttgtgcatttggaggctcttcggattccttaggacacacatccccaatggacatgttctttagcgcgatgcatggagcctcttcttcacctatttcatcaagatcaacttgctctacttgagagccgttagtttcatcaaacacaacgtcacatgagacttcaactag

SEQ ID NO: 38351 - DNA, 63 bp, Zea Mays
gtttcaatccctagtaagtcaaaatctctctcaatccgtatcaatcccttccaatctatatgg

SEQ ID NO: 38352 - DNA, 606 bp, Zea Mays
taaaaatgtaccggtacggtcggaccataagatcacgacataacttcaaaatgcaagatggatgatgcgatgatcatgtcatgcctacaacacttcatataacgtgattcaaaaaaatacttcaacttcatccaagataggaatcaaccacatatatcattaccaaattatgatcatccacaatattagacaattgagaattaatacttccaaacaaataaacttcatcatagaattcaatgattaacataattaaaacttatgcatactcaatgtcagggaacaggatgcaacccaaacggtagcaaccaccactgtatttacttgcctttaccagaagttcgggcaaatccctaagtacgatccggaagtccaccaccttgggttcctcctttcctccttcttttcttccttcttcctccctccaaactcccatggaagactcgcacccacacgacggacaccaagcggggaggctccaccttggagaggaagaggggggggctagggttgaggggtggcgctgcaatcacttggggaagaaggagagggattggggcggctgcaagagtggaagagagaggggaggggcggccaaaggggtgg

SEQ ID NO: 38353 - DNA, 904 bp, Zea Mays
cggcaaagaaggcgcttccactcaacttcaattatatttgtgtaacaccccggggtccaccaacaccccggaatgctaataaacaacacttctgacatctatatataaaatttcggcagcatcccccttgcaaaattgcataaatgagggggcaacagtgtataaacatatatcatgacaaaaacatactaagtattattaatcggctaccaaagagaagttaaacatacgacatgaagtgaattaactagtgcgcacgactagttaaaaaaacaaacttcctttgacaataagtttctaattaaatcatggctgcgcctgggcagcgttattgtgagagtgaaagtggacgtgctgctactcccctcattcccaacatgtatcaagtacctgcattgagtaatgcaagagtgagatgacacatctcagcaagtaaaataatatcaaactgtttaaccacataagaacattgttttaccaccacttgattccacaaccttcttattacgaaggtgcagcacgtatacaatgtacaacacacctagtcaccacacctcgcaggtagaaaccacaatagtaacatagtaatgtcacacttcatatatacctcatgagtgcaaatgtctgcaaatgcaaggatgacttctgccttcatacctctaaggatatgaagccgcatcgtacccctcctcgggcaacgtacgatgctaaaaaagtaccggtacggtcggaccataagatcacgacataacttcaaaatgcaagatggatgatgcgatgagcatgtcatgcctacaacacttcatataacgtgattcaaaaaatacttcacttcatccaagatgggaatcaaccacatatatcattaccaaattatgatcatccacaatattagacaattgag

SEQ ID NO: 38354 - DNA, 868 bp, Zea Mays
cccagaaactgctaatactactgctgttcacccacctgaaaatctgtttttttggacagcaacataaccggattcaaacaacgatatctcctaaattataactccaaatcgagcgcataagtactcgttggaaaggtatgacaaagctctacatgattctcccactgatccctactaattgcccacgaaaaattcccagaaatccctagaactactgctgttcgtccacccactaaatttctggacaggacctctaccaaatcgcataggtaaacatgtaaccaattggattgcagcacaaatacaacaaaatgatcatgaaaatcaccttgggttcctcctttcctccttcttttcttccttcttcctccctccaaactcccatggaagactcgcacccacacgacggacaccaagtggggaggctccaccttggagaggaagaggtggggaggggggctagggttgagggatggcgctgcaatcacttggggaagaaggagagggattggggcggctgcaagagtggaagagagaggggagggacggccaaaggggtgggggagtgagagggagggggtggctagggtttaggggggaaactaatgggctccccaccgccggatcaagatccacggcccaaactcgctctcacgtctgctcccgaccccaacgcacaaatccaacaagtattctactgttttattggtgaatgcttcctaaaaaactcaaaccccaactacgcagatcacgaaagaaaaggaaaaaaatacatttaacttcttttcagaaaattgggtatcacactctacccccttaaaaagaattcgacctcgaattccgacgcttctatcggaacgacaaggaa

SEQ ID NO: 38355 - DNA, 331 bp, Zea Mays
ccccggggtccaccaacaccccggaatgctactaaacaacacttctgacatctatatataaaatttcggcagcatcccccttgcaaaattgcataaatgagggggcaacagtgtttaaacatatatcatgacaaaaacatactaagtattattaatcggctagcaaagagaagttaaacatatgacatgaagtgaattaactagtgcgcacgactagttaaaaaaacaaacttcctttgacaataagtttctaattaaatcatggctgcgcctgggcagcgttattgtgagagtgaaattggacgtgctgctactcccctcattcccaaca

SEQ ID NO: 38356 - DNA, 431 bp, Zea Mays
cacaaatacaacaaaatgatcatgaaaatcaccttgggttcctcctttcctccttcttttcttccttcttcctccctccaaactcccatggaagactcgcacccacacgacggacaccaagtggggaggctccaccttggagaggaagaggtggggaggggggctagggttgagggatggcgctgcaatcacttggggaagaagaagagggattggggcggctgcaagagtggaagagagaggggaggggcggccaaaggggtgggggagtgagagggaggggcggctagggtttaggggggaaactaatgggctccccaccgccggatcaagatccacggcccaaactcgctctcacgtctgctcccgaccccaacgcacaaatccaacaagtattctactgttttattggtgaatgcttcctaaaaaac

SEQ ID NO: 38357 - DNA, 1267 bp, Zea Mays
cgatactttattgattacgagaagaacaagcatattggagatgaaacccgcgggtaacccgtgggtacccgctaatccgatgggtacagttttgagcaaatttttaaacccatcatgggtacaggttttttaatgtgtatagatatttttcacgtgtattggtttgggatggcaaaacacagcgggtttatacccgttgtcatctctactgctagctgcaacacgcgaaatagtgaagtggatctagttgtctgaaatcctaaaatccatcggaacaaaaacacaccatatgcaagatggcaaattactgaaacttattcgagagttttatttatactagaacacagatcaacgcttgacttgctcagtcaaattattaacagctaatactacgactatgaatgttttctgccaagcagacctgcagtgaagatatgccatttttaatgattttttagtaaatacattgcgagacactcaatagtatagaaaaggaaaaacaccaaattcctcacagcaacaaaggaaagaagaactactgaatagtcacaatatcccgaaggatcgagcagaccagatttgcctaaatctggagggaagaagcctaaatctggagagcagaagcaataggtccggccagacttagaatttcaaatggtcgtctgcccttcaccgccttgacagtaagggggcatgaatcagtaagccaaaagtggctcaggccatgctccggaccctctggaaaaaaacagaaaaaaggtttgtattgtcatcaggaacaagagtggtatgttattcacatataaaataaattctgaactgaaagatctaaaagaatgcttgaaacaagtgtgcctcctcaacattctttgtgcaaggtaagcatctgatacaatgaggaagtaggaaaaattatattttcaaaagcaaagttaacacgaagtggatggaaccctgctggcgaatcagagacattttggaaacaaataagggctagtttgggaacctatttttccaagggattttcattttcccaagagaaattagttcgttttcctttaaaaataggaatcccttagtaaaatggagttcccagactagccctaaaaggaatattttgtggtgctttttatcaactgtctctagtagtctctacctcatacagtattagactactgaaatttttattctgtctgcttctgcatcctcaaaatgttagggcgaaaggacaatcatgataagggtttagggggcacaaggggagacg

SEQ ID NO: 38358 - DNA, 748 bp, Zea Mays
gagaaggatcggcgatgcttggctcctcctgcatggtggtggctcgacctcgtggttcacccgatccaagattttacgagctcatcgattttttttaccaaaaacttctctgtttaccaaaaaccggtctaccccacctgtttctctttcttttttaccttccctctagcgatcaatacatgcctgcacaaaactgaagctatagctcatttggagttccctaccgcagtctctgctgaactgttcgtggcggaattgtgttgtgctccaggggtggtgatgctgtcgtcgtcgtgcttgtggcaccaggtcgaggcagttccggcggaaggtctgtcctgctcctgccatgattcgttgacacgtttgcctggggaaggtgtctgctgctggcgcccaaggtcgatcagtttgtggtcccgcctgcaccgctagagcgcgatgccctcatctggttctcgccttcttgttcgccaattgacagttgttgcggtctacattcgaccagctacggatttgatctggcttcaacagcggtcggttcgacattgcagcgcctttgaagatcgggaaacaccatgtgtccatgtgagaagtgagtagcggcatccgatcgagtagatgaattgttttgtacacgcagcatgttcatatagaaatagaaaaaagaaaaagaaagggagtaaatctgcgtacagctggaaaccggccggcggatgtgatcggtaccgaaagagagagagagaga

SEQ ID NO: 38359 - DNA, 379 bp, Zea Mays
cttctctcccccgccaattggcgccggaggtcagtcttctccccctccagcgcggccaccttgtccgccagcttgcggcacttactgtcggcggccgatttctcacggacggcgtccgcatgttgcgtccgaagtctctcgacttcggcagacacaactgccgtgagggcccccgacgctgtgcggttggcgaagtcagccacctgcagaacacacgtaagaccacacccaaaaaaaacaaaaaaaaacaaaaaaaaacagagtctagctcaacggacctgacttagtgcctccgtcacctccttcagccggcgggacacagcgcccgcttcatccctgacagccgcgagtgccgacatctcgcctccggcgctaagag

SEQ ID NO: 38360 - DNA, 258 bp, Zea Mays
tggatactgagttaggttttataaaaaaatctaatcgcaaccgtcagatagagatccaacggtccaagtagcccgataccccttcgccctggcctatttgctaaagagaccccgtaatctttacaaattaacccgccgtccgattcggatacaaactgagtcttaagacaattaatgagttagacctcgggttctctgttaatgtttgtgcagtccagaacctaaaagaaattcgagtttaaataaggaaaaatggaa

SEQ ID NO: 38361 - DNA, 305 bp, Zea Mays
taaaggcctcgtagtgttaccctgccttgcctcctcggtagaggtgtacgggaagtcgcgatcccttggcagatgggtaacatggcttgtgggtaaagggtacaacctctgcagagtgtaaaactggtatactagccgagctcacggtcatgagcagctcaggactctctgatgattaatttatggaactaaattcaaattgtcatatgcattgcatcgcaggtgatgttgttacttttgttctactgcttaattgggttggtatttactgatacttagtaattgctaataaaattttgaccaac

SEQ ID NO: 38362 - DNA, 2456 bp, Zea Mays
atgggacattgggcgcgagagtgtccgtcaaggcacaagaaggagcaagcacatgttgtccaagatgaagaggaggctacacttcttgtggcaaagacgttcccggtaaaaatctcaacacttaaaccatgctgcaagatgtctagttctcatctagagatcagggaggagaaggtgtttttacagcatgaagaagaggagaaattagaggagggaacctggatcctagacactggagtcacaaatcatatgtccggatccagggctgttttcaccgatctggataccagagtgctgggtactgtcaggttcggtgacaactcggtggctcagattgagggacgaggaaccatcaagtttatgtgcaagaatggcgagacccggtcgtttgttggggcttattttattcctcgcctgacaacaaatatcatcagtattgggcaacttgatgaagcaaagtacaagattcatgttgatgatggggtgatgcatattagggaacctgatggaagattactggcaagaatagtgtgggctgaaaacaggttgtacctccttcatttgaagatacaacagtctgtgtgcctagcagtgcgtgggcgcgaagatgaagtagcctggcggtggcatgagaggtttggtcatgttaatatggctgcactgcggaaactggagaaggaagaactagtccgaggcttgcccaagctcggacaggttgaaagggtgtgtgaggcatgccaggcaggcaaacagaaacacacctcttttccagcgcaggcagaataccgggcaaaacagcgcttggagttggtacatggtgatctgtgtggtcctattgccccaatgacaccaagaggtaacaaatatttcttgctgttggtggatgatttgagtagatatatgtggatggctgcaatctcgtcgaaagaccaggctattgatgcagtgaaaagaattcagatgcaagctgaaagggaatctggactcaagttgaagacacttcgaactgatcgaggtggggagttcacctcgggtgaatttgcggagtattgtatggccagtggtattcaccgacaacacactgcgccgtacagtcctcaacaaaacggcgtagtggaacgccggaatgggactgttgtggccacagcaaggagtatgttgaaggcaaaaaaactctctggctggttttggggagaggcagtaaaaactgctgtttatgttttgaacaggtgcccaaccaagagtgtagatgggatgactccatttgaggcatggcatggcaagaaaccagcagttcaccacctcaagacgttcggctgcattgtctatgtccgaaacattgttcctcatctgaagaagttggaggatcgaggaaggaaaatgatcttcattggctatgaagaaggcacgaaggcataccgagcttacgaccccatcaccaagcgtgttcatatttcaagggatgtcatcttcgacgaacaggctcagtgggattgggaaacccaggaggacatcagttcagaaaatgaagatcaagatgtgttcacaatggaatatgccatcagaaagcagacacatcctgaaggagatgagaaaactgctggggaatctgaagatgagcattcagctggaggtctgtcccctcggacccctcatgttgatacagggcatgtttcggaagaggaggatgaaatgcaggaagtggagtttgcttcaccaccggagggaaatattgatgagtatctagatgcctatagagcagaagatgatccacttagattccgcaaggtagatggactactggaatccaaaactccacctggttatgcaacaaggaggctgctagatgaggagttacatgcagtaagcgccgatgaaccggtctcttttggtgaagcagaaaggagtccgagctagagaaaagcaatgatggaggagatgaaatcaattgaagataaccagacctggactcttgtggatcttcctccagggcgcaaggcaatcggtcttaaatgggtatacaaggtgaaaagggatgaacaaggtgcagtatccaaacacaaggcacgactggtagtgaagggatatgcacaacaacatggtatgatgaagtatttgctccagtagccaggcttgattctgtgaggttgcttattgcacttgcagcacatgagagttgggaagtacatcatatggatgtgaaatcagcattcttaaatggtgaattgggtgaagaggtatatgtgcagcagccagcaggttttgtggtcactagaaaagaacacaaggtgctcaagctgaggaaggcactatatgggctacaccaagcacctcgagcctggaatgagaaactggacaggacaatgaaatctcttggtttcagaaagagcatttcagaacctgctatttatctcagaagaaacatcaagtcacagttggtggttggcgtgtatgtg

SEQ ID NO: 38363 - DNA, 204 bp, Zea Mays
acccccccacaggagaagaacaggtggttcaagaggagccgcatatcgaggagttcgattcgatctaggtggcgtctcccagttgactttctggcgcctaggatagattttagatcatgttatatttatcttttatttttgtaagtcttccgctatgtattaagtactctgattattgtgacatttatctctatacactctgtg

SEQ ID NO: 38364 - DNA, 89 bp, Zea Mays
gacgcccttggctgattaactagaaaagctagtggaggtattccttacccgaaaggggcaagggcagtaggggagtggtcagtgtaggg

SEQ ID NO: 38365 - DNA, 442 bp, Zea Mays
cacagagtgtatagagataaatgtcacaataatcagagtacttaatacatagcggaagacttacaaaaataaaagataaatataacaggatctaaaatctatcctaggcgccagaaagtcaactgggagacgccacctagatcgaatcgaactcctcgatatgcggctcctcttgaaccacctgttcttctcctgtgggggggtgtgacacagcaagagtgagctcacatacgttcatcgctcaacaagttgtggggaataatgtgacatgaactcacaaaaggtgggagttcatgtgaagtgtaaggcttatcaaagagaatggttaaagctgagcattgcttttaatgttggtcaaaattttattagcaattactaggtgtaagtaaataccaaaccataataaataatggaacaaaattaataacaaatcccatgcaaa

SEQ ID NO: 38366 - DNA, 447 bp, Zea Mays
atatagtagagtttctatacaaaatggctaaataaatacatcatacgaagacaacaatccttaacaaccatagttaactgggagatgacagcctagacctctcacaaactcattgtgacatccttcatgctcctcatcttgcggtacctattcttgacctaggggtgtgagtacaacaagggtgatctcacatgcgttcatcgctcaacaagttgtggggaataatgttcatgagctcacttacagtggggctcatgtgaagtgtaaggcttgccaaagaaaatggttaaggctgagcattacttttaacaagttggtcaaaattttattagcagttactaagtataagtgtataccatcctaataatgtaaaagatcacaattgataattattcccacaatgcaatgcaaatgacaaattaattttaattccataagttactcatg

SEQ ID NO: 38367 - DNA, 1462 bp, Zea Mays
aagatcctatcatcgaccgatataccttttgatctacggatttacctcccgtgtcgaggtcaagatacccattggttcccatgggtgtcttgatgggcttggcatccttcattccaaacttggtgagtatatcttgaatgtacttcgtttggctgatgaaggtgccctcttggagttgcttgacttggaatcctagaaaatacttcaactcccccatcatagacatctcgaatttttgaatcatgatcctactaaactcttcacaaatatatttgttagtagacccaaatatgatatcatcaacataaatttggcatacaaacaaataattttcaattgttttagtaaagagagtaggatcggctttgccgactttgaagccattagtgataagaaaatctcttaggcattcataccatgctcttggggcttgcttgagcccataaagcgccttagagagtttgtaaacatgattaggatactcactatcttcaaagccaggaggttgctcaacatagacctcttccttgattggtccattcaggaaggcactcttcacgtccatttgatagagcttaaagccatggtaagtagcataggcaagtaatatacgaattgactcaagcctagctacgggtgcataggtttcaccaaaatccaaaccttcgacttgtgatactctttggccacaagtcgtgccttgttccttgtcaccacaccatgctcatcttgtttgttgcggaagacccacttggttcctacaacattttggttaggacgtggaaccaaatgccatacctcattcattgtgaagttgttgagctcctcttgcatcgccagcacccaatccaaatcttgaagtgcttcctctaccctatgtggctcaatagaggaaacaaaagagtaatgttcacaaaaatgagcaacacgagatcgagtggttacccccttatgaatatcgccgaggatggtgttcacggggtgatctcgttggattgcttggtggactcttgggtgtggcggccttggatcttcatcatcttctttgtcttgatcattagcatctcccccttgattattgtcctcctcttgaggtggctcatcttcttgatcttctccttcatcatcttgagcctcatcctcatcttgggttggtggggatgcttgcatggaggaagatggttgatcttgttcttgtggaggctcttcgggttccttaggacacacatcccccaatggacatgttccttagcgcgatgcacggagcctcttcatcatcaaattcatcaagatcaacttgctttacttgagagccgttagtctcatcaaacacaatgtcacaagagacttcaactagtccagtggacttgttaaagactctatatgcccttgtgtttgagtcataaccaagtaaaaagccttctacagccttaggagcaaatttggattttctacctctttt

SEQ ID NO: 38368 - DNA, 2131 bp, Zea Mays
ctttgctcctttgttttgaaccctttcttttatctttgtattggtttgttgtgaacctttggcacctgtagaacatttattctagagcaagtcagtccaataatttgtgttgagcaattctgaaagttccctttgcctaggaacaggatctggatgtcgcctatagggggggtgaataggtgaataaaaattatcactttaaaactgtctcaaaatgccctgcacttcaaatataacttgtaccatagataagtgttggagtgcagatataaaaagtgagtaagacagagagtcagcacacaatacagagcgaagcacatagacgtaagaatttatcccgaggttcggccaagcctgaaatgcttgcctagtcctcgttggagttagccacacttgggcttggagtctatttcaactccttccttcgtttgctcagatctgtcagtatgacagatagagacttccactatgttgagttgggttacaacaaaaccgcggctgcttacaatcttcttgacagcactccggcagagtaacaatgcgatcaagactttgctctagctctttgcagcacctctccactctctaaaggcttataactttgccttcacacaaactagagatatatacacgagagtgagagagagaatcgatccgagtgatgtatacaattgttggctgcacttgtgtgtttgttgaagtcgcctaggggtcccttttatagacccaaggggcctaggagccgttggaatccattttataaggcaatacttgctttctgtcgggtggcgcaccgggcagtccggtgcaccaccgaacaggtcctgtagcttgtccggtgcgcgatccccttccaaatcgggctcacttgaccgttggagcaacggtcgccttggctcaccggacactgtccggtgcacaccggacagtccggtgcacaccggacagtcgggtgcaccaactatccgttggcccaggccacgcgtcgcccgctgatcgcgctgccaaccgttggagcagtcgaccgtaggctcaccgggtagtcccggtgcaccaccggacagtccggtgaattatagtagtacgccgccaaaacttctcctgagagcggcctgttcaccggagttcagtctagtgcaccgggcactgtccggtgcaccaccggacagtccggtgtgccagaatgagctgagtcttggctgtacacagccaagccttttgtatctcttttcttcttttctctgtttctaatacttagacaaatatattagtacacaaaaaccaatgtactaagtctcgaaacataccttctctttgattttcacttctttagtatttggcatgattgagatttatgttggactcataaaccatcaagtcagcttgacttgatctagattgacatttctgagctccaacatcctgcaaaggtcacatagaatatctccaatcataggaacaacccaaactaaaggtcaaggtgcacttagctcttttgggctgctttcagttctgattttgacattggttctccttccagtgtccttgttcactttttgagcttggtcttgagccttatgacttacaccacataattgtagacattacctcattggttgtaagtcatgtccttatgtagtgttccttgatgcaccataactcttcttaactcgatcaacctcgattccacaagtctccttcttcacccctcgctttgggttcctggtctccttgactttctcccgtgcactcggtacctcgaagctcttcttgctttcatccttggtttgatcggttgtctccaagttatgcatatcaagtctcacttaagcaatgtccatctttcttgtgatgtccattatctatagataattccgtctttggaccatcacacctgtttacttgtgttgaaccctgttagctttgcattcagcacctgttcaacacttaacacacttgttagtcctttaattgggttgtcatccaaacaccaaaacccacaagagagatttcaatctccccctttttggtgattgacagcaacacaatttaagcttacataagaataagatttaaagcacaatttttgaattctaagtttatagaatgctccccctaaatatgtgtatac

SEQ ID NO: 38369 - DNA, 2251 bp, Zea Mays
ccgtctttggaccatcacacctgtttacttgtgttgaaccctgttagctttgcattcagcacctgttcaacacttaacacacttgttagtcctttaattgggttgtcatccaaacaccaaaacccacaagagagatttcaatctccccctttttggtgattgacagcaacacaatttaagcttacataagaataagatttaaagcacaatttttgaattctaagtttatagaatgctccccctaaatatgtgtatacatcaaatcttaaatttggccttatatgccaaattgcacatacttaggctaattcgaagcactactataccttagcacctgtgggatgcattttgtcactaattaaactgtgatgcgtatgacacataaatgcacagaatcagagttaaacaccaattgaatagatataccacagaaatatcagcctaccactattcaccattaatataccaaattaaaactattttaaagcaccagaaccacatgaatatctattacaggataaacacagtagatactaaatgattcatatcaacggaagcactgattttgcattatcgccatataatacaataagaagcataagaagtatcaactaacacatttttccttaagactcaaggaaacccctttaggataagctttcctctcaggttgagataagctttaatgcacaatttctccccctttgacatcaaacaccaaaaccatattcaagcaagaacatagaacgatgtcaagggacagcagggtattgagcaggtaaattttaacacactaacattactcccccttacacattgaacatatgcaacacacgcatttggaggagagttaagatacatatacacaaaagatcaatacttccttttgtaactttaccatgttgtggtgtactttccatcttgaaagtttaatctctagggagcttctccacacttgtgtctgatcctttatcctaaccttctcggaggtacccaagtcctgattgctctatttcttgctcatcttcccctttccaccttgagactatacaagatcactcaagaagcaatttagtctcaaaagacacaagttatgtgtgctccccctaaagttgtgcaacaagtatttgaatgacttgcactttgcacattctagcatcctcagaacaagaggggatcacaacatatcttggtctagacataatctatcaatttcatcacaaggagataccaactggatatatgacataatacaacttgtgactagtggaaacgatgcatgcctcaagatatataacattttacaagcaacctaggcacgcttcacacgtgatgatcattgcaacacatacaccaattgaaagatgataagatcatgcatataaagtacaatgtctaaccataccaagattaagaattacttcattttaagtgcaccaaaggaaacaacattttagggcataaggcacctaagccaagatactatcaattgaaaggcaagaacatagctatgatcacaatcaacgaaacttcaagatttttaatgaaattgcatagttctattctccatacctttgcctttacctgaatcgccatgagagcacttgttgtcaccaacttagggctccttttgctcatgcacctcatagctcaagaaggtgcattaggcacaacatggatttggtatacacatagtaccaacatagggtaattatgtgaacatggactaaacaagatgtcatgcttgcacataggttaatcattaaaaaaccatataacatgattcacaaaaagatataggtttatccatgaacacaaaaagagttaatcatggtaattatatcaaatgaaaagctacccattgaataattcaaaagatataacatctagaacgcacaatcatgattaagcaagcattattatgaatttgaagatcatgaaccattgataacacaggcaatctcaaaagcataactactccaaggataggtagcacaacaatccaacttaagagcaatactgattatcaataatgtacttaatgtacttaagatacacgggtaccatcctttggagagcaagttgcagattctcatcaaggtcctttgcttgattcaccaataatgattacggacctctacaacttatttcacttgagatgaacatgggattagtattgcacaataattcaaccttaggtcaatgaatagacaataaaaattaacagcttaagcatagagtttgaattaac

SEQ ID NO: 38370 - DNA, 569 bp, Zea Mays
caaaaactataaacaaactgggtaaaattggttcaaccggtttgcacgagctcaactaaagaatgagatataaaactaaattgatctcgaaattcacccagttaactttgcaagtggtatgtcctagatgatacacagggtttaaattagtagatctgggaggcacttctcaagatccacacacaccaaaaagatatgaacaattcttccacagaatggtgagagaacgaagaacacgaacaaacaccatgagcaagaacacaagagacacaagatttatcccaaggttcggtcacaccacaaaggtgtcctacttcctcgttgaggcgcccacaaagagccgagcctctttcaaccctaatcctcccttctccgaccacaaaggtcaagcccacacactaatctttgctcacacaagcgggtaatacaaacgttcttgtggtcttccacaagatttggagactcacaaatgacacctagtcatctaggagccaaaagctccaagcataatgaatccacaaagaactcgatgtagtaccaaagctcgaatcaagaagaataagaaggat

SEQ ID NO: 38371 - DNA, 199 bp, Zea Mays
taccaaggtgatctgaccacggaacgcggagttttgtgcttgccggagccagaaaagggggaaactggggtcgcggcggctcggggcgaaattgggagatgggatcggggctataggaccgtaagagactgtgctttcaccgtgcgcaatcaatttgggcgaaggtggaaagggcagtgcgaatttgacttcgatttgg

SEQ ID NO: 38372 - DNA, 684 bp, Zea Mays
cacccctggcactggcagcggtgccaaatgggccattgggccggtggttctaactttcttcactgctccaggtttttcttggtcttgatcttccaaaaaaacaaaaaaaaattgcattttcgtagcgacatgtcggcaagttgctggccgacagtcagatgtccatttctaggccggtgagaaaaaaagatagaagaaaacggctggaatcttttgcatgctcattggcgcgtctcccctcgctgcacagtacagtacacctgtgagatgtggaaacacgaaaaccttcttacctgatgccctgacaggaagacggacaacacagccgcaaatctcccccgctttgaaatggcgagccaaacagccaatatgcatggtcccggagacgttgaccgttccgtgaggcagcagccttgaagaaggcaaaaaaaaaaaaaaaaaacggaatcctagtcacgttagacagtggaacataccatacagctgaagcttggaaggggagtagatagcgcgtgagaatatttctacgtacctggcttcggaagctggggctacatatgtagatctgacatgcaaacgacatttttatttttagtgtaattaatcttaccgacgggccggtctccgcgtactgtaccacgtacgtttagtttaacgcaaattaaaggaaaaaaggagcgtttg

SEQ ID NO: 38373 - DNA, 1030 bp, Zea Mays
agatcatccaacgatggtttagaaattttgtgatcagaaattttcatagatatggcatgattattatttgaccaacgttgaatatttaattcatgcatgttctatgattcagtattcagtatttatttcagatgtcctaaatattttctattttaattttgcaaaggtgctcataccgccatgctcattagccagattgctcagatgaaaccgctagatggtagtaattaccattcttggcgggaggatatagacatgataaccacagtgggtgagatagattacgcactgaggtttgataaaccagttgagcccacagtgggcactcccaactatgaccacaggtggatgcaatacagcatcgacaaggtcaagtgggagagatcaaatgacaaatgtatgattattcttaagaggagcatcaaggagcctcttaagagttccataccagagtgcgagactgccaaagaataccttgagagggtagcctctcatcaccaagggtcttctaaggcttatgcttgctctctaatgacagaatttgtcaatgcaaaatacgatggaaatggtgtcagaccattcattcagaaaatgatatccatcgtagctaagataaacaagtacctcgggtctcctttacacgaggaatttgtagtatttatgataatgaagtctctgcccaaggagtttgagacttttcacatacaatacaacactagtgtcactgataagtggaatatagaccaactcttggcacagtgtgtccaggaggaagagaggttaaagcagactggagactctgtcaacctcatcaaaggcaatatccccagatagaacaagaactcaaagaaaaagttcaagaagcaaggtaaacagaataaccaggcttcgtcgagcaataataatcagccaagacaaggaggcagtttctcagttccccctgatacctgcctctattgcaagaagacaggtcattacaagagaaagtgccctgaattcctgcagtatctactagagagtggtaaggacc

SEQ ID NO: 38374 - DNA, 352 bp, Zea Mays
cagacgcaggaacggagacgtgtgcaatttctgcagcgcgggcagttgccgacggcacagccaggcgctcccacgaacgcggcgctaggaacgcgcgtgatggggctggggtgggcagcgcgctgctgggtgagcacgtggccagcaagccaggacatggaccacggggaggattggggaagggccggtttgtttttattttctctttctctttttgttttttttgtttttttttttattttctgctatcaaatttatttacaatattgagccacatattaaatagatacacaccaaagtaagacatcagacaaaaaagacaaatatatttcagcatgatgcatcaatcatt

SEQ ID NO: 38375 - DNA, 300 bp, Zea Mays
caattgataagcaataggatttccgccgtgcgtgccttcctgtccggcaatattgcgtcctccatccaacatcagggctacgaataccacgcacgcacatatatgattcgattcccctgtggcatcgcgtgggaaccaaacagataccgtacagtatgcggtgacagtcacttgtacgaatcatttttcatagtttggctggtttagggcatctctcgaggccagggtcgtcgtttcttgcctgagggagagggactgaggtgagggcacagtcgttgatctgacaccgtcgtcttatct

SEQ ID NO: 38376 - DNA, 871 bp, Zea Mays
aaaaaactttgttttaaattcatttgctaaaaagtctaattataagttaattatgtttaataaatccatctctccgtacagtcttcatttgtactattaattttgtaactatcataattgatattcaaacatcactagaatttagttatgggaaccaaacaccccaaagtagtaaagcagagggttttccagtttttgttgaaaaaaaatgtatggttatacaattcaaattcaatacggtccatactagaaccaattcaaatccaagaccacacatcctttctcattgaaataaatgccaaaccttaatggtgagagggcggtcgaaactggaaaaggccgaggcctggccatggaaatgacaattctttaagtactagtaaacagacaaaaaaattattggaaatttgtaaacctctcgagtttgcaccttccagggtttgccaatctttgaggtctctgtctgaactagggagaagacctctagctatgcaagtcgcttaaaagccattgccaacatactctctggatcaggtccgtttccactttccagaggaaaaacaagggtcctccaagattgggaacctgaatccttgcttggcctagttgttgattgggtagcagcaggccagcagctcgctggtgcgtactagaccgacttggagtgggagcccagaactacttggatgaggtgggccgtgggcggacacgtgaggcggcccagggcccgaggtgcgcacgcccgggtacgctcacaagacccgttattaaacagaactagtgtataacgcgcgccctgcgcacgattttttatggtcttattagaatgtacatataaagaaggaataatatatatgaagatttggtgtaa

SEQ ID NO: 38377 - DNA, 322 bp, Zea Mays
acagaaagttaatcatttggaagttcacctttttggaggagactgaagaggaggcacaacctttttttactttacaatgtgcttaaccagtgggtctgctacgacgacggtcataaccaacaatgtgcaatttggacgtagtagtttatatgcatcaaccatttttaggtttttcggccactattctagttgaccatcagctaagcctaaagtgcatctatactcccttcactggcagttagggcctgtatgctttatcgccaggcaagatggttttactttaatatgtaggtctaatatatagctagattttcttgacagt

SEQ ID NO: 38378 - DNA, 528 bp, Zea Mays
aaattgtccaaggttaaagaaaacattttcttctctataaaccatttcaataggcatgaactgaggataagagacatattctcaccactatgtcgacccgaaacatggaggaaattgataattctcttctgtatttcccaatcatcatcttcccaatgtactgtgacacacatgtagcctttattctgatttgatgtccacatgtccatagtagcactcatgcgacaattgagggttttgaaatacttatacaacacatccttttcatgcaagtagagttccagaatttctttcctaatagtgacacgtgacttcataggaaaggtaggcttcaatgatttaatgaattccacaaagtattcatgctcagcaatgttaaatggatactcatgcatgaataatagttgtataaaactttctcaaaactggtttcttcatcatatttatatggctggacaatgcatatacttgtgccatgatccttttctgccttgagctcctgttgccccttcacaatcttatgataat

SEQ ID NO: 38379 - DNA, 238 bp, Zea Mays
gtgaaggggctcgcttgtgttagcccacgagcgtcgggaaacgcccaaaggtgtagcgttgagtgggctaggccgggaaggtcgctgacagtaggttatagatctactacctgtataagtacacttgattgtagcattattggcatccagtcgcgggacctattattcttcctttgaatagttatattaaaagatactggggaaggtcttggggatacatatcttgaaaaaatccagc

SEQ ID NO: 38380 - DNA, 2076 bp, Zea Mays
ctactcacccagccgaaacctctggtcggcggctttcttctctttcagccgcctgggagctgtggctctgccgaccgcacctcccacttccttttcttctttgttccggcctctcactttcattcggccgccaggaagcaccagcggctggcctctggccgactgcgccctgcacattgcagcacagccgccccatgcactctctgttttctttcctttttttatttctattacgtgctcttttgtaattctattttttttcttgccgcactagtacttggccgccagggagaactggacattggcactgtgcatttgaactcgaccggcactgtcttctctccttttttttttactgttgccaatagccaaaaccggctgcctcaggaagcaccggcggctggccattgttattttttttcttcctacaatcggtagaatcagacctctgttcggtcggcggctctactctggttcttgtttgtgacactctatcgctcggatctaactccattaactcgaaccccttttctgtgatgaatgcatatatgaaatggatgagatgtaatatcgggtcgagttttggagtctgtcatgcgtggatgtgggtccattttttgtgttttctggcgaatattactggtcctgagacccaactggtgcgaacaacttgctgacgcttcgagcagtgcctctgtgcacttaccgaccaatttgggtaaaatctgtttgggtcagtaaccctaatctatttattttcgatttgtggaaactgggtcacgaaccctaatgcgttatattcgatctctatttcttcttgatcttgtttcttggtcatggattcaaaatcccgaaccctttgaggtctctgttgtctcgatctgttaactagggttagagaggaaaaccctaaccctagaccgttgatgaactattactctggcatgggtatggccgagaccctgtgtctatttatagtggcctaacactcaagaactcgggttaggttaaatcctaacccgagagtaacgaactttgagtgatctcataaaaccgaatgcagatttggagatttagggttcttaggacggctttgataccattgttagattctattctgtctaaaatcgattcctaagtccctagaatactaatccgtaactgaaattaaaaccttgatgatgtgtagatctgatctactgatctactaagaggaacgaggaacacaccttattgttgctgttgctatctttatatcgtcgccctgcagagaagcagcagcatcgggatccgagccgctgtaggttgtcgcgtttccatgcacttcgacgcctaggcgatgggggcctctgcggactagggttttggggtgaggtactagcgttagtctttcctgcgacctcttagtcctatatatagcgtcgtgtgtctgggggctccaaccgaggttagcgtgggccctcccaatcaagggcccatttaaagagatagatagttgggtttagcctaatccggtcactgatgaccagctgtagaggacacacccaacagtactttcgctcatactttatctttttgtcttctttaagggctgatttagtgatctgtgatcacgtgagtattggagtggattgaagggaaattagtttatttctcactcaatctcctcgaattctctcgtgattctcttgtcaccaaatcaaccctaatatatttgacgggcatatgtcctgctaacagcattaaatagtagctatgtagcaggggcatgtgctgcatgaaacgaagttgctttttttttagaaaagaaaggcagaaagccatgttgctggctttagaaggttcgagacagattagtgctgtctgacgtgtcctcaatgattccttgattcgttcgttcaatggccagctgtccactttgcttgcttgcttgtctatttccctcttacctaatccgtcagatacgattagtataatttttgattggctgtttatctgactagttctggtccgtgtcatgtaattatccaccgccggactggctctaagaaacgagaatgaaatctggttcctgac

SEQ ID NO: 38381 - DNA, 708 bp, Zea Mays
aaaaccacttcactcttattttgttagaaaataaacatccaaaaagttaaaatagagccactctattctctctccttcttcaaccaacacacctaaggacacgacggatccatcacagggacatacctcgtcgacggtctcctcctgcctccacgcgctccatcaccgaccaccatcagcgatagctcctccgcgcgctacgacgtgagggtgaggccgtgcacagcatccgcccacaccaacaaccgccgtctccgcgcagggggacgccgatgccgtgcaccaaccccagccttgacgcgcacgtccgccggcctccgcgccaccaaatccggtgtcggcagcgctgattgaattgcaaggggcggcaagcgcctcagcagctgcacctccggaacgccgtcttcgcgcgtgggaactgggagcgctgcctgactagcctccgatccggccccgttttaattacacggcaccgggagcattctccacaaatggtcgaggatgttgatgtaataagaaatctacttgaggagatttgatcacctaggtgtagtgcagtggggagctgtgtcatggcaaagcgagttgcagaaatgtgtttcattgtccacgagagtgaagctaaattcattgcagcgatagaggcaaacaaagaactgaaaaggtttgttagtgaactttggtaacaggagctttcttgggtttgat

SEQ ID NO: 38382 - DNA, 676 bp, Zea Mays
gtcaccctccccccacttccctcttctctcttccccaagtgctgcagccgccccctctccattctcaagttttttgcagcagccatctcctcaaccatagccgccaccccccatctcctcttctccaagtgtcgttcttcctcgtcggatcttcttcgtgtgggtgcaagtttcaattggagaattggtgggaggaaggaaggaggaaaaaggtggaactcaaggtgatcttgaagttatctatgtttttgcgctaaaattcaattgattatatgtttatctatgcgaatcggtagaggtgctgtccagaatttttgtgggagggcgaacagcagtagttctagggatttctgggaatttttcgtgggcaattagtggggatcagtgggagaatcatgtatagctttgtcatacctttccaacgagtacttatgcgctcgattcggagttataatttaggagatatcgttgtttaaatccggttatgttgctgtccaaaaaaacagatttttcaggtgggtgaacagcagtagtattagcagtttctgggaaattttcgtgggtaattagtgttaaccagtattataatcatgtagggctttgtcttatctttccaatgagtacttatgcgcttgatttggaattatattttaaaagatatcgctgtttgaatccg

SEQ ID NO: 38383 - DNA, 936 bp, Zea Mays
taaaggcaagtaaatatagtggtggttgctaccgttttggtttgcatcctattccctgtcattgagtatgcataagttttaattatgttaatcattggattctatgatgaagtttatttgtttggaagtattaattctcaattgtctaatatggtggatgatcataatttggttatgatatatgtggttgattcccatcttggatgaagttgaagtattttttgaatcacgttatatgaagtgttgtaggcatgacatgcacatcgcatcatccatcttgcattttgaagttatgtcgtgatcttatggtccgaccgtaccggtacatttttagcatcgtacgttgcccgaggaggggtacgatgcggcttcatatccttagaggtatgaaggcagaagtcatccttgcatttgcagacatttgcactcatgaggtatatatgaagtgtgacattactatgttactattgtggtttctacctgcgaggtgtggtgactacgtgtgttgtacgttgtatacgtgttgcaccgtcgtaataagaaaattgtggaatcaagtggtggtaaaacaatgttcttatgtggttaaacagtttgatattattttacttgctgagatgtgtcatctcactcttgcattactcaatgcatacatgttgggaatgaggggagtagcagcacgtccactttcactctcacaataacgttgcccaggcatagccatgatttaattagaaacttattgtcaaaggaagtttgtttcttttaactagtcgtgcgcactagttaattcagttcatgtcgtatgtttaacttctctttgctagccgattaataatacttagtatgtttttgtcatgatatgtgtttatacactgttgcccccctcatttatgcaattttgcaaagggggtgctgccgaaattttatatatag

SEQ ID NO: 38384 - DNA, 1483 bp, Zea Mays
atccaactcttgttgggtcctacaaggttagttacaacatcctttgggacccaaatgcaagtcttgtctcccttgtatttggcccccaatttcctagcaaccactttcttatttttacatgaaagtacaaaagcagtattgcaggcatggaaaacagtaacagattcattatgcattttcctaggcacatgatgaataacatttcccttcctaggcctacttctaccatgcacaaaagtagaacttgaagcaaccatagcatgtgaatcataagaattataactcctattataatgagcatttctagaaaattttctatcataaatgaacgcatgattcttttgactactactagccataggggccttccctttctccttgttgggaatgggagccctttgacttgtttagttcttagcttcctttcgaaagccaagtccatccttaattgagggatgtctaccaacggtgtaggcatccctagcaaattttaacttatcaaagtcatttttgcaagtcttaagttgggcattaagacttgccacttcaccatttaattttgtaatagaagtaagatgctcaacacatgcatcaacatcaaaatccttacacctattacaaatgacaacatgctctacacaagaactagatttattaactacttctagcttagcgtttaaatcatcattaatactctttaagctagacatagtttcatgacaagcagacaattccgaagaaagcatttcattccttttaacctctaaagcaagagacttttgcacatttacaaacttatcatgctcttcatatagaatatcctcttgcttttctaaaagtctattcttctcatttaaagcatcaatcaattcattgattttatctactttagttctatctaaacctttgaatagacttgtgtaatctacttcatcatcactagagtcatcatcacttgaagtagtatacttaggggtagctcgagcgcttacctttttctcctttgccatgaggcaagtatggcactcgttggggaagagagatgacttgttgaaggccgaggcggcgagtccttcgtcgtcggagtcggaggaagagcagtccgaatcccattctttgccaagatgcgcctcgcatttcgccttcttgtaggccttcttcttcttcctcttcccgggtctttcatctccctggtcattttcattatcgggacattggacaataaagtgaccagtcttaccgcacttaaagcaggaacgctttccctttgctttgttcttgttagggtactccttgcgtcctttcaatgcggtcttgaagcgctttatgattagggccatctcatcctcatttagcccggccgcctcaacttgtgccaccatgctaggtagcgcctttctgctgcttgttgctttgagagcaacgggttgaggctcgtagacgggtagagggctattgagagcatcatcaacgtatcgcgctt

SEQ ID NO: 38385 - DNA, 92 bp, Zea Mays
agttgagcttctatgatagttccatcttgctgctccatggtcctaccttgcagtctttcagataagtactttttatctaacccacccgtacg

SEQ ID NO: 38386 - DNA, 827 bp, Zea Mays
ctctccccaggcccacgaaagaatgaccttacgatttattgggcctttgggcctttcgtgaggtcttttactcctttagtggacccgggggatatctatcccccacagtggttgcctccttttctttcattgccttgaatgcaacgagttgcagctcgagtgtaggggtggcgccatggtccatgtttctgatgtgtttggagtctttgaccattagttcaaagctcacaaacttagctattacctcattgggagacatatctttgtacctatcattttcacgaattaattgaacttgtgtagtgaaagtcgcctagaggggggtgaataggcgaaacctgaaatttataactttaaacacaccctacaagctagggttagcgttagaattaaattcaagtccgaagagagggaaaacaaatcaaacaagaatcaagatgagtgaacacgatgatttgttttaccgaggttcggttccaaagaacctagtccccgttaaggaggtcacaaagaccaggtctattttaaccctttctctctctcaaacggtcacttagatcgagtgagccttcttccttaatctcacgggtcactaagaccccgcaggaccaccacacacttggtgtctcttgcttcgcttacaaagcacttgagaataagaatgggaaaagaaaaatgccaatccaagcgacaagagcaacaaaagaacacaaaacaccctctctcaagtccctaatggaaatgagttgatttggaggcttggagaggatttgatctattgaatgtgtataggagagaagtctttttgctcttgcaatgaaagggat

SEQ ID NO: 38387 - DNA, 329 bp, Zea Mays
agtaattcttcgaggtctaatttgccttttcatttttaagtcggttccccttctctgctgtcatgccgaagcttttctgcgcacaacttcgtgatcaccttatccttcgtcataatcacctttcatctcgctcaggcttcgtcctgaccatgctcttgtatactcatgacccgattctgaagatagctgttcacatatttcatttggaaaacattgtcaaatcatgtttttgaggaccttcggaagccgaaggcccccaacactgtgattgcgcgaagggaggatgacaaaacggtgcatctgtggacgcttacaataaggccttatag

SEQ ID NO: 38388 - DNA, 329 bp, Zea Mays
attcgttattactgtatcgaacctacttggtaataaagtatacatacagcgcagtacgcagttcgctcttaactttgactctgatgagcatcattttttaatcgtgtctgataaaaaaatgctggtttacgcaaatggtagggtaaccgatttcacacagacaacaaattaaaccaccgtactggtctggtagacaattattctttctttcctgcctgtggtttggtcctctagctttcacaaacgcacaaacggtcccatcagttcacatcatctaaaaccaaagtggaactgtatacaggacaggaatacagtgtccacatctggac

SEQ ID NO: 38389 - DNA, 151 bp, Zea Mays
ccaacactcccccaaaaagctagcctgataggggttgcaccctcaaccatataaaccatgctatctcaccatcaccacacaatgtgggactattcccaacaatctccccctcacacattgtgagccgagatttgtctgagaatgcactggg

SEQ ID NO: 38390 - DNA, 381 bp, Zea Mays
caaaaacaggcccgactcgggctcgttctgagcgtcgagccagctcgtcgaactcgagctttttttccagccctagtcacatctaccatttaaaggtccacaaaaacatatcaaaatttacaacttaatcctttagtaatttatttttcttctatttatatggacaccagttagtggatgtgacgagctgtaaaatagattctttgcatccctaatgtaaggaattttttttcgctccttttggtccaaccccggcatctgtggatgacccaaacgcctccacgtcacccgtggaaagattccgtaacgtccaagagctggctgtctgatcatgtggctgcaaaagttatctcaaagtcagcaaatccatgcctgcattcc

SEQ ID NO: 38391 - DNA, 378 bp, Zea Mays
attggtgtttacacgcttttacctgtcatcacagaatcggtatctcgccaatttgaaacgctttcaccatcaacgcctgcctcacaacacaacataagttgcatacacatttggaaaatcaaattagattgggacaacatgacgtgttttggactaattgcatcatcacacctccataaacacaaaaacaactcaacctacgaggccttgtaaatcaggtcgagaaaatttttgaactcctacctcagcgtacatattggtatcggaccaaacctaaaatcttaaagtgtgctacctatcctatgaatacatagttgtacattactccctccgttcttttctatttgacgcggttgactttaaaaaaacttcaatcgc

SEQ ID NO: 38392 - DNA, 286 bp, Zea Mays
attctgttgcatcagaggatgtggcccgacaacgatgacatgtggtgaaactcccccttcttcatggacttgattgtttcggaggttgggcaatttcgagggcggaacggaggatcaaactcgttggtgaagaatcagagctgcctctcgtggggtgtgttgaggcttagcaacgacggcccaccgcgatcttcctcttatgccggtgtttgagtgtaggcgtcatcatgttcccttggccatgtgcggcccatcttgcagagtcggagttgcatgtcccttgaga

SEQ ID NO: 38393 - DNA, 132 bp, Zea Mays
tactccagcgatcgagttggcttggctactacaagcccttcaagtggtggtggtggccgcgctggtgccggggtgattaataatatagtaggagagcggcttggagaaggacaagagaataggagatcgagg

SEQ ID NO: 38394 - DNA, 379 bp, Zea Mays
agcgagcagcagccagcagatagtagccttgtcgtactatagactcctggaggataggatgctgtcctacgctacgcacgacacacacatgttcgctataagcagcccacgatgacctacagtaggtctctagaactgaaactaccgagttttgttttttggttttttttttttttttggtaagcagtgtcatcgctgagtcactccagacgcgtacaggcaggccgaactgtaaaaattattagctcgacagtgccagagtaaaaaacaaaaaagaacgagtcgattattgtaggtgctcgatcaattaatgggttagcatgcatgtatcggcgtactggaagtctggaacgtatgcagcgcgtgcacgtgctcaaac

SEQ ID NO: 38395 - DNA, 588 bp, Zea Mays
ggaaccgaagtacaggagcatctgggagaagcgctagctgcacagctgagagcagacatcacaaatgaacccactatacaagagtgtttttatccatagtatcttgcgttattaggcggtgcggttggacatggatgtccatgtcctacgcgagtgagctgagaaccgtccgtcgtcttcgtcgtccctgttgattagcgctaagcgcgccgcgtagacctatagcgccaggagtgatgggttggttagattaatggctccggtgcagaggggctctgacgccggtgctccgcccgacgatttgaccggccattttccttccgcgtctggccctggccgagccgtcccggcccatgaccgaccgggatcacgtgccgccccacctcgcaccgctcgcgccccgatggccgccgagccccaccgcgcaccgcggaacgcgtcgcgcctggactggctccccggcgccacctgacccgacgggcccggcgcccgcgcgccgaggggaggctgcccgctgggctccagagagagagagagagagagcgcccagtgaggaggagcaggacaacgcggccgcggggccacgcc

SEQ ID NO: 38396 - DNA, 265 bp, Zea Mays
acttgctatgatcaatgtgattattcctatctggcgcgccaactgtcgaggaatttttgcagtgaacttatgaagggtggatcatgagatcaagaactaaaaatgaatgcacaaagaacatgagacttatataggcttgggctctcaatatgagataataccttatgtcttgtaattatggtgtctattgcctacgcaactatgatcagatgatgtgtcctagattggcgctcctaccccttttatagtccaaggaggtgcggta

SEQ ID NO: 38397 - DNA, 692 bp, Zea Mays
atatgttttctctttcagaatattgtataaataaagagtaccattctttgagagtaaagttttctaacacttgtcctctcaaaacattatttattgcccattgtaaagaataaaacttgaaagttctaggaagcgacctttaacgttctgacacaaggtcgacttttcccttgtggttcaggttgatgatgagtgattgtctacggctagttgttgggggccttcgtcttccgaaggtcctcaaaaacacggactaaccattggtcatcagtatatttgtcaagcattgcaggagcttcggaatcagaccaccttcagtagtaaaacaatggaagagtaacaaagttagcttcatcataataacaatggaaggtggtgcaaggagaaggtgtcatcaggaatactgaaggcagaagacaatgttatccatgtaccatttgttaatcttatgtgtaattcttaagggcataagtgtaatttcgtatgaagctgttcgattccctataaatagtttaatagtgcccacataaagtaccttttggcggattgagcaattgttatgtaattttctctctacaacaccttcattgtaattatctctgaagaaccaaaggtacaattgtaaagttagtttacaaaagggggaatatgttattgacatatctcaattgagccatcatgtgtaaactctt

SEQ ID NO: 38398 - DNA, 53 bp, Zea Mays
gtgagattgtgcgcgtgttttacactaaatttcgtactcatttacgatgtttt

SEQ ID NO: 38399 - DNA, 363 bp, Zea Mays
aatgattgatgactgtaatattactgactgcatctattactgagcgatgactgcagtaaaatttctgattgcatctgttactgagcgattactgttgtaaaattattgattggttgactgcttttagtaacgagcgattactataaaattactgagtgtatgtgcatagaaaaggaagcggcatacatgcacaaaacgaaaaatgtgtgctggttgctgcaaaagaaaaaagaaaaaaaagtctagccatgcatacaagaaatgtgtgttgggtgccgcaaaaacaaagaaaaaaaaagtctaaccatgtatgcacaaaaaaaagtaaaaagagagtgttaccccgcatgtgggctactcgcc

SEQ ID NO: 38400 - DNA, 301 bp, Zea Mays
agaaaacataatagacattaataatctgctagcaatggaaatacaaccataacggcatgaactaaatcaaccagtgcgcacaactagttagaaacaacatcctttgacaagaagtttctaattaaatcataactgcgcctaagcagcgttattatgagagtgaaggtggatgtgctgctacttcccacttcccttgatgagcaacaagcacctgcattgagtaatgcaagagtgagatgaaacatctcagcaagcgaattgttttgacaagatatttaaaccacaaattgaattaatcaac

SEQ ID NO: 38401 - DNA, 513 bp, Zea Mays
cgcatatcgattcacgcaaaactaattctaatcaggaccgtccatatccaatcgcacgacctggattacatgatactgcttcggctccgtagctttacaaaagaacccctggcaaatgtaataatcaacctgtcgtccaccataagataagtctgagtctggtagatttttgcaagttaacccccagactctctgtatattatgcgcccagtccaggaaacaagtaaatcaggggaaaatgaaatagaaatttatttttgatgtaaaaataattattagaacttgtttagttcctagaaaattcatacttagtccaaattaatctattccagttcctataattttgtaataatgttgtttatcatatagtgtctctgttttgacatgaaaaccatattaaagttgatttcataattaatcctgtatcaaatatataaaacttttggaaattcataactctgttttaattccgatttgactcattccagttgcgttagtctcgtataaatattt

SEQ ID NO: 38402 - DNA, 145 bp, Zea Mays
ccagactaatctcgccgaagatctcggggagtctgtttagcccgccgccgccgctcagcctcagctccttctctccctctctcacaacttgcgtgtgcgggagtctttctcagccccctcctggccgcacgatcccacggtcctt

SEQ ID NO: 38403 - DNA, 414 bp, Zea Mays
ctcacatacgttcattgctcaacaagttgtggggaataatgtgcatgagctcacttacggtagggctcatgtgaagtgtaatgcttatcaaagaagatggttaaatctgagcgttgcttttaaagttggtcaaagttttattagtagttactaagtataagtagatatcaacccaattaaataagaaatcacaattaataataaaacccacaatgcaatacaaatgatagattaaattttagtttcataagttaatcatatgagtgtccgagctgctcttgaccatgagcacgactgatatactagttttacatacactctacagaggttgcacatctttacccacaagccgtgatactcatctaccacagggtcataaatctcatacacctctattgaggaggcgaggttgtg

SEQ ID NO: 38404 - DNA, 317 bp, Zea Mays
cagaactacccagtagttcatttgtttgtaaggtgtagggtgaacaaaactagggtaacatattagatcccatcaaattaagctgagcacatcacagtgattaacagaaacattattaggtaaagaagagtgatcaagggtacaacttgtcttttggtgcaattccaggtacttcttcaatttggtcttcaggtttctggtgacctcgcttctactcatagcaattcatatagataggcaaagagtaggtaaaaataacattacactaacatagaaaacaattgtgttatataattctaagtgttgctacaagatcg

SEQ ID NO: 38405 - DNA, 417 bp, Zea Mays
attcagaggcccaatcctcagctgggggcactgaatccatggatgctgaagattttcctcatgttcatcccgattatcccattgatacccaaggatggacatatccaaagcggaggttttctatggctgagtactactctagacggactgtgaaccattacactctgccatctgatacaaatattcagtttttccacactcagctgcagtttgatgttttttggggcaccttggtggacacaaattttcataagcatcaggtgattgattggtccttcttgctaagtcaatcagtcatggagggtctgatccctaagtttgaaacatgtggattgtatcagtttatggagcaacgcacagatttcaatgacatggctgttaagcaattcctggctacctcgaagattgatattgaag

SEQ ID NO: 38406 - DNA, 2309 bp, Zea Mays
ctaggcctgaaatgcttgcctagtccgcgttggagtttgccaacctagcttagagtctatttcaactccttctctgtttgctcagatccgtcactaggtggccgattgaggcttccactatgttgaagtcggttacagtagagccaaggttgtttacaatcttcttgacaacactccggaagagtaacaccttcgcttgctcaagatcttactcgctctaacttgtagcagcacccctctactcacttttggcttataattgcgccaacacacaaactagagagaaatacacgagagagggggtagaaatgatttgcaatatgtctacacttgtttgctactattgggtgacttgggaacttgattatgtgcgcctagggggtccttttatagccccaaatgagcccctagtcgttgccccttccttccaaagaagatgccaaatcctggaaaaaactgctctgtttgcgggggcatcggaccggtccggtgcactactagaccgagtccatgtgcccctagtccgggatctgattagccctttccttctctggaacggctagccgttggtgcactagaccagtcttgtagcaggtcctgtgcgccacggactaagtcatgtagcaggtccggtgcaccacagaccaagtcctatagaggccctgtagatggtccggtccataggaccgacactgtagctggtgcagtgatttttagccaaacaacctgagaccagctagttcactcttggcgcacggacccactactgtagcaggtccgatgcaccacaggactagtcctatggtaggcccggtgcacatagacaggttgtagtgagtcccttttctccatttattctccaatcggtctcaactcagaggactttactgtgacttatacacatacagttatagtataatccaattgattaagtcccagaaagttaccttttcccattcttttcttagttttctgtttctcctgaaacagacctagaatgacactttctttacaaactgagttagagagcaaaccaaagcaccaaacatgtagtaaaaggtgtatgcaacataattgaacacttaaaccttgcatacttaacatttttcatcgttttacccattttggcatgtttgaggttgatgttggactccaagccatcaagtcaacttgacttgatctagattgtcatctatgagctccaacagcttgtaaaggtcacatagaacatgtccaaacataggaacagctcaaactaaaggtcacagtgaacttagctccttttgggttgcttctaggtcctagctttgacattactccatcttctagtgaccttgttcgtttcttgagcttgatcttgaaccttatgacttacaccacacaaccatagatgctacctcatttgttgtaacacatgtccttagatagtgattctcgttgcaccacagctcttctcaactcgatcaaccttgacttagcaagtattcttcgccctggctttgggttcctccgtctccttgaccttctctcgtgcactcggtacatcgaagctcttcttgtcttcatccttggcttaattgtctccaagatatgcacactgagtctcacataagcaatgttcttctttacttgtgatgtccacagccataatcaatttagcctttggaccatcacactagaactcttgtgttgaactatacaagctttgcactacgcacatgttttaacacttagcacacttgttcctttaattgggttgtcatccaaaccaccaaaacccataagggagctttcatcatcaaattccacatcatatgtttcttctaccaagtcagtggcatggttgaatactctatatgctttggaattaaaaaagtgaccaagtaagaaactaatatcacatacttttgaaattcccctatgtgttgatgctccttatagatgtagcatttgcaaccgaacccccaaaagaatgagatatctagcttcttcatattgagcaactcgaaaaaatgctatttttcacttttagtttgggctctctgctattatgtcacccgtgttaatgacttatgggaccatctgtgtctatgacttgtaggcctaatggtaaaccagataagcccacaactaagagtgacaaaatagcaaatggctcaagcaactcataggtaggattaggtaaaaaaatctgagaccaaacattgaacccgatcggaccgagaccgaacccgattagactaaaatatctgttatcgatttcacattaggttcctagttgctacaaaccaatatttgtttcagttctt

SEQ ID NO: 38407 - DNA, 227 bp, Zea Mays
cagataccactggacaacacttttgcgacggcattgcgtcgtgtaagaatgcaactggcggtaagcctcaatcaaagctcgtagtaagttctgcaggcccagcagagcccatcatcttctcttgccagtacggccctgcaatagagctcagcggcgcggaattttccttttcgctttcattttgacatttttttatgatatgaaagttgtattatgaaacaacattt

SEQ ID NO: 38408 - DNA, 481 bp, Zea Mays
gtttattctcaaagcgaggaagagcacgcagatcatttgaggatggtattccagagattgcgagagcaccagttgtatgcaaagttgagcaagtgtgagttctggatcagtgaagtcctgttcttgggtcatataatcaacaaagaaggattggctgtggatccgaagaaagtggcagacattctgaactggaaagcgccaacagatgctagaggaatcaagagtttcattggaatggccggatattatcggcgattcattgaaggattttcgaagattgcaaaaccaatgatagcgttgctaggcaacaaagttgagttcaagtggacccagaaatgccaagaggcctttgaagcgctgaaagagaagttgactacctcgcctgtcctaatcttgcctgatgtgcacaagcccttctcggtgtattgtgatgcttgttacacaggtttgggatgtgtgttgatgcaagagggaagagttg

SEQ ID NO: 38409 - DNA, 1164 bp, Zea Mays
agaattccgttatgctagttgattcatgtagttaattgtttatctcgtgcaatgttgatcaacttaaaatgattaggtttccattagtgtatatgtaatagaattcttttgttaagaaccaattgtaattgatcgttagtgcataagatttaaccccctgcgagaccttttcccgtttctttctaaccataacaaatgcgatatcgaatgtcatacttgatgcatactcactttatttgttcccttgtatggtgtactgttcttttgtattaaatatgtggatgtatgtatgtttgcgctcgcatagagaacgatccggtcgaagagcccgaggaattcgcaggagaagcccctgagcagcagtcggttagtggaggcaagtgtcctttgacctatctctgtcctattcattatttaattcacctcccgctttacacatttatgcctaaggattgactagttttgttatccatgtccttgtttacctatctgggttggattattactgtttagctttatgctatagctcaaactctaatcaatgaacatgatgtggttatctatgatacgctgttttcccttctcttattatgatgtggtacttgtggcatttaaggggactcgagcggtttctcgagtgcctctccgtaaggacctgttcaatggatgaccgcccgggaaaacagtgcaaccatgagggtggaatggggtgcccttagctgaataattagaggatccggggtgtagttcgtgtggcagaacctccaagttgtcgggctcacatgcacctgtccttgtctcaaagacctcagacggccatgcatgtgcaccagataacttaacaggatccgtccgattgccccaaggacaccggataaaccacttacaaccagaaccgcgggattaagtaacacaaatcacacacaccaatattgttgcagcggaaatcttactaccaaattttccaggttacaaaaattttacattattttatcggagtgattacaaaattataagtttgaaatatatgctagctcaagtgaccatcctcattaagaagtatagaagaagtacttagacttataagaaggccgagcccaccggcacttaaacaccatcatcagcagcacaaaactaaacctgaaaaacaacagggaataaaac

SEQ ID NO: 38410 - DNA, 537 bp, Zea Mays
catttcctattttaaacttctctttgcaaacagtgtcatttacagttacgcgtcccatattttatacgctctactggagatagtcttagctagctactagtggacaacccgatttactcctctctttagagcaagtataacaaggtgatgtaaacgggctacaagatgtcacatcagatttgtggtgatgtggaggaaaaaggaacagagagataataaaatcgagttgctcaccagtagtcagctaaaaacagactgctcacaactcatagacgggttgtgagaaaaagggttgtgagaaaaagagatgagtcaaacatataaaactttgattactaataacagttttattatttagttttgaaatctaatagtcatatatatagatttatcttaagaactactttataaatatattaagagtttgtttttgtttaaaaaatattaatcaaaattatatttaaaagaccgtgtcggtgtcggtgtcctatactatttgtattttgataccggagagagtaattaggttgatgattc

SEQ ID NO: 38411 - DNA, 659 bp, Zea Mays
gaagattttggtgaggcaatggggttaaagggccaaaattgctcgcgttttggtgcttgatgccaaagggggagaaaataaggccaaagcaagaaatggatcagctaccattgagaatttttgaaaaagtagagttagagtttttgtttgtcaaaatactcttggttgcctcttattgtcaaaaattggtctcttgtggggcgaaggtttaattatgggaaaaagggggagtgtttgaactctttgatcaatttctcttgaaatatctctctttatgtttcaacaagtgtgtttgacttagagataggaaattgaggttgatttgcaaaaacaaaccaagtggtggcaaagaatgatccatatatgtcaaatgtgaatcaaaacaattttgagttcttattcgaagtgattttgcacttgttctacttgctttatgttgtgttggcataaatcaccaaaaagggggagattgaaagggaaatgtgcccttgggccatttctaagtattttggtgatttagtgtccaacacaagtgcctaagtgttaaaaggtggacaaagtacaaatcaagtataaaggtatgtttctcagacttagtgcattgtttagagaataatgtattgtgtttaagtgctgaaaacaggaaaaatcaagttgag

SEQ ID NO: 38412 - DNA, 1339 bp, Zea Mays
gcggggcgaacaatgctgttttcctgtcagaacggtcagtaaaggggcgaagtgactacgatcacttcgaccttgccgactgaggcacgcgtgtcaggataaggtgtcaggcgatcctcgcattaaatgtgcatgcgatacggtcggttggtagggcgattcggtcgaggtcgctgcacgacaaagtctgcccgagctgggcttcgggtgagccgagggtgcgtctgctgactgaggggaccctcgggcgaggcgtgaatccgtccgggactactattcccgcccgaggctgggctcggatgaggtcgcgtcccttggtagacgtggccttgacttgaacctcgctttatcagccgtgtatggttcgttctgaagatgtttttcagccgtgtttaggagcattgggggtacccctaactacggtccccgagaggtgccctctaaatttcctcccctaaatgctactatgcagccacgtcatcaagttttcctctcctatattcattcttactgcaacggttccccttatatattcccctatatcttcatctacacataaaatattcatatcaatccaactaccatcaactaccttcttttttaaaatttttagttttgtccacctacggcaggttcaaatattgagtttatttttttttgtaattacaaatataatctccattaattagtgtgcggacaattatgcatacataattttttaattattttagggtccaggttcatataatcattgaaaagacttctgatttgacgagtcattctaggaaacataaattagaccatactacacaagacaaccataaactgcgacgaggatgcttaccacaaatcttgcagcaattgatcggtggaagccccaagcgtagatgcgaatctggatggatctacgaacagatggtgtggctttgctgaagatgaggctctggttgaagatggtgtcgacggctgctgcagaacaacggtggctagcgtccatcacttggggttgcgagttcgtccggctccgaaaccgtcttcgccgaacgggaagcttctgggcgctggcgcgtagggaagaagccaacgctgccacaacaccatcactcgtcaaaatcgcgtaaggaggagaatccagaccggcggaatcacgtgggggaggagaatcgcgttgagagatccatcttcaccaaactcggtgaagctcagcacgcattcgaggggactcggctccacaaggcccgtcgatgtgccgtcgtcgtcgtcagcaacggagccacctccgctccttccgatgcgcgcgcgaaagggagagagaaagtcgtggggcgtgaacaacgct

SEQ ID NO: 38413 - DNA, 261 bp, Zea Mays
ttttgccctggtgtttgatcccgaccggtagcttcttctccgttttctctctctatctctcgttggaatgtacccatctccttgtcggtccttgcccgggcgaaagacagcgccacggtcgtccacgtctccaggatcgttccggaggcaaacgacagccggataaaagcatccttccagtctactgtacttatcttttacgacggaaaggggacacggaaacgctcgcgtccgtacatggtccatcacagaggagatgct

SEQ ID NO: 38414 - DNA, 1061 bp, Zea Mays
gccggatgtctatgtgctttgtgcggctgtgctcaacaggattttccgccatgcggatagcactctcattatcacataggagtgggactttgctcaaattgtagccaaagtccctgagggtttgcctcatccaaagtagttgtgcgcaacactttcctgcggcaacatactcggcctcagcgatggatagggcaacggaggtttgtttcttagaattccatgacaccagggaccttcctaagaattggcacgtccccgatgtactcttcctatcgaccttacatccagcatagtcggaatctgaatatccaatcaagtcaaaggtagacccctttggataccagagcccgaagcaaggcgtagcaactaaatatctaaggattcgcttcactgccactaagtgacactccttaggatcggattgaaatctagcacacatgcatacgctaagcataatgtctggtctactagcacataaataaagtaaagaccctatcattaaccggtatgctttttgatcaacggacttacctcctttgttgaggtcggtgtgtccgtcggttcccatcggagtctttgcgggcttggcgtccttcatcccaaaccgcttcagcagatcttgcgtgtacttcgtttgagagatgaaggtgccgtccttgagttgcttcacttggaacccaaggaagtagttcaactcgcccatcatcgacgtctcgaatttctgcgtcatcaccctgctaaactcttcacaagactttttattagttgaaccaaatattatgtcatcgacataaatttggcacacaaataaatcaccatcacatgtcttagtgaaaagagttggatcggctttcccaaccttaaaagcatttgcaattaagaaatctctaaggcattcattgttggaacttgctctctgctgcaagtgggccaacgggggtgaacaatggcgacaacagggttacgtgcacgggggcaatagctctgttgatctcgcctctcacgggcactgtgcgggggtatttataggtgtctgagtgcccagcgtcttgtcttaagga

SEQ ID NO: 38415 - DNA, 933 bp, Zea Mays
ccctgcccgctttgcctccgtcggaccagcggctgcagcgaaggcctggagcgaagggtggcgtctttgccttcgccccaacattcataccatgctcttggggcttgcttaagtccatagagcgccttagagagcttacacacgtggtcagggtaccgttcatcctcgaagccagggggttgctccacgtacacctcctccttgattggcccgttgaggaaggcactcttcacatccatttggaataacctgaaagaatggtgagaggcatatgctaacaagatacgaatggactctagcctagccacaggagcaaaagtctcctcaaagtccaaacctgcgacttgggcataaccttttgccacaagtcgagccttgttccttgtcaccactccgtgctcgtcttgtttgttgcggaacacccgcttggttcccacaacattctgcttgggacgaggcaccaacgtccaaacttcattcctcttgaagttgttgagctcctcttgcatggccaacacccagtccggatctagcaaggcctcttctaccctgaaaggctcaatagaagagacaaaggagtaatgttcacaaaaattaactaatcgagaccgagtagttactcccttgctaatatctcccagaatttggtcgacgggatgatccctttgaatcatcgctcgaacttgggttggaggtgccggttgcgtttcttcccccatcacatgatcatcttgtgctcccccttgatcacacatctcctgttgatgaacctgttcatcgtcttgagttggggtatgcaccatagttgaggaagaaggttgatcttgttcatcttgttcctgtggccgaacttctccaatcgccatggttcgtatagcggccgtcggaacatcttcttcatctacatcatcaagatcaacaacttgctctctt

SEQ ID NO: 38416 - DNA, 133 bp, Zea Mays
cttacatttagtaactgctaataaaatttgaccaacttattaaaagcaatgctcagctttaacccttatttgttgttcagccttacacttcacatgagctcccacctttggtgagttcatgcacattattccc

SEQ ID NO: 38417 - DNA, 519 bp, Zea Mays
cgcagatccgaccgctgccaccgccggagggggagaactactgaactaggaccgcggagcacctccaccgctgctactgacggacactgcttccttctcgcgcctgcaaccgtggccccggcccactctgtgcagcaggggaggattgcttcgctttgcttcttctgtcttcctcgtgctgccgctcctgctcgcctcgtatgccctcgagagactagactcctcggagatttaagttttaaccccacgagttttgctggtcctttttgcttctctctgtccagtagtccagtccgcgctttagcaccaccatctactacgatttattaaataagttgtcatatagtaaacatcttcaataatataactacacaaggaaaaccgtagagttgaatgtctaagaacctataaaattttcacgaaatctacattgaaagtggacgcttcatttagattttgttttagtttataatatgacagttttagaattaaacaaactttttttagcgaagaagtgac

SEQ ID NO: 38418 - DNA, 843 bp, Zea Mays
tggccgaacctagggcagagatggggtggcggctgtgggcgtgggaggaagaaaccctaatcctctgataccatttaggaaactgtagtacttgatgtattgataggagatgaggtacaatatatagactcacaactctaaccctaatggcccgacaacccaacagtggtggcggcccactcacacacacacacaatctaacattatccaccatccaaagaagtccatgtccagaggagccggcgagaggtcttggagatcatagtgacagaaaggtgagagagatcacacttgtctagagaaaatatatgcacataagacatgctgagtcgtttcagcttcttgatcacaggcgacactttttttctcgaacgcgcaggagaactgcacgtcattatattaagagagggaaaaggtccaagaggaccaaattacaatgcccagagggcaagccgaaacactagaccagattggaacccagcctagaccctactaataacagcaggaagaccaatgctagctaactgcttagctccagccctatcccagcaaattaactcattcagaaacaaacttttaacagagctcaaggaagggtttactccatcgaagacaactttgtttcgagtaagccatatgcaccacgaccccaaaattatgaggctattaaagcctttcctcctgctcttagcacctttctccaccattcagcaaaagatatttcatcagcaacatgggtgagatcccctagtatcaagggaaataggatatcatgccaaaactacctggcaaagctgcagttgcacatgagatgatgaactgtttatgttgggcccttcgaat

SEQ ID NO: 38419 - DNA, 1861 bp, Zea Mays
tttccgtggccgcgaagagcacctcaatcggacatcagaacagaaagttatggcagtttgattatagcagttttccagtctcataattctgtgcagaatctgttctcttaagagttaggcaattttatcaacagaattaaactgtgagttggtaaaagaagttgtagataatttcataagctttccagattgttaaatagtgcattcatatgatttgtgaaactccagttatgtttgttttactgtggctgttcctgtttacctgacaaaaatgagtgggtctgttcactggtgggtttcatctagtaaatggccgaattggctcttccaactatggagacttttgtagagggataaaagttcttacttccagcagaatttcataatttttggttcagtagtttgggagatatcgaattttaaagttaaccatactgctgtctaaaacagattcagtcagttatcttgtcagatgttttagaacttgtagatgacaaaatttaactatcttttgaatactgaagttgtagagtattttgtgtagatactcctagagtatttgtttgatatcaccgctattttaattttaaagatacaaaattaacaaacagcgttgctgttgtatggcatgtggttcagggtgggagtctttccactgggtcttggtttcaagtgtaggagtgttttgttgattcatggcaaatgtttgtgaaatatttatactaagttttatgcccgctagcaggtggctacactccagatcatgtctagtacatttcttcttcttcgatgaaggcaagtgaatgtagcggtggttgcttccgttctgacctattatttctattgcctacactataatattcagaagtattggattctttcataattggacactatggtgatgctttacttgcttgcattatactgatgctcaatcatatattgatgatgattatgattcgagtatgattcatgagattaattcacatccctgaaggtaaatgaagtattatttgaggttggtattgtatctgaaggtaaataaagtattatttgaggtttgtattgtatctgaaggaagtgaagtttattgataaatgcagcatgccatatacattgcatgactcatttgtatctgaagttttgtcatgacctatggtccgaccgtaccggtacaacttagcatcgtacgttgcccgaggaggggtacgatgcagcttcatacccttagaggtatgaaggcagaggacatatgcattgcattcatatgcatacattgaagtgatatttgcagatgatgtggttttacaccctcagaggtatgaagatagaggacctacacattgcattcctatgcatacattgaagtgatatttgcaggtattgttgatgcagggaagtgttatacaacctattgtggttgttcgaggaaatgagatgatattggttatattgggactactgagttctatatctacaagtatttctgatcttgattgtgattcttttaaaatgttgattaattcaatttgtggtttaaatatctcgtcagaacaattagcttgctgagatgtttcatctcactcttgcattactcaatgcaggtgcttgttgctcatcaaggggagtgggaagtagcagcacatccaccttcactctcataataatgctgcccagacacagtcatgatttaattagaaacttcttgtcaaaggatgtttgtttttaactagtcatgcgcactgattaattcagttcatgttgttatggttgtcttcccattgctagcagattattaatgtcttttatgttttcttatcatgatatctatttatactttgttgcttccccgtttatgcaa

SEQ ID NO: 38420 - DNA, 883 bp, Zea Mays
attcaatataatggttttactgacagtcaagtgacaagtataattacaaggctggtaatctacaacataactctgtaccatacaaatgataatagtctttatattcaacttacagttgtaaaaaaggaaaataaaaaatgctaatcgcatacgtatacatgcatcctgtatagaaaaagagaagaatgccaatatggcctacactctgcaggatataaagtttagcgcacataatgactgagcaatttctgtaaaattagttaaccttatttttaattacatagatatgtagcttgtagctagaaaaatgataactattaactaatactaaaacattaagaatatctaaatgggtcctgcctgagctatcatgagctcatcatgatcggacggtagtagcggcactgttgcggctggtcgtctttcttgacgatgagtaaatgcaggagatagtcgccaaagatatccttgccgaagagacggaagcggggctgaacgaacgcccagacttgtcgttcgccttcaacccgcactcacagatgaaatcgatgtacccttgcccctttacgattgtgccgttgctgctctcccacccgcgacagtagcaggtccttgttgccggcgtcgaggttcaccagcttcacacccagcccgctgtgcactttcccccgggccttggatttcttgatcttcttgctcccggcggcgctggaggaggcgtcgttttgcggttccaccgcctcgggctgcggctgatcgcctgaccttcgtttcggtttcgtggctgggaggaggaacggggggtttgcgcgaggagtggcgggcacggggctgcggtacaggcatcgcatggctgggcaggggcgggggctgcaggacgcgg

SEQ ID NO: 38421 - DNA, 160 bp, Zea Mays
agaagaaagttgagagggcaaataaggtaaaaatactactttagtcccttttagtcaccccttggtgactaaagaactaaagtttagtcaccccattttagtcaccatgtttgcttctttagggactaaaagtgactaaaatttagtcactaaactttag

SEQ ID NO: 38422 - DNA, 419 bp, Zea Mays
gcgtcggcgggccaaaagtactagccgagttccctcccacctggctcaccgctcacggctgcacctgcaccagcacgcccggtccccggcctccgtgcacccacccgcacccaacctcaccaccactgttttgcttcgtgcgctgtgtcggggaggtctgtccccgtcgctcttcgttttctcgcagaggatcgctgttgagatccgtagcctgcagggcgtcgactcctgcctgcgtttctctaatctggcgattgatctgctggaacttatctagccccggatgtacatttttctgatgggccaaaaagcaacaagcctaattacgcttccactccggtctccttcctcttgctaattaggaagtagtcctcgtgtgtcaaataagattagtataaataaacctagaacgatttttc

SEQ ID NO: 38423 - DNA, 248 bp, Zea Mays
atcgtagcattctattagaggtcgttcctaggccgaaactcaattcacccactcgggactcgtcactttggtgttgagccgacggacgcgtcgctttggctcctactggacttcaccttctcttgtacttggtaggtttttgctgtcgtgggctttggctcggctatcgcctttttcgttgtctgatcgtccccaaccccaaaatgtttggcacaaccacacacaaggagaaatttgtaattttgcca

SEQ ID NO: 38424 - DNA, 1378 bp, Zea Mays
ctgacatgtcatcataagcatctgcattaatgtgcttgttacacctagaatgcattcactaggttaaactttttcaaaagtgtgatgttgtgtgttgggtttagagtttagtctaaggacttggcttaagctaaacaggggtaggtcatctcttaagcaagtaacaagttgacttggagtcttaaatgttaaaggtaagtcttagagcctagagtagacttgttttggaatgatggtcaagtggaagaagcgcttaagaagctggaataactccaaaccttaacttgagctttgcttggaatagatggttaagtaaaggaaattctaaaccagaacattttggatatgagctatgtgtatcaaagattggatcttagactagagagtaaccttgtttctgatggatggatcaaagggatgaatccctggaagaagctgaaatacaaatgaaactcatttgaaatcctaaaactagcccaaaagaggaattcaaaaatctggaaataatttgacaaaagtccatatatcaaagttgtggagcttggaaaagtggatatgtttcttatttggagattcctaagttgtgtggaagaatttggagttaagtacaaaaattcagttttgggttcattttagaattgctgaaaataatataaactagacaactttggactcttgtaacttttgatctagaaccattttgaagatgatcattataacaaagttatagagctacatgaggagtttaagtttggttaagtcatatagctctaaaactatatggaactttgagtaaaactggtccaaagtaaagctgtcaaaaattgtggatttcagacttagtgaaattcagattctgaatttcagcaattggagcaaactttgggctattgtagtttggaatttaagaggttttggttaatggtcactaaatcaaacttgtagaggaactagaggagtataaactttattaagaaacttgaccctaaaaacatttggaacccagaaaaaagagtggttccaagtggtgctgctttacttctgaattttcagattggaaacagtaactgaaactgagtttcagtgttttgatagcagttttgaagcctatttgtggctactctataaggttttgtgttatggtgtttgtaaaataagtgaagaccatataatgtggaacaactttcttatagggtggtggacctgatcccatacaaaaagtgtagaaatagttgctcaaagattggattgtcaggttggttaataactgaatttttattcagttctgaaccctgaatggcagcaagttgcccagtttggagctctatgataattaatctacggagattttggttaagcgttctgtagtaaagtcaaa

SEQ ID NO: 38425 - DNA, 370 bp, Zea Mays
attatttgtgttgggcaattcaaccaccaaaattaattagggactaggtgtaagcctaattccctttcaccaacctttcggaagaggtggcctagagactggatgaaggaatggtactacgtgaaaaatgacttaaagacgagagaagatattaaagacatcatcttgcgccccatgtggcagcatttcggcctccgaaaatcgaaggtagagattgatgaggcagccgaaggatgccgaagggcctttggcacgatttgctctttcatcgggacaagggacctaattcaggagcatatagccttcagagtgtggccacttttagagaagtcggaaatgccgaaggagactgttactaaaactggcgaag

SEQ ID NO: 38426 - DNA, 343 bp, Zea Mays
cacgtgtttgccactgatactctgttgacgccctcgcgtgttgagccttgagcgccaagatgcgtgctcgtcttttgatggtctcgccaccaatcccccattcggtaagagcttgtttagttattggtggattgaagaggattgtagagaattaaattgcttacaagtcaaaataaaatagaaatctctctcaatccccatgcaacaaaacaaggtctaaagtagcaactgcgagtccaacagtgggtagcaatccacaaccagtggcggacccagctgctatgtttagtgtgtgccaagaaaaaaataaaaaaaacaaacaaaaaataaggatcaacaagac

SEQ ID NO: 38427 - DNA, 522 bp, Zea Mays
atttgtatgagttacatgtgaaatcactgtaagtatccaagtttcaacataatcagtactttatttatcattttcatatgaggacttgagttatcttcgtataaaatgtttattagtttttgtaacttatttgcaatttttgagtgaaactagaatattttatgaattttaaatattgtggtgttgatttttacattgtccttgtgattagtaagtttgaactacatgatgtcaattttattggtttcctttcttacatttgatctatcatatacatgattatgtattgcttaatttatgtgtttgttggatggttggacaattaatatcatcggacgaactacccgacaattatccggtacctacccgagtagtatccgttattcgtttcttacccgcccggattattacccggtcttgtcctgtatccgtcccgaatcttaactacccgtatccggtcccgtatacgagaaagatacattagggtaggatacaggatgaccttgtatccggctgtatccg

SEQ ID NO: 38428 - DNA, 321 bp, Zea Mays
aaagaacggagggagtactacacatcatttcttcagagatagatgaacgagcatctctaatgcttgaagatgtcggtcatgccggtcccccgctcggcagtggtggagcacgaccaagtatgatattggacgactcacatattgcaccaaaagaaaaaaatagtaaaatgaaatcatcattaataagtacctcaaattgaagaaaacttgcaaaatacacactaaatcaacaatttaaccaaatacaggctggtaagcaaatagaaagcataaattagcataaaataaagagataaatttaatacaagatatacaaccgtg

SEQ ID NO: 38429 - DNA, 225 bp, Zea Mays
ctaaaagctagttgccaacttctgaactctctctgctcttttaaaaactcttatatttgtgctttgtacagtcaagaacagtattgtttcccatgggcatatcactgtgatagtatgagtattggtgtattgaataaaccatatcacacttaatattctcatatgtgagtagattaggtaaactgtcctataatcctgctacctcttacaacaaggattgagatt

SEQ ID NO: 38430 - DNA, 331 bp, Zea Mays
attatactcaagagaaacgagcagagtcagagtcggtggcccattcgtgcgtacggcaagacaaagaaaaatgtttttgtgttaattttttatatcaaaatattgaagagattaattggaaaaacaaaaaaaaatcctaaactatatgtgtagccggcaatggttaagaaagaaaagaaaagaaaaaaaataaagcggttgaagttagttagaaagaaatgtgtagttagaaaaaaaataagagcgaatatagtgaaaagaattttattgacgtggtaacatagtagcaacgtataaagagaaaattatagagataaccgttacgaataac

SEQ ID NO: 38431 - DNA, 525 bp, Zea Mays
cagacctcatctcaatttagattcaaacaagattggtaataattaactcaaagtgtttttcttgagttttgttccgagtaatttgaagcatctgtttcactcgtgtcgttacaagtttacctacaacacaagagaaacatagtttttgtttggtctctgacattattattctgaaccttatgcctggagttataacattatccggtttggcctgttgggttctcgctttagcatcatagatggataaaattctactgcacattgtcacttattgttgatggcatgatgagccccaattcacacgcctggctaactgcccaatctatttgcatgcagacgaatctatttacctgtattgtaggctacttattgaatagtttatggttgatcatcgtaactattgaggattgaacaaggtgttgaaacttcagatgaaacagatcacattcctagatctatttagccaacttgtgcttccatcctactttgttctaaaatgaacttttgatgaacttgagaagttta

SEQ ID NO: 38432 - DNA, 323 bp, Zea Mays
atctcgttgaattgcttggtggactcttgggtgcggcggcctttgttcctcatcctccttgtcttcctcatttccatctcccccttgattattgccatcatcttgaggtggctcatttgcttgatcttctacttcatcaatttgagcttcatcctcattttgagtcggtggagatggttgcatggaggaggatggttgatcttgtgcatttggaggctcttcggattccttaggacacacatccccaatggacatgttccttagtgcgatgcatggagcctcttcattacctatctcatcaagatcaacttgctctacttgag

SEQ ID NO: 38433 - DNA, 456 bp, Zea Mays
gtttgtttaagggcctagatagaaccaaagtagacaaaattaatgaattgattgatgcattgaatgagaagaacatacttttagaaaagcaagaggatttgttgtatgaagaacatgataaatttgtagaagctcaaagatctcatgctctagaagttaaaaggaatgaaatgcttgcttgtgagttgtctacatgccatgattcaatttctaaattaaaaagcattaatgatgacttaaatgctaaactagtagaagcacataaatctaactcttgtgttgaacatgttgaaatttgcactaggtgtaaggatgttgacattaatgcttgtagtgaacacttagtttccatttcaaaattgaatgatgaattagctagtcttaatgcccaacttaagactagcaaaagtgattttgataaactaaaatttgctagggatgcctacacggttggta

SEQ ID NO: 38434 - DNA, 558 bp, Zea Mays
aaatggatcagctaccacttgagagattttgaaaatagtagaatagagcttttggtttgttcaaaactcttgcattgtctctttcgtcaaaagttggcttcgtgtggggagaagtattgattatgggaaatagggggagtttttgaaatctttgataaatctcttttggaatgactctctttatgtttcaacatgtgtgtttgacttagagatagagatttgagtttgatttgcaaaaacaaaccaagtggtggcaaaggatgatccatatatgccaaaaatgaatcaaaatagatttgagttctatttgaagtgattttgcacttgttttagttgctttatgttgtgttggcataaatcaccaaaaagggggagattgaaagggaaatgtgcctttgggccatttctaagtattttggtgattgagtgccaacacatgtgcttaaatgtgaatatatgcccatggatgaacaaagtacaaatcacaagtaaaggtatgtttctaagccttagtacattggttttgtgtactaatatatttgtctaagtgttagaaac

SEQ ID NO: 38435 - DNA, 218 bp, Zea Mays
cttttctctcctcttgcccttcttgtcgttgtccctgtcattgtcacttgataatggacatttagcaataaagtgaccgggcttaccacacttgtagcaaaccttcttggaacgggatttgtaatccttccccttccgttgcttgaggatttggtgaaagcttttgatgattaaagccatctcctcgttgtcgagctttgaagcgtcgattggttgtc

SEQ ID NO: 38436 - DNA, 236 bp, Zea Mays
cagcagtctgcctgaaagtagcaaatagacgataacagcaaagcaattacatcttgatctgaagttctgaacttagttctctaaacaaacaaatattgctggccaaaacaattgtcgctaattaggtgtcatagggtttcctaatggtagtttcgactcccgacgctgccacggcagcagtagaaaatgattgtgatttgcagactaatgtagtaagattagccttttctatctat

SEQ ID NO: 38437 - DNA, 199 bp, Zea Mays
gaagaatgagatatagaggattgaatcttttagaaaaaaaactataaaagacggatatagaggatgaatatagatgacgttgttggagacagcctaattaggacaagacaggagggtgaaacacacaaacctgttgcgaactttccagagagaaaaaaaaagaacaaaaaaaaaattctgccttttcctgctaaataaa

SEQ ID NO: 38438 - DNA, 904 bp, Zea Mays
ccggcgcgtgccatcgatcagtaagtctaatcagtacgcatcatctgatttggcttgttatttcagttcttctgatttggtcatgatttatattcggaatttagattggaatttgtctaattaatcaacagcaagcaggcatgatctatcagaagatggttcaggagctagaggagcaggaaaggaaaagaaggtaaaaccaagaacagagtgtgcatggcatcgtcgcgttcacaggtgcatggaggaggggtgtgatctgcattagcttggacaggtgtgcgtgccgtgcaccaatctatctatccacctttcccgcccggggtctctttagctgcatggttcacaggagaagagttgagtttcacaaccaccacctccaccacaccaccatcaccatgtccataaacacgcacccttgcattgcactgcactgcatatgacggctttttaatcggcatgcatgctttcttttgggctcggaaacagattttgtcctgggactgggagcagcacgtacggatgagccacggctggctagctcttgcatatactgctagctaataaccctgggattagggcgctaaccatgcggactgtattgttattattattattataaactactactccgaccaagccgaaaggagtaggccttgggctttgcaaataatctgtctcccctaaacaaaacaaaacaaaacacatgcagaggcagccctgtgattaatttgatctgtgcgctgccaatgagagagcttggctatgatctggaacagtgctgactacggtgctagtatatgtgctgtactactagttttatctgtgtgcacaactgatgcatcctagttaactcgttcgttctaggatcccatacagtcaagctaaaccactcattactcag

SEQ ID NO: 38439 - DNA, 905 bp, Zea Mays
tgactagagcgatcattaggtggttatcagtcgatttaacttgatttttttataaacacttccttaagaggggttgtacaaaagtgagtttagacaacttgataaaacgatctctaaactcaacctttgttcattgggcagttacaagttagtaaaaccaacttgttgaactacttttgacattgagtaggtcctctcagtaccatcggtaagccaagggttgaaagctcacatttgctaacaaaaggtcatgcatttgggtagaaatcatttggacatgttattcatccgtttcttcatgcgagatgaattatccacttggttagggaatacatggattaaataggagagcgaatgaacaaactcctgcatctcaacagcaggggaaatccaatctccatttcgagagctaatcagtggttttccaacactaaaaagctccaaggattcacctttacacaaaggacgtaaaggaaacttgtatgtgtgaagtcaccatcaaagtcaagggaaaagagaccacacatgaaagggatatgcccttttaatccaacggagatgatagatgttgcttgatcacttgacaaacaacatagaaattgtttcaaggaagtagtttacggaagataacacatcagtgtagttccacaatggatcatgaccagagaccttgataccagcatgcgtcgagtagcacaatcctgtgtgcgcattcacaggaggctctcagtctcgatgcggcaccataagtccttaatcatgacaccatcaccgaactagcaccaataataaatctcacgtagcaaaaatagattgtgccaagataacgcattgacatagtctcataatggattacaactactaaccatgataccagcgcgtgccgagcagcacaaccgtgtgtg

SEQ ID NO: 38440 - DNA, 335 bp, Zea Mays
gtttgtcctgcgcctaaatcctagctcggcgccaagatttgtggcgttgagctaggtgccacgttgacgccatgttgtctcgccagcatcagcgaggtaggtaccttggcgccacaagctgtggcaccgaacattgttacttcggcgaaggcaaatggcaccaagcaaagtgtctaaaaacaacattaaatcttctaagagtttaaaagtaaaaaaaaataaaaagagctaaaatacaaaaaaaaatccatgcttccaacggggtttaattattagtcggcgtgacgagctctgccgaaagtgtcgagcgagattgtgaatcagccatggaagct

SEQ ID NO: 38441 - DNA, 229 bp, Zea Mays
gttgcctttggtgcaatctatgctcaggtaaagaagaaggcgtcgaggtgaatctccaggagttccaggacttcaacgagttcgaggattaggctagcgacctcccccagtcagctgcctgtggtgggtttatttacgttggatacgtttctgttctgtgtactttgattatattatgtaaatgactctagtctttaatattattacttatctttattgttattcgaag

SEQ ID NO: 38442 - DNA, 287 bp, Zea Mays
tttttttttctttggttctccacaacgatcctcatgggcaccacagctgcaagcgcagcccaagcatatgcataaagatagcaaaaccacagcctactctgcaatgtgttcagaagaagcataccagcgacagcgacaaacaaatatttgatcactaaaaaatatacctgcggtctccatgcgcctggtgatcatcgagttcagcacgcctctttcaccatgcctggcgatgatgataagcgcagcaaggaatggagcaaatacatcatctgattctgaaaacgaag

SEQ ID NO: 38443 - DNA, 232 bp, Zea Mays
cctttggccgccccccctctctcttcctctcttccactcttgaagccgccccaatccctctccttcttccccaagtgattgcagcgccacccctcaaccctagccgccccccacctcttcctctccaagatggagcctccccgcttggtgtccgtcgtgtgggtgcgagtcttccatgggagtttggagggaggaagaaggaagaaaagaaggaggaaaggaggaacccaag

SEQ ID NO: 38444 - DNA, 267 bp, Zea Mays
cgccccccccactctcttcctctcttccactcttgaagccgccccaatccctctccttcttccccaagtgattgcagcgccacccctcaaccctagcccccccacctcttcctctccaagatggagcctccccgtttggtgtccgtcgtgtgggtgcgagtcttccatgggagtttggagggaggaagaaggaagaaaagaaggaggaaaggaggaacccaaggtgattttcgtgatcattttgttgtatttgtgctgcaatctaat

SEQ ID NO: 38445 - DNA, 2827 bp, Zea Mays
ctcagctcagctcctgtctgtctctctatagcattagcaatagcatccatggatgatcgatcgatccatccatccatcctagcagactgtcaggcagtgtccctctcgttctcgtccatcttcttcctttcctccattccatgaaggagaagaagacatatatatcatagaatgatagtatgacggaggcttgacagcagcagcagccgcacatcacatggatccttctgtttccgtttgccgcctccacccgggcgtcgccgtcaccggcttctgccccgcctgcctccgtgaccgcctctccggcctccaccctccctccgccgctgacctacgccgctgcaagtccttctcctacgcgcgctctgcagccgcggtggagccgcagcgccgctcatgcgacctcttccgccacggtcagcccatcgcagcggcggtaccggaggaggaggaggaccagcaggagcacggccgctcacacagtcaccagtccaaaaagtcgtcgtctttgggtggcctcctgggcaacaagctgcagcaatggcgccgcaagaacaagaaggagccggagatggaggtgccctccagctgggacgcccggttgggacccgtgccggcgctcggccgcctgccggccacgatgctgtccctgcccgtggaagaggacgacgacagcatggcagcgccggcggtcccgcgctccgatgggcaaatccccgtggaggaagactactgctactactacgacaacgctaacaatatcaatgctgcggcggcggtgcccggcggctccgagcagacgagggactactacctggactcgtccagctccagcaggaggcgccgaagcgtggaccgctccaccacctccgggcgcaactccttctctgacgccaacagcagcgaggcggcgtgcaggatgatgatgatgatgaatgccgccgccaatggcaatgccagggtgtcaccggcgggcatcgccgccgcagagagtctgcaccactaccacgagtcccatcatcatcaccatcaccagagcgtgcttgtccatcatcagtgctacagagaagaagatgagcagcagcaggaggcctataatctccgcgccggcgacttctccggtagcaatggcgtgccggcgagcaagcctaataagaaggggattaaggggtggagcatctggggcctcataagcaagaagagcagcagcagcaggaagcactctgcagctgggggaggagcagtagcaggaggaggaggaggaggaggagagtacgagtacccatggccggagctccgggcaagggggtacaacgggcagatgctccggtgcaacagcagcataagcgcgagaagctccttcagcggcacaggcactgggagcgggaggaggagcgtctctggtgtggacatgcgcgataagtataacagtaacaatggcggcttgaggacgaggagggacgaggtccttctggagaggcacctcagcacgaggtcgtcttcttactcgagatcaggacatcatgacctggatccagcagctatggcaccgccgcagatgggaatgcagttgagcagccggccgcccaacatcccgaggcgctcctcttccaactccaagcatgaattgggcaagacaaggaggagcacacttggactctagctgcctgttccatcccaagtgcccgtagcattcagcatgacgtacgtacgtagtctgttctggctgacaaggtggaccatagctggtgaactgaactgcaactcatagtcagtccttcttgtgttgggtactgtactctctagctcttagactgttacataaacactctacaacaggtactttaggtgggagggggacttatatatttatcacaggcacagcctttctttctccatgattaagcatgacttgctcttcccttgtctattcaagtcaagcactgtgtcaggccaggatcattcagggacaaagatgcatcaaatggttctcctgtttgcactggcaaccaaaagagcgccagccccagccccagccatggacggcggcggaagcggatacatcccaaatccaagcgacagctaacacacataacggcaggggcaaaaatgtcatatcgcttgcagttgcggcagctggcatcaaaagaaaaaaaactagttccaactagtccctctccccaaccaccatggccgcttctgatgaccatgacccgaaggcgctgctgcaggtaagggtgagcgatgaggatggtgcgctggtggacgcgctcaaccgtcgagctgctgtttctgccgccgcccccagcttcttcgaggggttcgcgctccacgggatccgcgtggagagcatccgcccaggccacatcctctgctccttcacggtccccgcacgcctcacctccggcagcgatcacatagcccccggcgccgtggtggccctggtggacgagatcggctccgccgcctccgtgtccgacggccaccacctcaaggtctccgtcgacatgtccgtcaacttcgttgacctcgacgccgccgcgcccggggacgccctccgcatcaccgccagggcgctcggccacaagggcgcctactccggcacgcacgtcatcgtcgccaacgccgccacggggctggtggtcgccgaggggaggcactcgctcttcggcaagatgaagatcaggagcaacatctgaattggagcatgtgtgcacacagtgctgtgtttgttgtcgtgtgctctgcttctcgactccttgtcaggaatgtaatggcagcagcttgcttcttcagtaaaaaataaaaaaacagctccattattatg

SEQ ID NO: 38446 - DNA, 1398 bp, Zea Mays
agattggaatccaattccagggctacacatgcatccatggaattcatgacttgcacgcatgtggcggcgaggcaagtggcaacgtgagcggcggtacggcacaaggccacgacaggccaaaagagaggagacggagcaatggaattggaaggccacgagaggagtctgagctcgccgctttagcgagcgcaagcagagcctgccaaaaggctagagaaaaaaaaatccgccttctcctcccagtcgcaggccaggctcagcctcccctctcccctcctcggcatcttcgccgccggcgatctatctctctcacaatggcggcgcccatgtcagccatcgactcagcgtggcagaagaagagcaacacctctgcttaccaaaacagatgtgtcttgcgcctcattctctaccatgtatgtgtgaacctgcctgtcatgattttctcgtatcctgccttcaaattcatgggtctcaggagctctcttcctttgccacattggtcggttgttgtatctcaagttcttttctactttgtccttgaggattttatattctattgggggcacagggcattgcatacgaaatggctatacaaacacgttcacagcgtccaccatgagtacgccacaccctttggtttaacatcggaatatgcccacccagctgaaattttgttcctgggattcgccacagttgttggtcctgctcttactggccctcatctcttcaccctgtggctgtggatggtgttgagggttttggagacagttgaagctcacagcggctatcacttcccatggagcccatcaaatttcctgccgctgtatggcggctcggacttccatgactaccatcaccgtgtgctgtacacaaagtcagggaactatgcctcaacatttgtttacatggactggttgttcggcacggacaaggattatcgcaaggcaaagaccattgaggagaaagaagggaaaaatctgtagattgtggaagctgctcagcaagactggcgatagagtttcactcatggaaggagatatggatgcaccctagaaacagtcagtttatctcctgaccatcgatactataggttgagatattgatttcctgtgtttgctatgatcaagaatgaggccctggtggccctggtctgtcatgaactgaatttgatgatttgtcatctcctcctggtggtttgctttgcgtttctttcgtgactcgacgggatgtatacatatggaatggcctggcagcagtaataaccatctgaattgagtcgtcagcgatggtgggggtagctttgcaccctagaaactttcctctgcacgcttgtgtattttgttggtaatcgattccggaattgcattgttcctcgtacacgcgcacacaattgatctg

SEQ ID NO: 38447 - DNA, 1340 bp, Zea Mays
atctaatcatacaaattgctgacctccgtcatcagcatcttctctctctctctctctctgctgagctgcttactcattccagcttcaattttctttgtccgtgatctagctagcttgcatgtctctctagagtcgatctgaatcgatacaattgagactagctactacgagtttgcagatgcatagctagctagctctcaatcacatgaactcctccagcgccaccgctatggatcaaataggcaagtactggggcatgtggggagcaaggagaagcagcagcagcagcagcacgatccccatctctgcttgggctgcggcgtacggcggcagcagcgagccgtcgtgggaggagcaggccttcgcacgcgacgcggcggaacacctcggcggctgcgtctggccgccgcgctcctactcgtgcaccttctgccagcgcgagttccggtcggcgcaggcactcggtggccacatgaacgtccaccgccgcgaccgagctcttctccggctggggggctcgtcctcccccgaggacgtgcacgccaccaccaacgatcagccacacccgcagcaaggggatggagatgccaacaccaccaccaccactacttacttgtcaagaattatcaaggagagcaagaacaagcgcttcatgcccatgccagatcactctgtcgcggggatgagagaagatcaggcggcggccatagatgatcatcgtcataatgaagatggcgacagctggcggtcagcctcagccgcgaaaaagaggaggcgtctggatcatccgttggcaacggcggcggcgcttctgatctttgtgcagccagcaccaaaggccgctaccaatgttgcagcatgtgaatcacaaggaggagctgatcatgagacaaaggtaccgcacacgacaaccctaacaagccctagctctagttcccctcttcttctggatcaacgacatgaattggatctagagctaaggcttgggactacaccaaaagttacgtacatacatggcaacgatacacgaagctagctagctagttcgtctgcacgctagtagttattaagcagatcgatttatttggtcttttgaatttactatcatatcactagttactcttgcttggttgttcatcatctttctcctcttcaatttctccccctttttcctttcttctgctatccatggggccgtacagactattacattttttggccaaagagctatacctctccctctttcaattcaatctcaactattgttcttgtttcaatacatacataaaaagttaaggggcatacgaatacaatacatagctcaaacattcttcctctgt

SEQ ID NO: 38448 - DNA, 1751 bp, Zea Mays
ctcaattgttgggccatgcttgcttgaagcccagaagggcaaaatgatccaaagcctgaaaaagtggtatcccactgcattatccagaaccgaaaaaaaaaactctgcggagattgaccgaccaccaccaccgcctgcgttcccgcgccgccaccgccatggctgccgctgccccccatgcatactcctccctcgtgcctgtttcggctgcgcggcctctctccggaagcacagtttctttcggtgcttcgtgccacaagtggaggaaggttccggcatggcgactccactgtgttgctgaagacgaagaggaagtcaaagattttggagtcaatatggcactatccatgctaaaattttacaaacgagaaatatcacctttactaccttcaagctgccgatatgtaccaacttgcagtgagtactctatgcaggcgtacaaacgatatggtgttgtaaagggttccatcttgactgcttggcgcctttgccgttgtaatcctcttggtggatatgggtatgatcctccaaaatggtttggcgaggaagatgtacctctgcaatagtaatgcctagtaattgaaagtacaggcattgtaattcttcagatccagacttgcagcagtttttatgtaatttactgaaactaaacccagaaacacaaggataaaattctgcaatatctatgcacctctgaaggagcatgtattttttttgtgtatgcctgtatggttattttatctagttctcgtgcaattcctccaaggtgattgtatgagcgaaattcatttattacctacaattaacatccataattcaccatattcgcctgtgtattctagtccgaggatccaactattttttctccaaagatactgatgacccaactgtcttttgctgcttctaaaatccataagggcttgttcggttagtaatggattgaaggggattggtgaggatatttcgagaaaaaaggggattggtgaggattaaatccctttctagtcaaaattgagtagaaggggatttaatccccctcaattctctccgatccagatgcaaccgaacaaggcctaaagaatttttcagtgaaacagatagatgtatggttgtagcttgtaacacttgttaggacagctaaaggactagcatcgacatatttgttattgaacatgatgatcatttcaaaattcaaaactaccacttcgttaaaaaattcaatgcattgtaggaacaattgtagttaaggagttcaagggaagactgtattcttgcagagtttgtaccatgttgtaatctttggctcacgggttctggtcactgtcagaaacaatgcacaactgtatgtggtagtttcaagggaaagcctccccatcgactatactgccaaggaacttgattggatttctgagatttctatgctgaagatacataaatggcaaggggaagaggtgacgcactcatgcttggcattagagtcaggtgctcggtggttccaacatgcatggcctcgtatgtttgttggctttgtgcgtcatctgtgatttgtgtccctttcagtactttggcagtaccaccatgctgatcgatgatcccgtccaattttgttgcttgctccgtttgtccttaataattatcattgagtgcctaatgtgaaggctatgccatcctttgttatgaatgcccatcaatgtaaaagtctaaggtgaggctccccggttggataatataaacactgtcatgcatggttg

SEQ ID NO: 38449 - DNA, 1429 bp, Zea Mays
aagcccagaagggcaaaatgatccaaagcctgaaaaagtggtatcccactgcattatccagaaccgaaaaaaaaaactctgcggagattgaccgaccaccaccaccgcctgcgttcccgcgccgccaccgccatggctgccgctgccccccatgcatactcctccctcgtgcctgtttcggctgcgcggcctctctccggaagcacagtttctttcggtgcttcgtgccacaagtggaggaaggttccggcatggcgactccactgtgttgctgaagacgaaggcctgcttgactacattatgtgcatattgtgattctcagcagaggaagtcaaagattttggagtcaatatggcactatccatgctaaaattttacaaacgagaaatatcacctttactaccttcaagctgccgatatgtaccaacttgcagtgagtactctatgcaggcgtacaaacgatatggtgttgtaaagggttccatcttgactgcttggcgcctttgccgttgtaatcctcttggtggatatgggtatgatcctccaaaatggtttggcgaggaagatgtacctctgcaatagtaatgcctagtaattgaaagtacaggcattgtaattcttcagatccagacttgcagcagtttttatagtttgtaccatgttgtaatctttggctcacgggtatgtgctacacctgccgtacatttaaatatcttccttaggtatgctcatctgaacttcaggtcaccatggccccatatccttgtatgtggtgcttatttaattgtttcttctcggggtatcatatctgttcttgtccctgtccaatattttatacggtacatgctgtgtagatttggatacgtcgtcacatcgattcatatatcccagtggacctatcactggtcaaacttttttgtttttcagattgattatttggtgtccattttgatgttttgtttacccattccccatttccttttttcaggttctggtcactgtcagaaacaatgcacaactgtatgtggtagtttcaagggaaagcctccccatcgactatactgccaaggaacttgattggatttctgagatttctatgctgaagatacataaatggcaaggggaagaggtgacgcactcatgcttggcattagagtcaggtgctcggtggttccaacatgcatggcctcgtatgtttgttggctttgtgcgtcatctgtgatttgtgtccctttcagtactttggcagtaccaccatgctgatcgatgatcccgtccaattttgttgcttgctccgtttgtccttaataattatcattgagtgcctaatgtgaaggctatgccatcctttgttatgaatgcccatcaatgtaaaagtctaaggtgaggctccccggttggataatataaacactgtcatgcatggttg

SEQ ID NO: 38450 - DNA, 1963 bp, Zea Mays
gaaaaagtggtatcccactgcattatccagaaccgaaaaaaaaaactctgcggagattgaccgaccaccaccaccgcctgcgttcccgcgccgccaccgccatggctgccgctgccccccatgcatactcctccctcgtgcctgtttcggctgcgcggcctctctccggaagcacagtttctttcggtgcttcgtgccacaagtggaggaaggttccggcatggcgactccactgtgttgctgaagacgaagaggaagtcaaagattttggagtcaatatggcactatccatgctaaaattttacaaacgagaaatatcacctttactaccttcaagctgccgatatgtaccaacttgcagtgagtactctatgcaggcgtacaaacgatatggtgttgtaaagggttccatcttgactgcttggcgcctttgccgttgtaatcctcttggtggatatgggtatgatcctccaaaatggtttggcgaggaagatgtacctctgcaatagtaatgcctagtaattgaaagtacaggcattgtaattcttcagatccagacttgcagcagtttttatgtaatttactgaaactaaacccagaaacacaaggataaaattctgcaatatctatgcacctctgaaggagcatgtattttttttgtgtatgcctgtatggttattttatctagttctcgtgcaattcctccaaggtgattgtatgagcgaaattcatttattacctacaattaacatccataattcaccatattcgcctgtgtattctagtccgaggatccaactattttttctccaaagatactgatgacccaactgtcttttgctgcttctaaaatccataagggcttgttcggttagtaatggattgaaggggattggtgaggatatttcgagaaaaaaggggattggtgaggattaaatccctttctagtcaaaattgagtagaaggggatttaatccccctcaattctctccgatccagatgcaaccgaacaaggcctaaagaatttttcagtgaaacagatagatgtatggttgtagcttgtaacacttgttaggacagctaaaggactagcatcgacatatttgttattgaacatgatgatcatttcaaaattcaaaactaccacttcgttaaaaaattcaatgcattgtaggaacaattgtagttaaggagttcaagggaagactgtattcttgcagagtttgtaccatgttgtaatctttggctcacgggtatgtgctacacctgccgtacatttaaatatcttccttaggtatgctcatctgaacttcaggtcaccatggccccatatccttgtatgtggtgcttatttaattgtttcttctcggggtatcatatctgttcttgtccctgtccaatattttatacggtacatgctgtgtagatttggatacgtcgtcacatcgattcatatatcccagtggacctatcactggtcaaacttttttgtttttcagattgattatttggtgtccattttgatgttttgtttacccattccccatttccttttttcaggttctggtcactgtcagaaacaatgcacaactgtatgtggtagtttcaagggaaagcctccccatcgactatactgccaaggaacttgattggatttctgagatttctatgctgaagatacataaatggtaatggattttcttctatacaaacatggcccaaaacaaagcatcttctataaactactaagctacttggtgaccagtctatcagtatagttgaggatttgtattctaggaatcctattggtataacatgaggactgtgtagtttagtttagttaaaaaagtatactatctatgatctggaagaaaactgatcagaaaattcttttgatgcacgattttaacatgatcatcatgctaaatttataatctggtaaagtttattatcatattcagaa

SEQ ID NO: 38451 - DNA, 1020 bp, Zea Mays
gaaaaagtggtatcccactgcattatccagaaccgaaaaaaaaaactctgcggagattgaccgaccaccaccaccgcctgcgttcccgcgccgccaccgccatggctgccgctgccccccatgcatactcctccctcgtgcctgtttcggctgcgcggcctctctccggaagcacagtttctttcggtgcttcgtgccacaagtggaggaaggttccggcatggcgactccactgtgttgctgaagacgaaggcctgcttgactacattatgtgcatattgtgattctcagcagaggaagtcaaagattttggagtcaatatggcactatccatgctaaaattttacaaacgagaaatatcacctttactaccttcaagctgccgatatgtaccaacttgcagtgagtactctatgcaggcgtacaaacgatatggtgttgtaaagggttccatcttgactgcttggcgcctttgccgttgtaatcctcttggtggatatgggtatgatcctccaaaatggtttggcgaggaagatgtacctctgcaatagtaatgcctagtaattgaaagtacaggcattgtaattcttcagatccagacttgcagcagtttttatgttctggtcactgtcagaaacaatgcacaactgtatgtggtagtttcaagggaaagcctccccatcgactatactgccaaggaacttgattggatttctgagatttctatgctgaagatacataaatggtaatggattttcttctatacaaacatggcccaaaacaaagcatcttctataaactactaagctacttggtgaccagtctatcagtatagttgaggatttgtattctaggaatcctattggtataacatgaggactgtgtagtttagtttagttaaaaaagtatactatctatgatctggaagaaaactgatcagaaaattcttttgatgcacgattttaacatgatcatcatgctaaatttataatctggtaaagtttattatcatattcagaa

SEQ ID NO: 38452 - DNA, 914 bp, Zea Mays
gaaaaagtggtatcccactgcattatccagaaccgaaaaaaaaaactctgcggagattgaccgaccaccaccaccgcctgcgttcccgcgccgccaccgccatggctgccgctgccccccatgcatactcctccctcgtgcctgtttcggctgcgcggcctctctccggaagcacagtttctttcggtgcttcgtgccacaagtggaggaaggttccggcatggcgactccactgtgttgctgaagacgaagcagaggaagtcaaagattttggagtcaatatggcactatccatgctaaaattttacaaacgagaaatatcacctttactaccttcaagctgccgatatgtaccaacttgcagtgagtactctatgcaggcgtacaaacgatatggtgttgtaaagggttccatcttgactgcttggcgcctttgccgttgtaatcctcttggtggatatgggtatgatcctccaaaatggtttggcgaggaagatgtacctctgcaatagttctggtcactgtcagaaacaatgcacaactgtatgtggtagtttcaagggaaagcctccccatcgactatactgccaaggaacttgattggatttctgagatttctatgctgaagatacataaatggtaatggattttcttctatacaaacatggcccaaaacaaagcatcttctataaactactaagctacttggtgaccagtctatcagtatagttgaggatttgtattctaggaatcctattggtataacatgaggactgtgtagtttagtttagttaaaaaagtatactatctatgatctggaagaaaactgatcagaaaattcttttgatgcacgattttaacatgatcatcatgctaaatttataatctggtaaagtttattatcatattcagaa

SEQ ID NO: 38453 - DNA, 1698 bp, Zea Mays
gaaaaagtggtatcccactgcattatccagaaccgaaaaaaaaaactctgcggagattgaccgaccaccaccaccgcctgcgttcccgcgccgccaccgccatggctgccgctgccccccatgcatactcctccctcgtgcctgtttcggctgcgcggcctctctccggaagcacagtttctttcggtgcttcgtgccacaagtggaggaaggttccggcatggcgactccactgtgttgctgaagacgaaggcctgcttgactacattatgtgcatattgtgattctcagcagaggaagtcaaagattttggagtcaatatggcactatccatgctaaaattttacaaacgagaaatatcacctttactaccttcaagctgccgatatgtaccaacttgcagtgagtactctatgcaggcgtacaaacgatatggtgttgtaaagggttccatcttgactgcttggcgcctttgccgttgtaatcctcttggtggatatgggtatgatcctccaaaatggtttggcgaggaagatgtacctctgcaatagtaatgcctagtaattgaaagtacaggcattgtaattcttcagatccagacttgcagcagtttttatgtaatttactgaaactaaacccagaaacacaaggataaaattctgcaatatctatgcacctctgaaggagcatgtattttttttgtgtatgcctgtatggttattttatctagttctcgtgcaattcctccaaggtgattgtatgagcgaaattcatttattacctacaattaacatccataattcaccatattcgcctgtgtattctagtccgaggatccaactattttttctccaaagatactgatgacccaactgtcttttgctgcttctaaaatccataagggcttgttcggttagtaatggattgaaggggattggtgaggatatttcgagaaaaaaggggattggtgaggattaaatccctttctagtcaaaattgagtagaaggggatttaatccccctcaattctctccgatccagatgcaaccgaacaaggcctaaagaatttttcagtgaaacagatagatgtatggttgtagcttgtaacacttgttaggacagctaaaggactagcatcgacatatttgttattgaacatgatgatcatttcaaaattcaaaactaccacttcgttaaaaaattcaatgcattgtaggaacaattgtagttaaggagttcaagggaagactgtattcttgcagagtttgtaccatgttgtaatctttggctcacgggttctggtcactgtcagaaacaatgcacaactgtatgtggtagtttcaagggaaagcctccccatcgactatactgccaaggaacttgattggatttctgagatttctatgctgaagatacataaatggtaatggattttcttctatacaaacatggcccaaaacaaagcatcttctataaactactaagctacttggtgaccagtctatcagtatagttgaggatttgtattctaggaatcctattggtataacatgaggactgtgtagtttagtttagttaaaaaagtatactatctatgatctggaagaaaactgatcagaaaattcttttgatgcacgattttaacatgatcatcatgctaaatttataatctggtaaagtttattatcatattcagaa
